United States Patent Application Publication US 2018/0126003 A1 - sequence listing, part 191

SEQ ID NO: 342446 - DNA, 1674 bp, Artificial Sequence
  derived and/or modified sequence
atgttcagctgcgtgaagccctacgaggaccagaactacagcgccctgagaagagactgcagaagaagaaaggtgctgttcgaggaccccctgttccccgccaccgacgacagcctgtactacaagggcacccccggccccgccgtgagatggaagagacccaagtacagcggccacagcctggccccccacagacccggctggggcgacgccagaagaatggagaacgtgcccagacccggcagcagcggctgccccagcagcagcctgagagccagagacctgggcatctgcgaggaccccagactgttcgtggacggcatcagcagccacgacctgcaccagggccaggtgggcaactgctggttcgtggccgcctgcagcagcctggccagcagagagagcctgtggcagaaggtgatccccgactggaaggagcaggagtgggaccccgagaagcccaacgcctacgccggcatcttccacttccacttctggagattcggcgagtgggtggacgtggtgatcgacgacagactgcccaccgtgaacaaccagctgatctactgccacagcaacagcagaaacgagttctggtgcgccctggtggagaaggcctacgccaagctggccggctgctaccaggccctggacggcggcaacaccgccgacgccctggtggacttcaccggcggcgtgagcgagcccatcgacctgaccgagggcgacttcgccaacgacgagaccaagagaaaccagctgttcgagagaatgctgaaggtgcacagcagaggcggcctgatcagcgccagcatcaaggccgtgaccgccgccgacatggaggccagactggcctgcggcctggtgaagggccacgcctacgccgtgaccgacgtgagaaaggtgagactgggccacggcctgctggccttcttcaagagcgagaagctggacatgatcagactgagaaacccctggggcgagagagagtggaacggcccctggagcgacaccagcgaggagtggcagaaggtgagcaagagcgagagagagaagatgggcgtgaccgtgcaggacgacggcgagttctggatgaccttcgaggacgtgtgcagatacttcaccgacatcatcaagtgcagagtgatcaacaccagccacctgagcatccacaagacctgggaggaggccagactgcacggcgcctggaccctgcacgaggaccccagacagaacagaggcggcggctgcatcaaccacaaggacaccttcttccagaacccccagtacatcttcgaggtgaagaagcccgaggacgaggtgctgatctgcatccagcagagacccaagagaagcaccagaagagagggcaagggcgagaacctggccatcggcttcgacatctacaaggtggaggagaacagacagtacagaatgcacagcctgcagcacaaggccgccagcagcatctacatcaacagcagaagcgtgttcctgagaaccgaccagcccgagggcagatacgtgatcatccccaccaccttcgagcccggccacaccggcgagttcctgctgagagtgttcaccgacgtgcccagcaactgcagagagctgagactggacgagcccccccacacctgctggagcagcctgtgcggctacccccagtggtag

SEQ ID NO: 342447 - protein, 255 aa, Artificial Sequence
  derived and/or modified sequence
MFISVAQRQRENAFSCSTFLRCDRHHTSSAIPVPKRQSSIFGGADVGFSGGIPSPDKGHRKRASSENERLQYKTPPPSYNSALAQPVTTVPSMGETERKITSLSSSLDTSLDFSKENKKKGEDLVGSLNGGHANVHPSQEQGEALSGHRATVNGTLLPSEQAGSASVQLPGEFHPVSEAELCCTVEQAEEIIGLEATGFASGDQLEAFNCIPVDSAVAVECDEQVLGEFEEFSRRIYALNENVSSFRRPRRSSDK

SEQ ID NO: 342448 - protein, 292 aa, Artificial Sequence [sequence omitted]

SEQ ID NO: 342449 - protein, 604 aa, Artificial Sequence
  derived and/or modified sequence
MFEKLTLYCDSYIQLIPISFVLGFYVTLVVTRWWNQYENLPWPDRLMSLVSGFVEGKDEQGRLLRRTLIRYANLGNVLILRSVSTAVYKRFPSAQHLVQAGFMTPAEHKQLEKLSLPHNMFWVPWVWFANLSMKAWLGGRIRDPILLQSLLNEMNTLRTQCGHLYAYDWISIPLVYTQVVTVAVYSFFLTCLVGRQFLNPAKAYPGHELDLVVPVFTFLQFFFYVGWLKVAEQLINPFGEDDDDFETNWIVDRNLQVSLLAVDEMHQDLPRMEPDMYWNKPEPQPPYTAASAQFRRASFMGSTFNISLNKEEMEFQPNQEDEEDAHAGIIGRFLGLQSHDHHPPRANSRTKLLWPKRESLLHEGLPKNHKAAKQNVRGQEDNKAWKLKAVDAFKSAPLYQRPGYYSAPQTPLSPTPMFFPLEPSAPSKLHSVTGIDTKDKSLKTVSSGAKKSFELLSESDGALMEHPEVSQVRRKTVEFNLTDMPEIPENHLKEPLEQSPTNIHTTLKDHMDPYWALENRSVLHLNQGHCIALCPTPASLALSLPFLHNFLGFHHCQSTLDLRPALAWGIYLATFTGILGKCSGPFLTSPWYHPEDFLGPGEGR

SEQ ID NO: 342450 - DNA, 4267 bp, Artificial Sequence
  derived and/or modified sequence
caccagcctagtcgccagaccttctgtgggatcatcggacccacctggaaccccacctgctggccctcacggaagaacaacagctgatgtttgagaaactgactctgtattgcgacagctacatccagctcatccccatttccttcgtgctgggcttctacgtgacgctggtcgtgacccgctggtggaaccagtacgagaacctgccgtggcccgaccgcctcatgagcctggtgtcgggcttcgtcgaaggcaaggacgagcaaggccggctgctgcggcgcacgctcatccgctacgccaacctgggcaacgtgctcatcctgcgcagcgtcagcaccgcagtctacaagcgcttccccagcgcccagcacctggtgcaagcaggctttatgactccggcagaacacaagcagttggagaaactgagcctaccacacaacatgttctgggtgccctgggtgtggtttgccaacctgtcaatgaaggcgtggcttggaggtcgaatccgggaccctatcctgctccagagcctgctgaacgagatgaacaccttgcgtactcagtgtggacacctgtatgcctacgactggattagtatcccactggtgtatacacaggtggtgactgtggcggtgtacagcttcttcctgacttgtctagttgggcggcagtttctgaacccagccaaggcctaccctggccatgagctggacctcgttgtgcccgtcttcacgttcctgcagttcttcttctatgttggctggctgaaggtggcagagcagctcatcaacccctttggagaggatgatgatgattttgagaccaactggattgtcgacaggaatttgcaggtgtccctgttggctgtggatgagatgcaccaggacctgcctcggatggagccggacatgtactggaataagcccgagccacagcccccctacacagctgcttccgcccagttccgtcgagcctcctttatgggctccaccttcaacatcagcctgaacaaagaggagatggagttccagcccaatcaggaggacgaggaggatgctcacgctggcatcattggccgcttcctaggcctgcagtcccatgatcaccatcctcccagggcaaactcaaggaccaaactactgtggcccaagagggaatcccttctccacgagggcctgcccaaaaaccacaaggcagccaaacagaacgttaggggccaggaagacaacaaggcctggaagcttaaggctgtggacgccttcaagtctgccccactgtatcagaggccaggctactacagtgccccacagacgcccctcagccccactcccatgttcttccccctagaaccatcagcgccgtcaaagcttcacagtgtcacaggcatagacaccaaagacaaaagcttaaagactgtgagttctggggccaagaaaagttttgaattgctctcagagagcgatggggccttgatggagcacccagaagtatctcaagtgaggaggaaaactgtggagtttaacctgacggatatgccagagatccccgaaaatcacctcaaagaacctttggaacaatcaccaaccaacatacacactacactcaaagatcacatggatccttattgggccttggaaaacaggtctgtcctccacctgaaccaggggcactgcattgccctgtgccccaccccagcttcccttgctctgagcctacccttcctccacaatttcctagggttccatcactgccagagcacactggacctacgcccagcactggcttggggtatatacttggccaccttcacagggatcctagggaagtgttcgggaccttttctcacttcaccctggtatcacccggaagacttcttgggaccaggtgaaggaagatgaggttgtgctgaccagaatgctgctggagaactgccccagggctgacaggccaggcttagctgagcagatgttatcactggccccaacttactttgagcaagggtggctgacccaaaaccatgaggtggcagtcagctggatgacagatgaacacttcccccataactatttagggtagtacccaagcactacaggaaagggtggcaggaactgcctcactcctaggaactggtagatggtgaggttgagggtgtccagcgcccttaggtcattttctcactgcctgggaacctcaccaaaatacttcttgcttccttggggtcagcccaaagctgtcacaaaatcagatatttccctttattccagatttcctggacactttcacccaattataaacaccccacttcagccccaatcacgtgggaggaagtgtaacttcccttttctggattctcaagcagttactttcacggtcagaacacgcagctattatgattgaaaacttaaaagggcaacaatttcagtcttgcttctagggctagacaggaacttggcaaacatctgtggcctgttcagcaaaggatgttaatatttaagaatcttgtcttgggctgggtgtggaggcaagtggatcacaggaggtcaggagtttgagaccaacctggccaacatgatgaaaccccatctctaccaaaaaaaatacaaatcagctgggcgtcgtggtgtgcctgtagtcccaacgcaggaggttgaggggagaattgcttgaacccaggaggtggtggttgcagtgagattgagcaactgcaatccagcctgggcgacggagtgagactgtctcaaaaaaaaaaaaaaaaggatcgtctcaacctttgccctcctactgcaacattttggtatttgaaatgaagggaccttccatacttatgctgttaatactttcattctcactagggatgaagcacattcctaacctgcttcctaatggggatgcttcgccagccaggtcctcacctgtgtgtacaccagcaggacactgatccagtcacagccatacagctgtccacactgaagaacatgtcctacaacagcctgaatcaaatggttagcttaatagataaaaatcccagactacttcagcctttaatgccttttattcataaaaactgtgaaagctagactgaaccattggaaacatttaactcagactctggattcagagtcgggaacccttagttctatctgaatccaagacagccacaccttagtatactgcccaaactaatgagtttaataaatacaaatactcgtttctttttgattagtgtgattagaactgaacaacggcacttaaggaatctggaagatagcctggatagatttctgattcatcccaagacctcaaagacaacacctgggtaccaaatttctttatttgaaggaatggtacaaatcaaagaacttaagtggatgttttggtacaacttatagaaaaggtaaaggaaaccccaacatgcatgcactgccttggtgaccagggaagtcaccccacggctatggggaaattagcccgaggcttagctttcattatcactgtctcccagggtgtgcttgtcaaagagatattccgccaagccagattcgggcgctcccatcttgcgcaagttggtcacgtggtcacccaattctttgatggctttcacctgctcattcaggtaatgtgtctcaatgaagtcacacaactgcaaaacaatggggaagacagttagtgggcagctttcccaatccctaaggcaaatgatttcctccatttatttcctggggttccaatactcacatgggggtcatttttgtcagtggccagtttgtgcagttccagtagtgactgattcacatttttttccaaatgtaatgcacactccattgcattcagcccgctctcccagtcatcacagtctggtttctgaatgagaataggttaatgcatctctaccaactaacctagaagtcagcaagcccatcatctctaaccaccacgttttggcaaaagggacattactatttgcctaatttagtttagatggtaagcctaaaaaagcacaaaaggcaaaagcccagtgtatcatcactttataagggcaattgctagtttaagtgatttctgatacccgaacactgccagatgatgaagtatgacacccctaggatcttttgttcaccttgatatcctgaaggaagattcggccacctcgttggttctgcagcttcatcagtttctcagcatgttccctctcctcatgagattggtgaagaaagtatttggcaaagttcttcaaagccacatcatcgcggtcaaagtagtaaga

SEQ ID NO: 342451 - DNA, 879 bp, Artificial Sequence
  derived and/or modified sequence
atggagttccagcccaaccaggaggatgaggaagacgctcacgcaggaattattggacgatttctcgggctgcagagccatgatcaccaccccccccgggcaaactcccgcacgaagcttttatggccgaagagagagagcctcctgcacgaaggtctgcccaaaaatcataaagccgctaagcaaaacgtacgcggacaagaagacaacaaggcctggaaactcaaagccgtggatgctttcaaatctgcgcccctatatcagcgccccggatattactctgctcctcagaccccgctgagtcctactcctatgtttttccccctagaaccttcagccccctccaagctgcacagtgtaaccggcattgatactaaagacaaatctcttaagaccgtctccagcggggccaaaaaaagcttcgagctgctctcggaatctgatggtgcactgatggaacacccagaagtttcgcaggtgagaaggaagaccgtggagtttaacttgactgacatgccggaaatccctgagaaccacctgaaagaacctctcgagcagagccccaccaatattcacactaccctgaaagaccacatggacccttactgggccctggaaaataggtctgtcctacatctaaatcagggacactgtatagccttgtgccctacccccgctagtttggccctgtcactgccgttccttcacaacttcctgggctttcatcactgccagtctactttggacctgagaccagcactagcatggggtatttatctcgcaaccttcacaggaattcttggaaagtgctctgggcccttcctgacttccccatggtaccatccggaagacttcctgggaccaggggaaggccggtag

SEQ ID NO: 342452 - DNA, 879 bp, Artificial Sequence
  derived and/or modified sequence
atggagttccagcccaaccaggaggatgaagaagatgcccatgctggcatcatcggccgcttcctgggcctgcagagccatgaccaccaccccccccgggccaacagcaggaccaagctgctgtggcccaagcgggagagcctgctgcacgagggcctgcccaagaaccacaaggccgccaagcagaatgtgcggggccaggaggacaacaaggcctggaagctgaaggctgtggatgccttcaagagcgcccccctgtaccagaggcctggctactacagcgccccccagacccccctgagccccacccccatgttcttccccctggagcccagcgcccccagcaagctgcacagcgtgactggaattgacaccaaggacaagagcctgaagacagtgtcctctggggccaagaagagctttgagctgctgtctgagagtgatggagccctgatggagcaccctgaggtgtcccaggtgcggaggaagacagtggagttcaacctgacagacatgcctgagatccctgagaaccacctgaaggagcccctggagcagagccccaccaacatccacaccaccctgaaggaccacatggacccctactgggccctggagaacagatctgtgctgcacctgaaccagggccactgcatcgccctgtgccccaccccagccagcctggccctgagcctgcccttcctgcacaacttcctgggcttccaccactgccagagcaccctggacctgcggcctgccctggcctggggcatctacctggccaccttcaccggcatcctgggcaaatgttctggccccttcctgaccagcccctggtaccaccctgaggacttcctgggccctggagagggccgctag

SEQ ID NO: 342453 - DNA, 879 bp, Artificial Sequence
  derived and/or modified sequence
atggagttccagcccaaccaggaggacgaggaggacgcccacgccggtatcatcgggagatttcttggactacagtcccatgatcatcacccaccccgggccaactcccgcacaaagttgctgtggcccaagagggaaagtctgctgcatgaaggcttacccaagaatcataaggccgcaaaacagaatgttcggggacaagaggacaataaagcctggaaactgaaagcggtggatgccttcaagagtgcccctctgtaccagcgtccaggctattactcagctccccagacacccctgagccccactccaatgttcttccctctggagccgtctgccccaagcaaactgcacagtgtgactggtatagatactaaggacaagagtcttaaaactgtaagtagcggcgctaagaagtcttttgagctcctgtctgagtctgatggtgccttaatggagcaccctgaggtgagtcaggtgaggaggaagacagtcgagtttaatctgacagatatgccagagatacccgagaatcacctcaaggaacctctcgagcagagccctacaaatattcacacaacactgaaagaccacatggacccctactgggcacttgagaaccgatctgttctacatctgaaccagggccactgcatcgcactttgccctacccctgccagcttggccctctcgctgcctttccttcacaatttcctcggtttccaccactgtcaaagcactctcgatctgcgacctgccctcgcttggggtatctacctggcgacattcaccggtatcctcggcaagtgcagtggccctttcctgacttcgccttggtaccatcctgaggactttctaggcccgggagagggcagatag

SEQ ID NO: 342454 - DNA, 879 bp, Artificial Sequence
  derived and/or modified sequence
atggaattccagccaaaccaggaggatgaggaagacgcgcatgcaggaatcataggcagatttctgggattacagagccatgatcatcaccccccaagggcgaactcgagaactaagctgctgtggccaaagcgcgaatctctgttacacgagggactgcccaagaatcacaaggccgcaaagcaaaatgtcaggggccaagaggataacaaggcttggaagttaaaggcagtagacgcctttaaatctgcgcctctgtaccaaaggcccggttactattcagctccccagacacccctgtcccctactcccatgtttttccccctcgaaccaagtgccccttccaagctgcattcagtgaccggaatagacacaaaagacaagagcctgaaaaccgtaagtagcggtgccaaaaaatcttttgagctgctgagtgagagcgatggggctctgatggaacaccctgaggtctcccaggtgcgacggaagacagtagaattcaacttaaccgatatgccggaaataccagaaaatcacctaaaggagcccctcgagcaatcaccaacgaacatccataccaccctgaaagatcatatggatccgtattgggccctggagaatcgaagcgtgctgcatctgaatcaaggtcactgcatcgcactctgcccgaccccggcaagcctggccttgagtctgccattccttcacaacttcctggggtttcaccattgccagagtacactcgatcttcgccctgcattagcatggggtatttaccttgctacatttaccgggatactcggaaaatgtagcggccctttcctaacctccccatggtatcacccagaggatttcctgggaccaggcgagggcagatag

SEQ ID NO: 342455 - DNA, 1829 bp, Artificial Sequence
  derived and/or modified sequence
tcaggggtcagaacactggtggagcagatcctttagcctctggattttagggccatggtagagggggtgttgccctaaattccagccctggtctcagcccaacaccctccaagaagaaattagaggggccatggccaggctgtgctagccgttgcttctgagcagattacaagaagggactaagacaaggactcctttgtggaggtcctggcttagggagtcaagtgacggcggctcagcactcacgtgggcagtgccagcctctaagagtgggcaggggcactggccacagagtcccagggagtcccaccagcctagtcgccagaccttctgtgggatcatcggacccacctggaaccccacctgctggccctcacggaagaacaacagctgatgtttgagaaactgactctgtattgcgacagctacatccagctcatccccatttccttcgtgctggggaaaggtgcggactgcagccagtgaaactgaagttagacgttaggcttctacgtgacgctggtcgtgacccgctggtggaaccagtacgagaacctgccgtggcccgaccgcctcatgagcctggtgtcgggcttcgtcgaaggcaaggacgagcaaggccggctgctgcggcgcacgctcatccgctacgccaacctgggcaacgtgctcatcctgcgcagcgtcagcaccgcagtctacaagcgcttccccagcgcccagcacctggtgcaagcagcctgaacaaagaggagatggagttccagcccaatcaggaggacgaggaggatgctcacgctggcatcattggccgcttcctaggcctgcagtcccatgatcaccatcctcccagggcaaactcaaggaccaaactactgtggcccaagagggaatcccttctccacgagggcctgcccaaaaaccacaaggcagccaaacagaacgttaggggccaggaagacaacaaggcctggaagcttaaggctgtggacgccttcaagtctgccccactgtatcagaggccaggctactacagtgccccacagacgcccctcagccccactcccatgttcttccccctagaaccatcagcgccgtcaaagcttcacagtgtcacaggcatagacaccaaagacaaaagcttaaagactgtgagttctggggccaagaaaagttttgaattgctctcagagagcgatggggccttgatggagcacccagaagtatctcaagtgaggaggaaaactgtggagtttaacctgacggatatgccagagatccccgaaaatcacctcaaagaacctttggaacaatcaccaaccaacatacacactacactcaaagatcacatggatccttattgggccttggaaaacaggtctgtcctccacctgaaccaggggcactgcattgccctgtgccccaccccagcttcccttgctctgagcctacccttcctccacaatttcctagggttccatcactgccagagcacactggacctacgcccagcactggcttggggtatatacttggccaccttcacagggatcctagggaagtgttcgggaccttttctcacttcaccctggtatcacccggaagacttcttgggaccaggtgaaggaagatgaggttgtgctgaccagaatgctgctggagaactgccccagggctgacaggccaggcttagctgagcagatgttatcactggccccaacttactttgagcaagggtggctgacccaaaaccatgaggtggcagtcagctggatgacagatgaacacttcccccataactatttagggtagtacccaagcactacagg

SEQ ID NO: 342456 - DNA, 879 bp, Artificial Sequence
  derived and/or modified sequence
atggagttccagcccaaccaggaggacgaggaggacgcccacgccggcatcatcggcagattcctgggcctgcagagccacgaccaccacccccccagagccaacagcagaaccaagctgctgtggcccaagagagagagcctgctgcacgagggcctgcccaagaaccacaaggccgccaagcagaacgtgagaggccaggaggacaacaaggcctggaagctgaaggccgtggacgccttcaagagcgcccccctgtaccagagacccggctactacagcgccccccagacccccctgagccccacccccatgttcttccccctggagcccagcgcccccagcaagctgcacagcgtgaccggcatcgacaccaaggacaagagcctgaagaccgtgagcagcggcgccaagaagagcttcgagctgctgagcgagagcgacggcgccctgatggagcaccccgaggtgagccaggtgagaagaaagaccgtggagttcaacctgaccgacatgcccgagatccccgagaaccacctgaaggagcccctggagcagagccccaccaacatccacaccaccctgaaggaccacatggacccctactgggccctggagaacagaagcgtgctgcacctgaaccagggccactgcatcgccctgtgccccacccccgccagcctggccctgagcctgcccttcctgcacaacttcctgggcttccaccactgccagagcaccctggacctgagacccgccctggcctggggcatctacctggccaccttcaccggcatcctgggcaagtgcagcggccccttcctgaccagcccctggtaccaccccgaggacttcctgggccccggcgagggcagatag

SEQ ID NO: 342457 - protein, 482 aa, Artificial Sequence [sequence omitted]

SEQ ID NO: 342458 - DNA, 1449 bp, Artificial Sequence
  derived and/or modified sequence
atgctcacatatagggtcgacgcagataagggctttaatttttctgtgggagatgatgcttttgtgtgtcagaagaaaaatcacttccaagttacagtttacattgggatgctgggagagccgaaatatgttaaaacccccgaggggttaaagcctctcgattgcttttatctgaagctccacggactggaggccctcaatcagagcattaacatcgagcaaagccagagcgacagaagcaaacggccgttcaatccagtgacagtgaatctgccccccgaacaagttactaaagttactgtcggcagactccatttttcagaaacaaccgccaataatatgcgcaaaaagggtaagccaaaccccgatcagcgatattttatgctagtagtggccctccaggcacacgcccagaatcagaattatacacttgccgcacaaattagcgaacgcattatagtgcgggcaagcaaccccggacagttcgaaagcgactccgacgtgctgtggcaaagagcccaggtgccggatactgtctttcaccatggcagagtcggcatcaatacggatcggccggacgaagcccttgtggtccatggcaacgtgaaggttatggggtcccttatgcacccatctgatctgcgagcgaaagagcacgtccaggaggtcgataccaccgaacagttgaagaggatcagccgaatgaggctggttcactacagatacaaacccgaatttgcagcttcagccggcatagaagctaccgcccccgagactggggtgatagctcaggaagtcaaagaaatcctcccagaggcagtcaaggacaccggagatatggttttcgccaatggcaagactatcgaaaattttcttgtcgttaacaaagtgtgcgggctgaagtacgttgtatactgcgaggatgacgtgtgtcacctgccagtcctgagtctaggcgccaaagaagcatgggctgtgaaggagctctgcaaactcacagacaaccttgagacccgaatcgacgaactcgagcgatggtctcacaagctcgccaaactgcgccggttagatagtctgaaatcaacaggcagcagtggcgcttttagtcacgctggaagccagttcagtcgagcaggatcagtgcctcacaagaagcgacccccaaaggttgcaagtaaggtaggcagtagctcggtggtgcccgaccaggcttgtatttcacagcggttcctccaaggcaccataattgccctggtggtcgttatggccttccgccatcaccttggtgctcaacctcaggagcagggtccacaaccatgtccgagggagagggccctcgatggggggagctcctcaaacggccatccattcttatggctccagcgcggggtccacgtgcacactgtgagggcggagcccgcccacaggggcggcccaggaaggcactag

SEQ ID NO: 342459 - DNA, 1449 bp, Artificial Sequence
  derived and/or modified sequence
atgctgacctacagagtggatgctgacaagggcttcaacttctctgtgggagatgatgcctttgtgtgccagaagaagaaccacttccaggtgacagtgtacatcggcatgctgggggagcccaagtatgtgaagaccccagagggcctgaagcccctggactgcttctacctgaagctgcacggcctggaggccctgaaccagagcatcaacatcgagcagagccagagcgacaggagcaagaggcccttcaaccctgtgacagtgaacctgcccccagagcaggtgaccaaggtgacagtgggccgcctgcacttcagcgagaccacagccaacaacatgaggaagaagggcaagcccaacccagaccagcgctacttcatgctggtggtggccctgcaggcccacgcccagaaccagaactacaccctggccgcccagatcagcgagcgcatcatcgtgcgggccagcaaccctggccagtttgaaagtgacagtgatgtgctgtggcagagggcccaggtgcctgacaccgtcttccaccacggccgggtgggcatcaacacagacagaccagatgaggccctggtggtgcatggaaatgtgaaggtgatgggcagcctgatgcaccccagcgacctgcgggccaaggagcacgtgcaggaggtggacaccacagagcagctgaagaggatcagcaggatgaggctggtgcactaccgctacaagccagagtttgctgccagcgctggcatcgaggccacagcccctgagactggagtcatcgcccaggaggtgaaggagatcctgcctgaggccgtgaaggacacaggagacatggtgtttgccaacgggaagaccatcgagaacttcctggtggtgaacaaggtgtgtggcctgaagtatgtggtgtactgtgaagatgatgtgtgccacctgcctgtgctgagcctgggcgccaaggaggcctgggccgtgaaggagctgtgcaagctgacagacaacctggagaccagaattgatgagctggagcgctggagccacaagctggccaagctgcggcggctggacagcctgaagagcacaggcagcagcggggccttcagccatgctggcagccagttcagccgggccggctctgtgccccacaagaagaggcctcccaaggtggccagcaaggtgggcagcagctctgtggtgcctgaccaggcctgcatcagccagcgcttcctgcagggcaccatcatcgccctggtggtggtgatggccttccgccaccacctgggcgcccagccccaggagcagggcccccagccctgcccccgggagcgggccctggatggcggcagcagcagcaatggccaccccttcctgtggctgcagaggggcgtgcacgtgcacacagtgcgggcagagcccgcccacagaggaggccctggccgccactag

SEQ ID NO: 342460 - DNA, 1449 bp, Artificial Sequence
  derived and/or modified sequence
atgctgacctaccgggtggacgccgacaagggcttcaacttcagcgtgggggatgatgctttcgtatgccaaaaaaaaaatcattttcaggttaccgtgtatatcggcatgctgggcgaacctaagtacgtgaagacacctgaaggcttaaagccactcgactgcttttatttaaaactgcacggcctcgaagccctgaaccagagcatcaacattgagcagtcacagtccgacagatcgaagcgcccattcaaccctgtgacagtgaatctcccccccgaacaagttacaaaggttacggtagggagactgcacttctcagagaccactgctaacaacatgagaaaaaagggcaaaccaaatcctgaccagaggtactttatgctggtggtcgcactgcaggcacatgcccagaatcaaaattatactctggcggcccagatctctgagaggattatcgtgagagcgtccaacccagggcagtttgagtctgactctgacgtactctggcagcgagctcaggtccccgatactgtgttccaccatggccgagtgggtattaacaccgaccgcccggatgaggcattagtagtgcatgggaatgtgaaagtgatgggaagcctgatgcacccgtcagacctacgggcaaaggaacatgtccaggaggtggatacaactgaacaattgaagcggatttctaggatgcgactcgttcactatcgttataagcctgaattcgccgcttcagctggaatcgaggctactgcaccagaaactggcgtcattgcacaggaggtgaaggaaattcttcccgaggccgtgaaggatacaggagacatggtattcgccaatggtaagactatagagaatttcctggtggtaaataaggtctgcggcctgaaatatgtggtgtattgtgaggatgacgtgtgtcacctccccgtgctgagtcttggcgcaaaagaggcttgggcagtgaaagaactgtgtaagctcactgataatctcgagactcgcattgatgaacttgaaaggtggtctcacaagttggctaagttgaggaggttagatagcctgaagagtactgggagtagcggagccttctcgcatgccggctcacagttttccagagccggctccgtgccccacaagaaaaggccccccaaagtagctagcaaggtcggctcgtcaagcgtggttccagatcaagcttgcatcagccagcgattcctccaaggcactattatcgcgttggtggtggtgatggccttccgccaccacctaggggcccagccccaggaacaaggacctcagccctgcccccgggagagagcgctggatggaggtagcagttccaacggccacccatttttatggctgcaaaggggggttcatgttcacaccgtgcgggccgaacctgcacaccggggcggaccagggcgacactag

SEQ ID NO: 342461 - DNA, 1449 bp, Artificial Sequence
  derived and/or modified sequence
atgcttacctaccgcgtcgacgccgataaaggatttaacttttccgttggcgacgatgcctttgtgtgtcaaaagaagaaccattttcaggtcactgtgtacataggtatgttgggcgagcccaagtatgttaaaaccccagaggggctgaaacctctcgactgtttctacctcaaactgcatggcctcgaagctctcaaccaatcaatcaatattgagcagtctcagagcgatcggtccaagaggccttttaaccctgtgactgtgaacttgccacccgaacaagttacaaaagtgaccgtcgggaggctacacttttccgaaacaacagcgaataatatgcgcaaaaaggggaagcccaacccagaccagcgatatttcatgttggttgtggcactgcaagctcatgcacagaaccagaactataccctcgcagcccagatatccgagcgcatcattgtcagagcttcaaatccagggcaattcgagtccgattccgatgtgttgtggcagcgtgcgcaagttcctgataccgtattccaccacggtcgggtggggatcaatacggatcggccagacgaagccctggtggtgcacggaaacgtgaaggtgatggggtccttgatgcatcccagtgatctccgggctaaggagcatgttcaagaggtggataccacagaacaacttaagaggattagtcggatgagacttgttcactaccgttacaagcccgagtttgccgcttcagctggaatcgaggccactgcccctgaaactggggttatcgcccaagaagtaaaggaaatcctgccagaggcggttaaggacacaggggatatggtcttcgccaacggcaagactatcgagaactttctggtcgtaaacaaagtttgcgggctgaagtatgtggtatactgtgaagacgatgtctgtcatctgccagtcctctctctgggcgctaaggaggcttgggctgtgaaagaactttgcaaactcactgacaacttggagacgaggatcgacgagctcgagaggtggtctcacaagctcgcaaaactgagaaggctcgactccctcaaaagcaccggcagcagcggcgcattctcccacgcaggctcccagttctctcgtgccggatcagtgcctcataaaaagcgacccccaaaggtagcctcaaaggtgggctcttcctccgtagtcccagatcaagcctgtatctcccagcgctttctccagggaactatcattgcattagtggtggtgatggcatttcggcaccacttaggtgcccaaccacaggagcagggtccccagccgtgccccagagaaagagctcttgacggaggaagttccagtaatggacaccctttcctgtggctacaacgcggagtgcatgtacataccgtgagggcggagcccgcacaccgagggggtccagggcgacactag

SEQ ID NO: 342462 - DNA, 1449 bp, Artificial Sequence
  derived and/or modified sequence
atgctcacctaccgcgtggatgcggacaagggcttcaacttttcggtgggcgacgacgcctttgtgtgccagaagaagaaccacttccaggtgacagtgtacatcggcatgctgggcgagcccaagtacgtcaagacgcccgagggcctcaagcccctcgactgcttctatctgaagctgcacggactggaggccctgaaccagtccattaacatcgagcagtcccagtcagaccggagcaagcggcccttcaacccggtcacggtcaatctgccccctgagcaggtcacgaaggtgactgtggggcggctgcacttcagcgagaccaccgctaacaacatgcgtaagaagggcaagcccaacccggaccagaggtacttcatgctggtggtggccctccaggctcatgcacagaaccagaactacacgctggccgcccagatctcagagcgcatcattgtgcgggcctccaacccaggccagttcgagagcgacagcgatgtgttgtggcagcgggcacaggtgcccgacaccgtcttccaccacggccgcgtgggcatcaacacagaccggccggatgaggcgctggttgtgcacgggaatgtcaaggtcatgggctcgcttatgcacccctccgacctgcgcgccaaggaacacgtgcaggaggtggacaccaccgagcaattgaagaggatctcgcgcatgcggctggtgcactacagatacaagcccgagttcgccgccagcgcgggcatcgaggccaccgcgccagagacaggtgtcatcgctcaggaggtgaaggagatcttgcctgaggctgtgaaagacaccggagacatggtctttgccaatgggaaaaccatagagaacttcctggtggtgaacaaggtctgtgggctgaaatacgtggtttattgtgaggacgacgtttgtcacttacctgtcctgagtctgggcgccaaggaggcatgggccgtgaaggagctgtgcaagctgacagacaacctggagacgcgcattgatgagctggagcgctggagccacaagctggccaagctgcggcggctcgacagcctcaagtccaccggcagctcgggcgccttcagccatgcagggagccagttcagtcgggcgggcagcgtcccccacaagaagaggccccccaaggtggccagcaaggtagggtcatcgtccgtggttccggaccaggcctgcatcagccagcgcttcctgcagggaaccatcattgccctggtggtggtcatggccttcaggcatcacctgggagcccagcctcaggagcaaggaccacagccttgtcctagagagagggcactggatggtggctccagctctaacggtcacccttttctgtggctccagcgtggtgtccatgtccacactgtacgtgctgagcctgcgcacagaggaggacctggtagacactga

SEQ ID NO: 342463 - DNA, 1449 bp, Artificial Sequence
  derived and/or modified sequence
atgctgacctacagagtggacgccgacaagggcttcaacttcagcgtgggcgacgacgccttcgtgtgccagaagaagaaccacttccaggtgaccgtgtacatcggcatgctgggcgagcccaagtacgtgaagacccccgagggcctgaagcccctggactgcttctacctgaagctgcacggcctggaggccctgaaccagagcatcaacatcgagcagagccagagcgacagaagcaagagacccttcaaccccgtgaccgtgaacctgccccccgagcaggtgaccaaggtgaccgtgggcagactgcacttcagcgagaccaccgccaacaacatgagaaagaagggcaagcccaaccccgaccagagatacttcatgctggtggtggccctgcaggcccacgcccagaaccagaactacaccctggccgcccagatcagcgagagaatcatcgtgagagccagcaaccccggccagttcgagagcgacagcgacgtgctgtggcagagagcccaggtgcccgacaccgtgttccaccacggcagagtgggcatcaacaccgacagacccgacgaggccctggtggtgcacggcaacgtgaaggtgatgggcagcctgatgcaccccagcgacctgagagccaaggagcacgtgcaggaggtggacaccaccgagcagctgaagagaatcagcagaatgagactggtgcactacagatacaagcccgagttcgccgccagcgccggcatcgaggccaccgcccccgagaccggcgtgatcgcccaggaggtgaaggagatcctgcccgaggccgtgaaggacaccggcgacatggtgttcgccaacggcaagaccatcgagaacttcctggtggtgaacaaggtgtgcggcctgaagtacgtggtgtactgcgaggacgacgtgtgccacctgcccgtgctgagcctgggcgccaaggaggcctgggccgtgaaggagctgtgcaagctgaccgacaacctggagaccagaatcgacgagctggagagatggagccacaagctggccaagctgagaagactggacagcctgaagagcaccggcagcagcggcgccttcagccacgccggcagccagttcagcagagccggcagcgtgccccacaagaagagaccccccaaggtggccagcaaggtgggcagcagcagcgtggtgcccgaccaggcctgcatcagccagagattcctgcagggcaccatcatcgccctggtggtggtgatggccttcagacaccacctgggcgcccagccccaggagcagggcccccagccctgccccagagagagagccctggacggcggcagcagcagcaacggccaccccttcctgtggctgcagagaggcgtgcacgtgcacaccgtgagagccgagcccgcccacagaggcggccccggcagacactag

SEQ ID NO: 342464 - protein, 791 aa, Artificial Sequence
  derived and/or modified sequence
MPDMHFKAPKISMPDVDLHLKGPKVKGDVDVSVPKLEGDLTGPSVGVEVPDVELECPDAKLKGPKFKMPEMHFKTPKISMPDVDLHLKGPKVKGDMDVSVPKVEGEMKVPDVDIKGPKMDIDAPDVDVHGPDWHLKMPKMKMPKFSMPGFKAEGPEVDVNLPKADVVVSGPKVDVEVPDVSLEGPEGKLKGPKLKMPEMHFKAPKISMPDVDLHLKGPKVKGDVDVSLPKLEGDLTGPSVDVEVPDVELECPDAKLKGPKFKMPEMHFKTPKISMPDVNLNLKGPKVKGDMDVSVPKVEGEMKVPDVDIRGPKVDIDAPDVDVHGPDWHLKMPKMKMPKFSMPGFKGEGPEVDVNLPKADVDVSGPKVDVEVPDVSLEGPEGKLKGPKFKMPEMHFKTPKISMPDVDFNLKGPKIKGDVDVSAPKLEGELKGPELDVKGPKLDADMPEVAVEGPNGKWKTPKFKMPDMHFKAPKISMPDLDLHLKSPKAKGEVDVDVPKLEGDLKGPHVDVSGPDIDIEGPEGKLKGPKFKMPDMHFKAPNISMPDVDLNLKGPKIKGDVDVSVPEVEGKLEVPDMNIRGPKVDVNAPDVQAPDWHLKMPKMKMPKFSMPGFKAEGPEVDVNLPKADVDISGPKVDIEGPDVNIEGPEGKLKGPKLKMPEMNIKAPKISMPDFDLHLKGPKVKGDVDVSLPKVEGDLKGPEVDIKGPKVDINAPDVGVQGPDWHLKMPKVKMPKFSMPGFKGEGPDGDVKLPKADIDVSGPKVDIEGPDVNIEGPEGKLKGPKFKMAQRWW

SEQ ID NO: 342465 - DNA, 2376 bp, Artificial Sequence
  derived and/or modified sequence
atgcctgacatgcatttcaaggcacctaaaataagtatgcccgatgtggaccttcacctgaaaggtccgaaagtgaagggagatgtggacgttagtgtccctaagctggagggagatctgaccggcccatctgtgggagttgaggtccctgacgttgaactagagtgccctgatgctaaactcaagggtcccaaatttaaaatgccagaaatgcattttaaaacgcccaagattagtatgccagatgtggacctccatttgaaggggcccaaggtcaagggcgatatggacgttagcgtcccaaaagtcgaaggcgagatgaaagtacccgatgtggatataaagggccctaaaatggacatagacgcaccagacgtcgatgtgcacggtcctgattggcatctgaagatgcccaaaatgaaaatgccgaagttttctatgccggggtttaaggcagaggggcccgaagtcgacgtgaacctgccgaaggccgacgttgttgtgtctggcccgaaagtcgatgtggaggtcccggatgtttcgcttgaagggcctgaaggcaaactgaagggacctaagctcaaaatgccggaaatgcattttaaagctcccaagatctctatgcctgacgtggatctgcatctaaaagggcctaaagtgaagggagatgtggacgtgagcctacctaagctggagggcgaccttactggcccctctgtagatgtggaagtgcccgacgtggaactcgaatgccccgacgccaagctcaagggacctaagttcaagatgccagagatgcacttcaagactccgaaaatcagcatgcctgatgttaacttgaatctcaagggacccaaggtcaaaggcgacatggacgtcagtgtgcctaaggtggaaggtgaaatgaaagtcccagatgtggatatccgtggaccaaaagtggacatcgacgcgccagacgtcgacgtccacgggcctgactggcacctgaagatgccaaaaatgaaaatgcccaagttcagcatgcctgggtttaaaggggaaggccccgaagtggacgtaaatctcccgaaggctgatgtagatgttagcggtcctaaggtggatgtagaagtgcctgacgttagcttagagggtccagaaggcaagttaaaaggtccgaaattcaagatgccagaaatgcacttcaaaactcccaaaatcagcatgcccgacgtggacttcaacctgaagggtccgaagatcaagggggacgtggatgtttccgcccccaagttggagggggagctgaagggcccagagctcgatgtgaagggaccgaaactcgatgccgatatgcccgaagtggcagtagagggtcctaacgggaagtggaaaacccccaagtttaaaatgccagacatgcacttcaaagcccccaagataagtatgccagacttagatctgcatttaaagtctccaaaggccaagggggaggtggacgtcgatgtgccgaagctggaaggggacttgaaaggacctcatgtcgacgtcagtgggcctgacattgatatcgaggggcctgaaggcaagctgaagggcccaaaatttaagatgccggatatgcacttcaaagcccctaatatcagcatgcctgacgtggatctaaaccttaaggggcccaaaatcaaaggggacgtggatgttagcgtgcctgaagtcgaaggcaaactggaagtgccagacatgaacatccgagggcccaaagtggatgtcaatgctccagacgtgcaggccccggattggcatctcaaaatgccgaaaatgaaaatgcctaagttctctatgcctgggttcaaagctgagggcccagaagtggacgtgaatttgcctaaagccgacgtcgacatctctgggcctaaagttgatatcgaagggccagatgtgaatattgagggtccagaagggaaactcaagggccccaaactcaaaatgcctgaaatgaatataaaggccccaaagatatccatgcccgactttgacctgcacctcaaaggcccaaaagtgaagggcgacgttgatgtgagcctccccaaagtcgaaggggatttgaagggcccagaggtggacattaaaggaccaaaggttgacataaacgcccccgatgttggtgtacagggccctgattggcatcttaagatgcccaaggtgaagatgccaaaattctccatgcctgggttcaaaggtgaaggccccgatggagatgtcaagctcccaaaagctgatattgacgtgtctggaccaaaggtagatattgaggggccagacgtgaatatagagggaccagaggggaagctgaaaggacccaagtttaagatggcccaaaggtggtggtag

SEQ ID NO: 342466 - DNA, 2376 bp, Artificial Sequence
  derived and/or modified sequence
atgccagacatgcacttcaaggcccccaagatctccatgccagatgtggacctgcacctgaagggccccaaggtgaagggagatgtggatgtgtctgtgcccaagctggagggggacctgaccggccccagcgtgggcgtggaggtgcctgatgtggagctggagtgcccagatgccaagctgaagggccccaagttcaagatgcctgagatgcacttcaagacccccaagatctccatgccagatgtggacctgcacctgaagggccccaaggtgaagggggacatggatgtgtctgtgcccaaggtggagggggagatgaaggtgcctgatgtggacatcaagggccccaagatggacattgatgccccagatgtggatgtgcacggccctgactggcacctgaagatgcccaagatgaagatgcccaagttctccatgcctggcttcaaggccgagggccctgaggtggatgtgaacctgcccaaggcagatgtggtggtgtctggccccaaggtggatgtggaggtgcctgatgtgtccctggagggccctgagggcaagctgaagggccccaagctgaagatgcctgagatgcacttcaaggcccccaagatctccatgccagatgtggacctgcacctgaagggccccaaggtgaagggagatgtggatgtgtccctgcccaagctggagggggacctgaccggccccagcgtggatgtggaggtgcctgatgtggagctggagtgcccagatgccaagctgaagggccccaagttcaagatgcctgagatgcacttcaagacccccaagatctccatgccagatgtgaacctgaacctgaagggccccaaggtgaagggggacatggatgtgtctgtgcccaaggtggagggggagatgaaggtgcctgatgtggacatccggggccccaaggtggacattgatgccccagatgtggatgtgcacggccctgactggcacctgaagatgcccaagatgaagatgcccaagttctccatgcctggcttcaagggggagggccctgaggtggatgtgaacctgcccaaggcagatgtggatgtgtctggccccaaggtggatgtggaggtgcctgatgtgtccctggagggccctgagggcaagctgaagggccccaagttcaagatgcctgagatgcacttcaagacccccaagatctccatgccagatgtggacttcaacctgaagggccccaagatcaagggagatgtggatgtgtctgcccccaagctggagggggagctgaagggccctgagctggatgtgaagggccccaagctggatgctgacatgcctgaggtggccgtggagggccccaacgggaagtggaagacccccaagttcaagatgccagacatgcacttcaaggcccccaagatctccatgccagacctggacctgcacctgaagagccccaaggccaagggggaggtggatgtggatgtgcccaagctggagggggacctgaagggcccccacgtggatgtgtctggccctgacatcgacatcgagggccctgagggcaagctgaagggccccaagttcaagatgccagacatgcacttcaaggcccccaacatctccatgccagatgtggacctgaacctgaagggccccaagatcaagggagatgtggatgtgtctgtgcctgaggtggagggcaagctggaggtgcctgacatgaacatccggggccccaaggtggatgtgaatgccccagatgtgcaggccccagactggcacctgaagatgcccaagatgaagatgcccaagttctccatgcctggcttcaaggccgagggccctgaggtggatgtgaacctgcccaaggcagatgtggacatcagcggccccaaggtggacatcgagggcccagatgtgaacatcgagggccctgagggcaagctgaagggccccaagctgaagatgcctgagatgaacatcaaggcccccaagatctccatgccagactttgacctgcacctgaagggccccaaggtgaagggagatgtggatgtgtccctgcccaaggtggagggggacctgaagggccctgaggtggacatcaagggccccaaggtggacatcaatgccccagatgtgggcgtgcagggccctgactggcacctgaagatgcccaaggtgaagatgcccaagttctccatgcctggcttcaagggggagggcccagatggagatgtgaagctgcccaaggctgacattgatgtgtctggccccaaggtggacatcgagggcccagatgtgaacatcgagggccctgagggcaagctgaagggccccaagttcaagatggcccagcgctggtggtag

SEQ ID NO: 342467 - DNA, 2376 bp, Artificial Sequence
  derived and/or modified sequence
atgcccgacatgcacttcaaggcccccaagatcagcatgcccgacgtggatctccatttaaaggggcccaaagtaaagggagacgtggatgtgtccgtgcctaagttagaaggtgacctgaccgggccctcagtcggagtagaagtgccggatgttgagttagagtgcccagacgcgaagttgaagggccctaagtttaagatgcctgaaatgcatttcaaaactcccaaaattagcatgcctgatgtggacttgcatctgaaaggtcctaaagtgaagggcgacatggacgtctcagtgccaaaggtggagggggaaatgaaagtgccagacgtcgacataaaaggtcctaaaatggacattgatgcacctgacgtggatgtgcatggccctgactggcatctgaagatgcccaaaatgaaaatgcccaaatttagcatgcccggatttaaggccgaaggtcccgaagtcgacgtcaatctccccaaggccgacgtggtcgtgtccggccctaaggtggacgtggaggtgcccgatgtgagccttgagggccctgagggaaagctgaaaggcccaaaacttaaaatgcccgaaatgcattttaaagccccaaagatcagcatgccagacgtagatctccatttaaaaggccccaaagtgaaaggcgatgtggacgtgtctctccccaagctggaaggcgatctgacgggacctagcgtggatgtggaagtgccggacgtcgagctggaatgtcccgacgctaagttaaagggccccaaattcaagatgccggaaatgcattttaagacgcccaaaatcagcatgccagacgtgaacctaaacctgaaggggcccaaagttaaaggtgacatggatgtaagtgtgccaaaagttgagggtgagatgaaggtgccagacgtggacattagaggacccaaagtggatatcgatgcccctgacgtcgatgtacatgggcccgattggcacttgaagatgcccaaaatgaaaatgcctaagttctcaatgccaggattcaagggagaaggaccagaagtagatgtgaatctgcccaaagcagatgtagatgttagcggacccaaggttgacgtcgaagtgcccgacgtgagcttagagggacctgagggtaaactgaagggcccaaagttcaagatgcccgagatgcacttcaagacacccaaaatctcaatgccagacgtagatttcaacttgaagggcccaaagatcaaaggtgatgtagacgtgagcgccccaaagcttgagggagaactcaaagggcccgagttagatgtgaaaggcccaaaactcgacgcggatatgccagaagtagccgttgagggacccaatgggaagtggaagacgccgaaatttaagatgccagatatgcacttcaaagcaccgaaaatctccatgcccgacctggacttacatctcaaaagcccaaaagccaagggcgaggtcgacgttgatgtgccaaaactggaaggggacctgaaaggccctcacgtggacgtgtccgggcccgacatcgacatagagggcccagaaggaaaactgaaggggcccaagttcaaaatgcctgacatgcacttcaaagccccaaacatttcaatgccagatgtggacctcaatctgaaggggccaaagataaagggggacgtggatgtgtcagtgccagaggtagaagggaagctcgaagtgccagatatgaatatccggggacctaaggtggatgtgaacgcccccgatgttcaggctcctgattggcacctgaaaatgcccaaaatgaagatgccaaagttcagcatgcccgggtttaaagccgagggccccgaggtggacgtgaacctaccaaaagctgatgtggatatttccgggccgaaggtagacattgaaggacctgatgtgaacattgaaggaccagaagggaaactgaaggggccaaaactgaagatgccagagatgaacattaaggcacccaagatctccatgcctgactttgatctgcatctgaaggggccgaaggtgaagggtgatgtggatgtgtcccttccaaaggttgaaggcgacttgaagggccctgaggtggatatcaagggtcccaaagtggatataaatgctcctgatgttggggtgcaggggcccgactggcacctgaaaatgccaaaagtgaaaatgccaaaattttccatgccagggttcaagggggaaggcccggacggggatgtaaaattgccgaaagcggatatcgacgtgtccggccctaaagtggacattgaagggccagatgtgaatattgagggcccagaaggaaaacttaagggtccaaaattcaagatggcgcaacggtggtggtag

SEQ ID NO: 342468 - DNA, 2712 bp, Artificial Sequence
  derived and/or modified sequence
ttaagatgccagacatgcacttcaaggcccccaagatctccatgcctgatgtggacttacacttgaaaggccccaaagtcaaaggggatgtggatgtgtcggtgccaaaattggagggagatttaacaggtcccagtgtgggtgtggaggtgcctgatgttgagctggagtgtcctgatgcaaagttgaaagggcccaagtttaagatgcctgagatgcacttcaagacccccaagatctccatgcctgatgtggacttacacctgaaaggccccaaagtcaaaggggatatggatgtgtctgtgcccaaggtagaaggtgaaatgaaagtgccagatgttgacatcaaaggacccaaaatggacattgatgccccagatgtggatgttcatggcccagactggcacctgaagatgcccaagatgaaaatgcccaagttcagcatgcctggcttcaaagcagagggcccagaagtggatgtgaacttgcccaaggctgatgttgttgtctcaggacccaaggtggatgttgaagtcccagatgtgagccttgaaggtccagaagggaagctgaagggccccaagcttaagatgcctgagatgcacttcaaggcccccaagatctccatgcctgatgtggacttacacttgaaaggccccaaagtcaaaggggatgtggatgtgtctttgccaaaattggagggagatttaacaggccccagtgtggatgtggaggtgcctgatgttgagctggagtgtcctgatgcaaagttgaaagggcccaagtttaagatgcctgagatgcacttcaagacccccaagatctccatgcctgatgtgaacttaaacttgaaaggccccaaagtcaaaggggatatggatgtgtctgttcccaaggtagaaggtgaaatgaaagtgccagatgttgacatcagagggcccaaagtggacattgatgccccagatgtggatgttcatggcccagactggcacctgaagatgcctaagatgaaaatgcccaagttcagcatgcctggcttcaaaggagagggcccagaagtggatgtgaacttgcccaaggctgacgttgatgtctcaggacccaaggtggatgttgaagtcccagatgtgagccttgaaggtccagaagggaagctgaagggccccaagtttaagatgcctgagatgcacttcaagacccccaagatctccatgcctgatgttgatttcaatttaaagggacccaaaatcaaaggagatgttgatgtttctgccccaaagctggagggagagttaaaaggtccagaattggatgtcaaaggtcccaaattagatgctgacatgccagaagtagctgtggaaggcccaaatggcaagtggaaaactcctaagttcaagatgccagatatgcactttaaagctcccaaaatctctatgccagacctcgatctacacttgaagagccccaaggcaaaaggagaggtggatgtagatgttcccaaattggaaggggaccttaaagggccacatgtggatgtcagtgggccagacattgacattgagggaccagagggcaaattgaaaggccctaagttcaagatgcctgatatgcatttcaaagcccccaatatttctatgcctgatgttgatctaaatctcaaaggacccaaaatcaagggggatgtggatgtgtctgtgcctgaggtagaaggtaaacttgaagtaccagatatgaacatcaggggccccaaagttgatgtaaatgcccccgatgtccaagctccagactggcacctgaagatgcccaagatgaaaatgcccaagttcagcatgcctggcttcaaagcagagggccctgaagtagacgtcaacttgcctaaggctgacgttgacatctcaggacccaaggtggacattgaaggccctgatgttaatattgaaggaccagagggaaagttgaaagggcctaagttaaagatgccagagatgaacatcaaagcccccaagatctccatgcctgactttgatttgcatctgaaaggtcccaaggtgaagggcgatgtggatgtttctctgcccaaagtggaaggtgacctcaagggccccgaagttgacatcaaggggcccaaagtggatattaatgccccagatgtgggtgttcaaggcccagactggcacctgaagatgcccaaggtgaaaatgccaaagttcagcatgcctggcttcaaaggagagggcccagatggggatgtgaagctgcccaaggctgacattgatgtctcaggacccaaagtggacattgaaggccctgatgttaacattgaaggaccagagggaaagttgaaagggcctaagttcaagatggcccagaggtggtggtagtcagggtgtgtgggtgtttttagggttctttagtgttgtttctttcacccaggggtggtggtcccagccagtttggtgctgacggtgagaggaaattagaatctgtttgcaaattgtccaacccaccccctcaacatgaggggcttccattttctgtgttttgtaagggaactgtttccttcatgccgccatgttcctgatattagttctgatttctttttaacaaatgttatcatgattaagaaaatttccagcactttaatggccaattaactgagaatgtaagaaaattgatgctgtacaaggcaaataaagctgtttattaaccttg

SEQ ID NO: 342469 - DNA, 2376 bp, Artificial Sequence
  derived and/or modified sequence
atgccagacatgcatttcaaagctcctaagatatctatgccagacgtcgacttacatctgaaaggacctaaggtcaagggtgacgtcgatgtatccgtgccaaagctggagggtgacttaaccgggcctagcgtgggagtggaggtgccagatgtggagttggagtgcccggacgccaagctgaaggggcctaaattcaagatgcccgaaatgcatttcaaaacccccaagattagcatgccggatgtagacttacacctgaagggtccaaaggtgaagggagacatggatgtgagcgtaccaaaagtcgaaggagagatgaaagttccagacgtggacatcaaaggacctaagatggacatcgatgccccagacgttgacgtgcatggaccagactggcatctgaaaatgccaaaaatgaagatgcccaaatttagtatgccgggatttaaggcagaaggaccagaggtagatgttaatttaccaaaggccgacgtcgtggtaagcggacctaaggtcgacgtggaagtgcctgacgtgtcattagagggcccagaaggaaaactcaagggacctaagttgaaaatgcctgagatgcacttcaaggccccaaagatcagtatgcctgatgtcgacctccacctcaagggacccaaagtgaagggagatgttgacgtgtcgctgcccaaactcgagggcgatcttacagggccttccgtggatgttgaggtaccagatgtggagctcgagtgtcctgatgcaaagctgaaagggccaaaatttaagatgccggagatgcacttcaagacccccaaaatctccatgccggatgtgaatctcaatctgaaaggacccaaagttaagggcgacatggatgtctccgtccctaaggtcgaaggagaaatgaaagttcccgatgtggatattcggggtccaaaagtagacatcgacgccccagacgtagacgtgcacggcccagattggcaccttaagatgccaaaaatgaaaatgcctaagttctctatgcctggcttcaagggcgagggccctgaagtggatgtcaatctgccaaaagcagatgtggacgtaagcgggcctaaggtggatgtggaggttcccgacgtctccctggaggggcctgagggtaagctgaagggacctaaattcaaaatgcctgagatgcactttaaaacgcctaagatttctatgccagacgtggatttcaatctaaaaggtcctaaaattaagggcgatgtggatgtcagtgcacccaagttagaaggagaactgaagggcccagagctggacgtgaaaggacctaaactcgacgccgatatgccagaagtggcagtcgaaggtcccaatggtaaatggaagacgcctaaattcaaaatgccagacatgcattttaaagcccctaaaatctctatgcccgatcttgatctccacctcaagtcgccaaaggctaaaggcgaagtcgatgttgatgtgccgaaattggagggcgatctgaagggtccccatgttgatgtttccggtcctgacatcgatatcgaaggccctgagggcaagctgaaaggtcctaagttcaagatgcccgatatgcactttaaagccccaaacatcagcatgcccgacgtagatctcaacctcaaagggccaaagatcaaaggtgatgttgacgtgtccgttcctgaagtggagggcaaacttgaggtcccagatatgaatattcgaggacctaaagttgatgtcaacgcgccagacgtccaggccccagactggcacctcaaaatgccgaagatgaagatgcccaagtttagtatgccgggattcaaggctgagggtcctgaggtggatgtgaaccttcccaaggctgacgtagacattagcgggccaaaggtggacattgaaggacccgacgtgaacatcgaaggacctgaaggtaagttaaaaggcccaaaattaaagatgccagaaatgaatatcaaggcgccaaaaatctctatgcccgactttgacttgcatctcaaaggccctaaggttaagggagacgtggacgtgtcgctaccgaaggtagagggagatctaaaaggtcccgaggtcgacatcaagggcccaaaagttgatatcaacgctccggacgtcggcgtccagggtcccgattggcacctcaagatgcctaaggtgaagatgcctaagttttccatgcctggcttcaaaggtgaaggcccagacggggacgttaagttaccaaaagctgacattgatgtctctggaccaaaagtagacatcgaaggtcccgacgtgaatatcgagggccctgaaggtaagctgaaaggtccgaagtttaagatggctcaacgttggtggtag

SEQ ID NO: 342470 - DNA, 2376 bp, Artificial Sequence
  derived and/or modified sequence
atgcccgacatgcacttcaaggcccccaagatcagcatgcccgacgtggacctgcacctgaagggccccaaggtgaagggcgacgtggacgtgagcgtgcccaagctggagggcgacctgaccggccccagcgtgggcgtggaggtgcccgacgtggagctggagtgccccgacgccaagctgaagggccccaagttcaagatgcccgagatgcacttcaagacccccaagatcagcatgcccgacgtggacctgcacctgaagggccccaaggtgaagggcgacatggacgtgagcgtgcccaaggtggagggcgagatgaaggtgcccgacgtggacatcaagggccccaagatggacatcgacgcccccgacgtggacgtgcacggccccgactggcacctgaagatgcccaagatgaagatgcccaagttcagcatgcccggcttcaaggccgagggccccgaggtggacgtgaacctgcccaaggccgacgtggtggtgagcggccccaaggtggacgtggaggtgcccgacgtgagcctggagggccccgagggcaagctgaagggccccaagctgaagatgcccgagatgcacttcaaggcccccaagatcagcatgcccgacgtggacctgcacctgaagggccccaaggtgaagggcgacgtggacgtgagcctgcccaagctggagggcgacctgaccggccccagcgtggacgtggaggtgcccgacgtggagctggagtgccccgacgccaagctgaagggccccaagttcaagatgcccgagatgcacttcaagacccccaagatcagcatgcccgacgtgaacctgaacctgaagggccccaaggtgaagggcgacatggacgtgagcgtgcccaaggtggagggcgagatgaaggtgcccgacgtggacatcagaggccccaaggtggacatcgacgcccccgacgtggacgtgcacggccccgactggcacctgaagatgcccaagatgaagatgcccaagttcagcatgcccggcttcaagggcgagggccccgaggtggacgtgaacctgcccaaggccgacgtggacgtgagcggccccaaggtggacgtggaggtgcccgacgtgagcctggagggccccgagggcaagctgaagggccccaagttcaagatgcccgagatgcacttcaagacccccaagatcagcatgcccgacgtggacttcaacctgaagggccccaagatcaagggcgacgtggacgtgagcgcccccaagctggagggcgagctgaagggccccgagctggacgtgaagggccccaagctggacgccgacatgcccgaggtggccgtggagggccccaacggcaagtggaagacccccaagttcaagatgcccgacatgcacttcaaggcccccaagatcagcatgcccgacctggacctgcacctgaagagccccaaggccaagggcgaggtggacgtggacgtgcccaagctggagggcgacctgaagggcccccacgtggacgtgagcggccccgacatcgacatcgagggccccgagggcaagctgaagggccccaagttcaagatgcccgacatgcacttcaaggcccccaacatcagcatgcccgacgtggacctgaacctgaagggccccaagatcaagggcgacgtggacgtgagcgtgcccgaggtggagggcaagctggaggtgcccgacatgaacatcagaggccccaaggtggacgtgaacgcccccgacgtgcaggcccccgactggcacctgaagatgcccaagatgaagatgcccaagttcagcatgcccggcttcaaggccgagggccccgaggtggacgtgaacctgcccaaggccgacgtggacatcagcggccccaaggtggacatcgagggccccgacgtgaacatcgagggccccgagggcaagctgaagggccccaagctgaagatgcccgagatgaacatcaaggcccccaagatcagcatgcccgacttcgacctgcacctgaagggccccaaggtgaagggcgacgtggacgtgagcctgcccaaggtggagggcgacctgaagggccccgaggtggacatcaagggccccaaggtggacatcaacgcccccgacgtgggcgtgcagggccccgactggcacctgaagatgcccaaggtgaagatgcccaagttcagcatgcccggcttcaagggcgagggccccgacggcgacgtgaagctgcccaaggccgacatcgacgtgagcggccccaaggtggacatcgagggccccgacgtgaacatcgagggccccgagggcaagctgaagggccccaagttcaagatggcccagagatggtggtag

SEQ ID NO: 342471 - protein, 144 aa, Artificial Sequence
  derived and/or modified sequence
MSEGVDLIDIYADEEFNQDPEFNNTDQIDLYDDVLTATSQPSDDRSSSTEPPPPVRQEPSPKPNNKTPAILYTYSGLRNRRAAVYVGSFSWWTTDQQLIQVIRSIGVYDVVELKFAENRANGQSKGYAEVVVASENSVHKLLEL

SEQ ID NO: 342472 - protein, 146 aa, Artificial Sequence
  derived and/or modified sequence
MSEGVDLIDIYADEEFNQDPEFNNTDQIDLYDDVLTATSQPSDDRSSSTEPPPPVRQEPSPKPNNKTPAILYTYSGLRNRRAAVYVGSFSWWTTDQQLIQVIRSIGVYDVVELKFAENRANGQSKGYAEVVVASENSVHKLLELLP

SEQ ID NO: 342473 - DNA, 435 bp, Artificial Sequence
  derived and/or modified sequence
atgagcgagggcgtggatttgattgatatctatgctgatgaagagtttaatcaggaccccgagtttaacaacaccgaccaaatagacctgtacgacgatgtactgaccgccacctctcaaccctccgacgacagatcttcctccaccgaaccgcctccccccgtgagacaggagccgtcacccaaacctaacaataaaacaccagccattttgtacacatacagtggacttcggaatagacgagctgctgtctatgtgggctcattttcatggtggacgaccgatcaacagttgatccaggtgatcaggagcattggtgtgtatgacgtcgtggagttaaaatttgctgagaacagggcaaatgggcagtctaaaggatacgctgaagtggttgtggccagcgaaaattctgtgcacaaactgttagaattatag

SEQ ID NO: 342474 - DNA, 441 bp, Artificial Sequence
  derived and/or modified sequence
atgtcagagggagtagacctcatagacatatacgcagacgaggagtttaaccaagatcctgagttcaacaacaccgatcagatagacctgtacgacgacgtgttaacagcaacaagccagcccagtgatgataggagtagcagtactgaacccccccctccagttagacaggagccctctcctaagccaaataataagacccccgctattctatacacatactcaggcctgaggaaccgaagggctgcagtttacgtgggctccttctcctggtggaccacggatcagcagctcattcaggttatccggtcaattggggtttacgacgtggtggagcttaaattcgccgaaaatcgcgctaatggtcagagcaaaggctacgccgaagtcgtcgtggctagtgagaatagcgtgcacaaactcctcgagctgctaccatag

SEQ ID NO: 342475 - DNA, 435 bp, Artificial Sequence
  derived and/or modified sequence
atgtctgagggcgtggacctgattgacatctatgcagatgaggagttcaaccaggaccctgagttcaacaacacagaccagattgacctgtatgatgatgtgctgacagccaccagccagcccagtgatgacaggagcagcagcacagagcccccacctcctgtgcggcaggagcccagccccaagcccaacaacaagaccccagccatcctgtacacctacagcggcctgaggaacagaagagctgctgtgtatgtgggcagcttctcctggtggaccacagaccagcagctgatccaggtgatccgcagcattggagtgtatgatgtggtggagctgaagtttgctgaaaatagagccaacggccagagcaagggctacgccgaggtggtggtggcctctgaaaattctgtgcacaagctgctggagctgtag

SEQ ID NO: 342476 - DNA, 441 bp, Artificial Sequence
  derived and/or modified sequence
atgtctgagggcgtggacctgattgacatctatgcagatgaggagttcaaccaggaccctgagttcaacaacacagaccagattgacctgtatgatgatgtgctgacagccaccagccagcccagtgatgacaggagcagcagcacagagcccccacctcctgtgcggcaggagcccagccccaagcccaacaacaagaccccagccatcctgtacacctacagcggcctgaggaacagaagagctgctgtgtatgtgggcagcttctcctggtggaccacagaccagcagctgatccaggtgatccgcagcattggagtgtatgatgtggtggagctgaagtttgctgaaaatagagccaacggccagagcaagggctacgccgaggtggtggtggcctctgaaaattctgtgcacaagctgctggagctgctgccctag

SEQ ID NO: 342477 - DNA, 435 bp, Artificial Sequence
  derived and/or modified sequence
atgagcgagggcgtggacctgatcgacatctacgccgacgaggagttcaatcaggacccggagttcaataacactgaccagatagacctctatgatgacgtgttgacagcaacgagtcagcccagcgatgatagaagttcttccacagaacctccccctcctgtccgtcaagagccaagccctaaacctaacaacaagacgccggcaatcctgtatacctacagcggactcaggaatagacgagctgcagtgtacgtgggaagcttcagctggtggacaaccgaccagcaattaatccaggtcattcgcagcatcggtgtgtatgatgtcgtagaactgaaatttgcagaaaatcgggcaaacggccagtctaagggctatgcggaggtggtggtcgccagcgaaaactcagtgcacaagctcctggaactctag

SEQ ID NO: 342478 - DNA, 441 bp, Artificial Sequence
  derived and/or modified sequence
atgagcgagggcgtggacctgatcgacatctacgccgacgaggagtttaaccaggacccagagttcaacaacacggaccagattgatctatatgatgacgtgttgacggcaacatcccagccctccgatgaccggtcttcctctaccgagccccctccacctgtgaggcaagagcctagccccaaacccaataacaaaacgccagccatcctttacacatattcaggcctgcgcaatcgccgggctgctgtgtacgtgggttcttttagctggtggacaaccgaccagcagctgattcaggtgatccgctccatcggagtgtatgatgtggttgagctcaaatttgccgagaatcgagcgaacggccaatccaaaggctatgctgaggtcgtggttgctagcgagaatagtgtccataagctgcttgagctgctcccctag

SEQ ID NO: 342479 - DNA, 435 bp, Artificial Sequence
  derived and/or modified sequence
atgtccgaaggcgtggatttaatcgatatctacgccgatgaagagttcaatcaagacccagaattcaataacaccgaccagatcgacctgtatgatgacgttctgactgctacttctcagccttccgatgaccgaagctccagtaccgagcctcctccccctgtgaggcaggagcccagccctaagcccaataacaaaacgcccgcaatactgtacacttacagcggactgcggaatcggagagctgccgtctatgtggggtcattcagttggtggactacggaccaacaacttatccaggttatacgctcaattggagtgtatgacgttgttgagctgaaatttgctgagaaccgcgctaacggacaatctaaaggatatgccgaagtggtggtggcgtctgaaaattctgtccataaactgctggaactctag

SEQ ID NO: 342480 - DNA, 441 bp, Artificial Sequence
  derived and/or modified sequence
atgtcggaaggcgtggatcttattgacatctatgcagacgaggagttcaatcaggaccctgagttcaacaatacagaccagattgacctgtatgatgatgtgctcaccgctacatctcagccaagcgacgatagaagctcatccactgagccacctcctccggtgagacaggaaccttcccccaagccaaataataaaacccccgcaatactttatacgtacagtggtctgcgcaaccgacgggcagcagtgtacgtggggtcattctcatggtggactacagaccagcaattaatccaggtgattcggtctatcggagtgtatgacgtcgtggaactcaaatttgctgagaaccgcgcaaacggtcagagtaaaggctatgccgaagtggtggtcgcctctgaaaacagcgttcataaattactggaactgcttccgtag

SEQ ID NO: 342481 - DNA, 567 bp, Artificial Sequence
  derived and/or modified sequence
gagtaggcctgggttgggggcagaggcggctggagctgcttgacacctgggggctctggccggagccgccttgggggctagtggcatcttccttactttgtccatcctccggactcgcgatcttccttccggagccatgtcagaaggagtggacttgattgatatatatgctgacgaggagttcaaccaggacccagagttcaacaatacagatcagattgacctgtatgatgatgtgctgacagccacctcacagccctcagatgacagaagcagcagcactgaaccacctcctcctgttcgccaggagccatctcccaagcccaacaacaagacccctgcaattctgtatacctacagtggcctgcgtaatagacgagctgccgtttatgtgggcagcttctcctggtggaccacagaccagcagctgatccaggttattcgctctataggagtctatgatgtggtggagttgaaatttgcagagaatcgagcaaatggccagtccaaagggtatgctgaggtggtggtagcctctgaaaactctgtccacaaattgttggaact

SEQ ID NO: 342482 - DNA, 574 bp, Artificial Sequence
  derived and/or modified sequence
atattcccggtaacgggggcgcgcggtcgggggcaggttgggccggaagaggggtccgggccggcactgaggcgggaaggggtggcatcttccttactttgtccatcctccggactcgcgatcttccttccggagccatgtcagaaggagtggacttgattgatatatatgctgacgaggagttcaaccaggacccagagttcaacaatacagatcagattgacctgtatgatgatgtgctgacagccacctcacagccctcagatgacagaagcagcagcactgaaccacctcctcctgttcgccaggagccatctcccaagcccaacaacaagacccctgcaattctgtatacctacagtggcctgcgtaatagacgagctgccgtttatgtgggcagcttctcctggtggaccacagaccagcagctgatccaggttattcgctctataggagtctatgatgtggtggagttgaaatttgcagagaatcgagcaaatggccagtccaaagggtatgctgaggtggtggtagcctctgaaaactctgtccacaaattgttggaactcctacc

SEQ ID NO: 342483 - DNA, 435 bp, Artificial Sequence
  derived and/or modified sequence
atgagcgagggcgtggacctgatcgacatctacgccgacgaggagttcaaccaggaccccgagttcaacaacaccgaccagatcgacctgtacgacgacgtgctgaccgccaccagccagcccagcgacgacagaagcagcagcaccgagccccccccccccgtgagacaggagcccagccccaagcccaacaacaagacccccgccatcctgtacacctacagcggcctgagaaacagaagagccgccgtgtacgtgggcagcttcagctggtggaccaccgaccagcagctgatccaggtgatcagaagcatcggcgtgtacgacgtggtggagctgaagttcgccgagaacagagccaacggccagagcaagggctacgccgaggtggtggtggccagcgagaacagcgtgcacaagctgctggagctgtag

SEQ ID NO: 342484 - DNA, 441 bp, Artificial Sequence
  derived and/or modified sequence
atgagcgagggcgtggacctgatcgacatctacgccgacgaggagttcaaccaggaccccgagttcaacaacaccgaccagatcgacctgtacgacgacgtgctgaccgccaccagccagcccagcgacgacagaagcagcagcaccgagccccccccccccgtgagacaggagcccagccccaagcccaacaacaagacccccgccatcctgtacacctacagcggcctgagaaacagaagagccgccgtgtacgtgggcagcttcagctggtggaccaccgaccagcagctgatccaggtgatcagaagcatcggcgtgtacgacgtggtggagctgaagttcgccgagaacagagccaacggccagagcaagggctacgccgaggtggtggtggccagcgagaacagcgtgcacaagctgctggagctgctgccctag

SEQ ID NO: 342485 - DNA, 1177 bp, Artificial Sequence
  derived and/or modified sequence
gtgaccagagcggttgcgggctgagcggtttcgagccggcgtcggggagcggcggtaccgggcggctgcggggctggctcgacccagcttgaggtctcggcgtccgcgtcctgcggtgccctgggatccgccgacatgaatcccatcgtagtggtccacggcggcggagccggtcccatctccaaggatcggaaggagcgagtgcaccagggcatggtcagagccgccaccgtgggctacggcatcctccgggagggcgggagcgccgtggatgccgtagagggagctgtcgtcgccctggaagacgatcccgagttcaacgcagacacctcattgctttctgactgaccaaggcgcagcgcagtttgcagcagctatgggggttccagagattcctggagaaaaactggtgacagagagaaacaaaaagcgcctggaaaaagagaagcatgaaaaaggtgctcagaaaacagattgtcaaaaaaacttgggaaccgtgggtgctgttgccttggactgcaaagggaatgtagcctacgcaacctccacaggcggtatcgttaataaaatggtcggccgcgttggggactcaccgtgtctaggtaggaccaagggatgcctcctgccccttcccctcttctcccgccctcaggctttcctcactctctattccctgcccctctccgtttcttgctgcgttccctttctgcttttggtgcagctccaggatgtctgggagtgacaatggggttggaaggggttgttcggggtgctgccttgagagggtgtttgtatctggcgccactgtttttactagattgcatgcctttttggaacaacttggggagagaagtggagacagggatgctaacgttgcccccagtctaccctgtcgtgattctgtcttctctttagccacagtttcaggatctgcagacttacttgagtaagacttactcccgagacatgggctctgattagcaatctgagaaatctgagactgcagttgttagatctgagcagcatgaaagtgacatacttctacagacacattatagattgagatgttgtttacattaacggggaagcacgccatctcattcccaggagtgggtgagaggcagggctggggggctgtatgtttcactccgtgcagactttcacacttgtcatgcag

SEQ ID NO: 342486 - protein, 551 aa, Artificial Sequence
  derived and/or modified sequence
MAAPVRLGRKRPLPACPNPLFVRWLTEWRDEATRSRRRTRFVFQKALRSLRRYPLPLRSGKEAKILQHFGDGLCRMLDERLQRHRTSGGDHAPDSPSGENSPAPQGRLAEVQDSSMPVPAQPKAGGSGSYWPARHSGARVILLVLYREHLNPNGHHFLTKEELLQRCAQKSPRVAPGSARPWPALRSLLHRNLVLRTHQPARYSLTPEGLELAQKLAESEGLSLLNVGIGPKEPPGEETAVPGAASAELASEAGVQQQPLELRPGEYRVLLCVDIGETRGGGHRPELLRELQRLHVTHTVRKLHVGDFVWVAQETNPRDPANPGELVLDHIVERKRLDDLCSSIIDGRFREQKFRLKRCGLERRVYLVEEHGSVHNLSLPESTLLQAVTNTQVIDGFFVKRTADIKESAAYLALLTRGLQRLYQGHTLRSRPWGTPGNPESGAMTSPNPLCSLLTFSDFNAGAIKNKAQSVREVFARQLMQVRGVSGEKAAALVDRYSTPASLLAAYDACATPKEQETLLSTIKCGRLQRNLGPALSRTLSQLYCSYGPLT

SEQ ID NO: 342487 - DNA, 1656 bp, Artificial Sequence
  derived and/or modified sequence
atggccgcccccgtgagactgggcagaaagagacccctgcccgcctgccccaaccccctgttcgtgagatggctgaccgagtggagagacgaggccaccagaagcagaagaagaaccagattcgtgttccagaaggccctgagaagcctgagaagataccccctgcccctgagaagcggcaaggaggccaagatcctgcagcacttcggcgacggcctgtgcagaatgctggacgagagactgcagagacacagaaccagcggcggcgaccacgcccccgacagccccagcggcgagaacagccccgccccccagggcagactggccgaggtgcaggacagcagcatgcccgtgcccgcccagcccaaggccggcggcagcggcagctactggcccgccagacacagcggcgccagagtgatcctgctggtgctgtacagagagcacctgaaccccaacggccaccacttcctgaccaaggaggagctgctgcagagatgcgcccagaagagccccagagtggcccccggcagcgccagaccctggcccgccctgagaagcctgctgcacagaaacctggtgctgagaacccaccagcccgccagatacagcctgacccccgagggcctggagctggcccagaagctggccgagagcgagggcctgagcctgctgaacgtgggcatcggccccaaggagccccccggcgaggagaccgccgtgcccggcgccgccagcgccgagctggccagcgaggccggcgtgcagcagcagcccctggagctgagacccggcgagtacagagtgctgctgtgcgtggacatcggcgagaccagaggcggcggccacagacccgagctgctgagagagctgcagagactgcacgtgacccacaccgtgagaaagctgcacgtgggcgacttcgtgtgggtggcccaggagaccaaccccagagaccccgccaaccccggcgagctggtgctggaccacatcgtggagagaaagagactggacgacctgtgcagcagcatcatcgacggcagattcagagagcagaagttcagactgaagagatgcggcctggagagaagagtgtacctggtggaggagcacggcagcgtgcacaacctgagcctgcccgagagcaccctgctgcaggccgtgaccaacacccaggtgatcgacggcttcttcgtgaagagaaccgccgacatcaaggagagcgccgcctacctggccctgctgaccagaggcctgcagagactgtaccagggccacaccctgagaagcagaccctggggcacccccggcaaccccgagagcggcgccatgaccagccccaaccccctgtgcagcctgctgaccttcagcgacttcaacgccggcgccatcaagaacaaggcccagagcgtgagagaggtgttcgccagacagctgatgcaggtgagaggcgtgagcggcgagaaggccgccgccctggtggacagatacagcacccccgccagcctgctggccgcctacgacgcctgcgccacccccaaggagcaggagaccctgctgagcaccatcaagtgcggcagactgcagagaaacctgggccccgccctgagcagaaccctgagccagctgtactgcagctacggccccctgacctag

SEQ ID NO: 342488 - DNA, 1656 bp, Artificial Sequence
  derived and/or modified sequence
atggccgctcctgtgcggcttggccgaaaaaggcctttgcctgcctgccccaacccacttttcgtccgctggctgaccgaatggagggacgaagctactcgcagtaggcggagaacacgctttgtgtttcaaaaagcccttaggtcgctgcgccggtatccacttcccctgcgaagcggcaaagaagccaagatcctgcagcactttggtgacggattgtgcaggatgttggacgagagattacagagacacaggacgtccggcggagaccacgcccctgattcccctagcggcgagaactctcctgccccacagggccgccttgctgaggtccaagactcaagtatgccggtgcctgcccagcctaaagccggcggttccggctcctattggccggcccggcactcaggtgctcgcgtgatattactggtgctttacagggaacacctgaaccccaacggccatcacttccttaccaaggaggagctgctgcaacggtgcgcacagaagtcacctcgcgtcgctccaggcagtgcccgcccgtggcctgctctaagaagcctgctgcataggaatctagtgctgaggacacaccaacctgcacgatacagccttactcccgagggtttagagctggcgcaaaagcttgcggagagcgaaggcctctcactgttaaacgttggtatcggccccaaggagccaccaggcgaagagacagccgtgcctggagccgcgtctgccgaattagccagtgaagctggcgtgcagcaacaaccattggaattgagaccaggtgagtatagagtcctcctgtgcgtggatattggtgaaacccgcggcggggggcatcgtcccgagttgctgagggaactacagaggcttcacgtaacgcatacagtgagaaagctgcacgtgggcgactttgtgtgggtggcacaagagacaaatccaagggatcctgccaacccaggagagctcgtgctggatcacatcgtcgagcggaaacggcttgacgatctttgcagctctatcattgatgggcgctttagggagcagaaattccggctcaaaaggtgtggcttagagaggcgggtttacctcgtcgaggaacacggtagtgtgcataatctatcgttgcccgaaagtacactgctacaagccgtcaccaatacacaggtgatcgatggcttcttcgttaagaggactgccgacatcaaggaaagtgccgcatacctcgctctgttgactcgcggcctgcagagactgtatcaaggtcataccctgagatcgaggccatggggcacccccggtaatcctgagtccggcgcgatgaccagccctaacccactgtgcagcctcctcaccttttctgattttaacgccggagccatcaaaaacaaggcccagagcgttcgagaggtgtttgcacggcagcttatgcaggtgcgtggcgtgtcgggggagaaagcagccgctctagtagatcggtatagcacccctgcatctctgttggccgcctatgacgcttgcgctactcctaaagagcaagagactctgctctcaacgataaagtgcggtaggcttcagagaaacctagggcctgccctgtctcgaacattgtctcagctgtactgtagttacgggcccctgacttag

SEQ ID NO: 342489 - DNA, 1656 bp, Artificial Sequence
  derived and/or modified sequence
atggccgcgcccgtgcgtttggggcgcaaaagacctctacctgcatgcccaaatccattatttgtgcgatggttgaccgaatggcgagacgaggccacacgtagcagacgcaggacgaggttcgtgtttcaaaaagccctccggagcctgcggaggtacccacttcctctgcgttctggtaaggaagccaaaattcttcagcatttcggggatggactgtgccgtatgctagatgagaggctccagcggcataggaccagcggtggtgatcatgcgcccgactccccttcaggcgaaaactctccggcaccacagggtagactggctgaagtgcaagacagcagtatgccggtacccgctcagccaaaagccggcggatcgggatcttattggccggctcggcattccggggcccgcgtcattctacttgtattatacagagagcatcttaatccaaacgggcaccattttctgaccaaggaagaattacttcagaggtgcgcccaaaagtcccctcgcgtggccccaggtagcgcccgcccttggcctgctctgcgatctctgttacaccgcaacctggtgcttcgcactcaccagcctgctagatattctctgacccctgaggggcttgagctagcccaaaaattagccgagagcgaaggactttcgctgctgaacgtcggaatcggacccaaggagcctccgggagaggagaccgctgtgccaggggcagcttctgcagaactcgcctcagaggccggtgtgcagcagcagccactggaattgagaccaggcgaatatagagtactcctgtgcgtggatatcggcgagaccagagggggaggccatcgcccagaattgttgagggaacttcaacggctgcacgtcacacacactgtgagaaagctccatgtgggcgactttgtgtgggtagcacaggagactaatcctcgggacccagcaaatcccggcgagctggtccttgaccacatcgtggagcgcaagcggctggatgacctatgttcgagcattatcgacggcagattcagagaacagaagttccgcttgaagcgctgtgggctggagcgacgcgtgtatctagtggaggaacacgggtctgtgcacaacctgtccctgccggagagtacactcttgcaggccgtaactaatacacaggtcatcgacggcttcttcgtgaagcgcacagccgatatcaaggaatccgcggcatatttagccctgctgacccgggggctgcagcggctgtaccaaggtcataccctgcgctcgaggccttggggcacacctggcaatcccgagtcaggggctatgacatcaccaaacccactctgcagtcttctcacattttccgacttcaatgcaggagcaatcaagaataaggcccaaagcgtacgtgaagtgttcgcacggcaattaatgcaggtgcgaggagtctccggggaaaaagcagcggcgttagtcgatcgttactctactccagcttccctgctggctgcttacgatgcttgcgccacacccaaggagcaggaaacgctcttatcaactattaaatgtggacggctccagcgtaatctgggacccgccctgagtaggacactgtctcagttatactgtagttatgggcccctgacatag

SEQ ID NO: 342490 - DNA, 1656 bp, Artificial Sequence
  derived and/or modified sequence
atggccgcccctgtgcggctgggcaggaagaggcccctgcctgcctgccccaaccccctgtttgtgcgctggctgacagagtggagagatgaggccaccaggagcagaagaaggaccaggtttgtgttccagaaggccctgcggagcctgcggcgctaccccctgcccctgcggagcggcaaggaggccaagatcctgcagcactttggagatggcctgtgcaggatgctggatgagcggctgcagaggcacaggaccagcggcggggaccacgccccagacagccccagcggggagaacagccctgccccccagggccgcctggccgaggtgcaggacagctccatgcctgtgcctgcccagcccaaggccggcggcagcggcagctactggccagcccggcacagcggggcccgggtcatcctgctggtgctgtaccgggagcacctgaaccccaacggccaccacttcctgaccaaggaggagctgctgcagagatgtgcccagaagagcccccgggtggcccctggcagcgcccggccctggccagccctgcggagcctgctgcacaggaacctggtgctgcggacccaccagcctgcccgctacagcctgaccccagagggcctggagctggcccagaagctggccgagagcgagggcctgagcctgctgaatgtgggcatcggccccaaggagcccccaggagaggagacagctgtgcctggggccgccagcgctgagctggccagcgaggccggcgtgcagcagcagcccctggagctgcggcctggagagtacagagtgctgctgtgtgtggacattggagagacccggggcggcggccacaggcctgagctgctgcgggagctgcagaggctgcacgtgacccacacagtgaggaagctgcacgtgggggactttgtgtgggtggcccaggagaccaacccccgggaccctgccaaccctggagagctggtgctggaccacatcgtggagaggaagaggctggatgacctgtgcagcagcatcattgatggccgcttccgggagcagaagttccggctgaagagatgtggcctggagaggagagtgtacctggtggaggagcacggctctgtgcacaacctgagcctgcctgagagcaccctgctgcaggccgtgaccaacacccaggtgattgatggcttctttgtgaagaggacagctgacatcaaggagagcgctgcctacctggccctgctgacccggggcctgcagaggctgtaccagggccacaccctgcggagccggccctggggcaccccaggcaaccctgagagcggggccatgaccagccccaaccccctgtgcagcctgctgaccttcagtgacttcaatgctggggccatcaagaacaaggcccagagcgtgcgggaggtgtttgcccggcagctgatgcaggtgcggggcgtgtctggagagaaggctgctgccctggtggaccgctacagcaccccagccagcctgctggccgcctatgatgcctgtgccacccccaaggagcaggagaccctgctgagcaccatcaagtgtggccgcctgcagaggaacctgggccctgccctgagcaggaccctgagccagctgtactgcagctatggccccctgacctag

SEQ ID NO: 342491 - DNA, 1656 bp, Artificial Sequence
  derived and/or modified sequence
atggccgcccccgtgcggctgggccggaagcggcccctgcccgcctgcccaaatcctttgttcgtccgatggctgacggaatggagggatgaggcaacgcggtcccgacgaaggaccaggttcgtcttccagaaggccctgcggtccctcaggcgctacccccttcctcttaggagcgggaaagaagctaaaatcctgcagcacttcggggatggactttgtcgcatgttggatgagcgcttgcaaaggcaccgcaccagcgggggtgaccacgcacccgattcgccctctggagaaaactctcctgcgccccaaggacggctggccgaagtgcaggacagttccatgccggtgcctgcacagccaaaagccggcggaagcggctcttactggcccgctcgccattccggagccagagttatcctgttggttctatatcgcgagcatctaaatccaaacggtcaccactttctcacaaaggaggaactgttgcagcggtgcgcacagaaatctcctagggtcgcacccggcagcgcccgtccatggcctgcactacgttctctgctgcataggaacctcgtcctgagaactcatcaacccgccagatatagcctaacgcccgagggtttggagctggctcaaaagctggccgagtcagagggcttatccttattgaacgtgggtatcggacctaaggaaccccccggagaggaaacagctgtccccggggctgctagcgcggaactggcgagcgaggcaggcgtgcagcaacagcccctggagttacgacccggcgagtacagagtactgctgtgtgttgatataggagaaacaaggggcggcgggcaccgccctgaactcctgagagaactgcagcgtctccatgtcacacacactgtgcggaagctgcacgttggggattttgtctgggttgcacaggaaacaaatcccagagacccagctaatcccggagaattggtattagaccacatcgtcgagcggaagcgcctcgacgatctgtgcagctccatcatcgatggccggtttcgagaacagaagttccggcttaaacgatgcgggctagaacggagagtgtacttggtagaagaacacggttcagtccataacctgtctctgcccgaaagcaccctgctccaggccgtgacaaatacgcaggtaatcgacggcttttttgttaagaggaccgcagacatcaaggagtccgcggcctacctggcgctcctgactaggggcctgcagcgcctgtaccaaggacacactctgcgcagccgcccgtggggaacaccagggaatccagaatctggtgccatgacatcacctaatccactctgttccctgctaactttcagcgactttaatgctggcgccatcaagaacaaggcccagtcagtgcgggaggtgttcgcacggcaactcatgcaggtgaggggggtgagcggcgagaaagctgcagctttggtggaccgatattctacaccggcatccctccttgccgcttatgacgcctgtgccactcccaaggagcaggaaaccttgctctctaccattaagtgtggccggttgcagcggaacctgggtccggctctgtctagaacgctcagtcaactgtactgttcttatggaccactgacttag

SEQ ID NO: 342492 - DNA, 1656 bp, Artificial Sequence
  derived and/or modified sequence
atggccgcccccgtgcggctgggccggaagcggcccctgcccgcctgcccaaatccattatttgtgcgatggctcaccgagtggagggacgaggctactcggtctaggaggaggacccgcttcgtatttcagaaagccttgagatcgctgcgccgataccccctgcccttgcgatcaggaaaggaagcaaagatccttcaacatttcggcgatggtctttgtagaatgctggatgaaagacttcagcgacacaggacgtccggcggggatcatgctcccgattctccttcgggggaaaattctccggcgccgcagggaagactggccgaggtgcaggattcctcgatgcctgtccctgctcaacccaaagccggtggcagtggttcttactggcctgctcggcactctggggctcgcgtaattctgcttgtgttataccgcgaacatctgaacccaaacggacaccattttttgacaaaagaggaacttctccaacggtgcgctcagaaaagcccgcgcgttgccccaggctcagccaggccctggcccgcattgagatctctgctccatcggaaccttgtgctgaggacccaccaacctgcccgctatagcctgactccagagggcctggagctggctcagaagctggcggagtctgaaggactgtccctgttaaatgttgggattgggccaaaggagccacccggcgaagagaccgccgtgcctggagccgccagcgccgaactggcatctgaggccggcgtgcagcagcagccgcttgagttgcgacccggggaatatagggttttgctgtgtgtggacattggcgagaccaggggaggtggtcacaggcccgagttattgagggaattgcagcgactccatgtgacgcatactgttaggaagctgcatgtcggggacttcgtttgggtggcgcaggagacaaacccccgtgacccggccaatccaggagagctggtcctcgaccacattgtggagagaaagcgactcgacgacctgtgctctagtatcattgatggtcggtttagggaacagaagtttcgcttaaaacggtgcggcctcgagagacgcgtgtatcttgtggaggaacacggttctgtccacaatctgtcactgcctgagtccaccttactgcaggctgtaacaaatacccaggtcatcgacgggttctttgtgaagcgaactgcggacatcaaggaatccgccgcgtatcttgcccttttaactaggggactgcagagactttaccaaggtcacacccttcgctcacgaccttggggaaccccaggaaatccggagagtggcgctatgacttcacctaatcccctgtgttctctcctcaccttctctgatttcaacgctggggccattaagaacaaagctcagtcagtgagggaagtattcgccagacagcttatgcaggtgcgtggggtcagtggtgagaaagccgcggcactggtggacaggtactccacgcctgcctctctgttggcggcgtatgatgcgtgcgcaaccccaaaggagcaagagaccttgctgtccacgattaagtgcggacggcttcagcggaacctcggacccgccctctcaagaacattgtctcaactgtactgtagttacggccctctcacatag

SEQ ID NO: 342493 - DNA, 2392 bp, Artificial Sequence
  derived and/or modified sequence
acaaagaccccgctctcgaatctggggtgacaggaaggagccggtccaggctccgggggctgggaaagggcgcgtctcaaaggctggctggagtggagccaagggaaaagatcgttagagacagcgcccctgaccaaccacttagagcagcgcaggggtgggagggcggccgcaggctctcctctcgttagtgccccctgtgtttggggccccgtgatctcaacggtcctgccctcggtctccctcttcccccgccccgccctgggccaggtgttcgaatcccgactccagaactggcggcgtcccagtcccgcgggcgtggagcgccggaggacccgccctcgggctcatggcggccccggtccgcctgggccggaagcgcccgctgcctgcctgtcccaacccgctcttcgttcgctggctgaccgagtggcgggacgaggcgacccgcagcaggcgccgcacgcgcttcgtatttcagaaggcgctgcgttccctccgacggtacccactgccgctgcgcagcgggaaggaagctaagatcctacagcacttcggagacgggctctgccggatgctggacgagcggctgcagcggcaccgaacatcgggcggtgaccatgccccggactcaccatctggagagaacagtccagccccgcaggggcgacttgcggaagtccaggactcttccatgccagttcctgcccagcccaaagcgggaggctctggcagctactggccagctcggcactcaggagcccgagtgatactgctggtgctctaccgggagcacctgaatcctaatggtcaccacttcttaaccaaggaggagctgctgcagaggtgtgctcagaagtcccccagggtagcccctgggagtgctcgaccctggccagccctccgctccctccttcacaggaacctggtcctcaggacacaccagccagccaggtactcattgaccccagagggcctggagctggcccagaagttggccgagtcagaaggcctgagcttgctgaatgtgggcatcgggcccaaggagccccctggggaggagacagcagtgccaggagcagcttcagcagagcttgccagtgaagcaggggtccagcagcagccactggagctgaggcctggagagtacagggtgctgttgtgtgtggacattggcgagacccgggggggcgggcacaggccggagctgctccgagagctacagcggctgcacgtgacccacacggtgcgcaagctgcacgttggagattttgtgtgggtggcccaggagaccaatcctagagacccagcaaaccctggggagttggtactggatcacattgtggagcgcaagcgactggatgacctttgcagcagcatcatcgacggccgcttccgggagcagaagttccggctgaagcgctgtggtctggagcgccgggtatacctggtggaagagcatggttccgtccacaacctcagccttcctgagagcacactgctgcaggctgtcaccaacactcaggtcattgatggcttttttgtgaagcgcacagcagacattaaggagtcagccgcctacctggccctcttgacgcggggcctgcagagactctaccagggccacaccctacgcagccgcccctggggaacccctgggaaccctgaatcaggggccatgacctctccaaaccctctctgctcactcctcaccttcagtgacttcaacgcaggagccatcaagaataaggcccagtcggtgcgagaagtgtttgcccggcagctgatgcaggtgcgcggagtgagtggggagaaggcagcagccctggtggatcgatacagcacccctgccagcctcctggccgcctatgatgcctgtgccacccccaaggaacaagagacactgctgagcaccattaagtgtgggcgtctacagaggaatctggggcctgctctgagcaggaccttatcccagctctactgcagctacggccccttgacctgagcttatgccgtgaaacagcccccagcccccgtctgtcccccaacccaggctagccagccttttaacaacatcttttggggtacaattagaatctaagtgtttgcagccatatgtgtcatgtagaagatgcctagccctggggaccttgtgaaatacgcaggaaccagggataccatctggtccagtggtttttaaacaaagctgcttagcacctggaattccctggtcagggagatggagtcagtggggcattgcagcttggaatctattttatgtcaccagttggtcctcatcaaataaaatttccttaggagtgcagagggctcattgggaaaataaaaataataaaaataaataaaacttcctaaaagaaaagattgaaaacca

SEQ ID NO: 342494 - DNA, 2358 bp, Artificial Sequence
  derived and/or modified sequence
aaagaccccgctctcgaatctggggtgacaggaaggagccggtccaggctccgggggctgggaaagggcgcgtctcaaaggctggctggagtggagccaagggaaaagatcgttagagacagcgcccctgaccaaccacttagagcagcgcaggggtgggagggcggccgcaggctctcctctcgttagtgccccctgtgtttggggccccgtgatctcaacggtcctgccctcggtctccctcttcccccgccccgccctgggcggcgtcccagtcccgcgggcgtggagcgccggaggacccgccctcgggctcatggcggccccggtccgcctgggccggaagcgcccgctgcctgcctgtcccaacccgctcttcgttcgctggctgaccgagtggcgggacgaggcgacccgcagcaggcgccgcacgcgcttcgtatttcagaaggcgctgcgttccctccgacggtacccactgccgctgcgcagcgggaaggaagctaagatcctacagcacttcggagacgggctctgccggatgctggacgagcggctgcagcggcaccgaacatcgggcggtgaccatgccccggactcaccatctggagagaacagtccagccccgcaggggcgacttgcggaagtccaggactcttccatgccagttcctgcccagcccaaagcgggaggctctggcagctactggccagctcggcactcaggagcccgagtgatactgctggtgctctaccgggagcacctgaatcctaatggtcaccacttcttaaccaaggaggagctgctgcagaggtgtgctcagaagtcccccagggtagcccctgggagtgctcgaccctggccagccctccgctccctccttcacaggaacctggtcctcaggacacaccagccagccaggtactcattgaccccagagggcctggagctggcccagaagttggccgagtcagaaggcctgagcttgctgaatgtgggcatcgggcccaaggagccccctggggaggagacagcagtgccaggagcagcttcagcagagcttgccagtgaagcaggggtccagcagcagccactggagctgaggcctggagagtacagggtgctgttgtgtgtggacattggcgagacccgggggggcgggcacaggccggagctgctccgagagctacagcggctgcacgtgacccacacggtgcgcaagctgcacgttggagattttgtgtgggtggcccaggagaccaatcctagagacccagcaaaccctggggagttggtactggatcacattgtggagcgcaagcgactggatgacctttgcagcagcatcatcgacggccgcttccgggagcagaagttccggctgaagcgctgtggtctggagcgccgggtatacctggtggaagagcatggttccgtccacaacctcagccttcctgagagcacactgctgcaggctgtcaccaacactcaggtcattgatggcttttttgtgaagcgcacagcagacattaaggagtcagccgcctacctggccctcttgacgcggggcctgcagagactctaccagggccacaccctacgcagccgcccctggggaacccctgggaaccctgaatcaggggccatgacctctccaaaccctctctgctcactcctcaccttcagtgacttcaacgcaggagccatcaagaataaggcccagtcggtgcgagaagtgtttgcccggcagctgatgcaggtgcgcggagtgagtggggagaaggcagcagccctggtggatcgatacagcacccctgccagcctcctggccgcctatgatgcctgtgccacccccaaggaacaagagacactgctgagcaccattaagtgtgggcgtctacagaggaatctggggcctgctctgagcaggaccttatcccagctctactgcagctacggccccttgacctgagcttatgccgtgaaacagcccccagcccccgtctgtcccccaacccaggctagccagccttttaacaacatcttttggggtacaattagaatctaagtgtttgcagccatatgtgtcatgtagaagatgcctagccctggggaccttgtgaaatacgcaggaaccagggataccatctggtccagtggtttttaaacaaagctgcttagcacctggaattccctggtcagggagatggagtcagtggggcattgcagcttggaatctattttatgtcaccagttggtcctcatcaaataaaatttccttaggagtgcagagggctcattgggaaaataaaaataataaaaataaataaaacttcctaaaagaaaagattgaaaacc

SEQ ID NO: 342495 - DNA, 1656 bp, Artificial Sequence
  derived and/or modified sequence
atggccgctcccgtcagattaggtcggaagcgtcccctgcctgcctgcccgaatcctctgttcgtgcggtggcttacggagtggagagatgaagccactcggtctcgcaggcgcacccgcttcgtttttcagaaagccttgcgttctctgcgcaggtatccgctgcctctgaggtctggcaaagaagctaaaattctccagcacttcggagacggtctgtgccggatgctggacgaacgacttcagaggcatcgcacaagcggcggtgatcatgccccagattctccatcgggcgaaaacagccccgctccccaaggcaggttggcggaagtccaagattcctccatgccggtgccggctcagcctaaggctgggggaagcggcagttactggccagctaggcattcaggcgcaagagtaatcttgcttgttctgtatagagaacacctgaaccctaatggacaccatttcctgaccaaggaggaactactgcagcggtgcgcccaaaagtctcctcgggtggcaccgggatctgctcgcccttggccggctctgagaagcctgctccaccgcaacctagtgctgaggactcaccagcccgcacggtattcactgacacctgagggactcgagctggcacagaagctggcagaaagcgaaggcttgtctctgcttaatgtggggattggtcccaaggaaccaccgggtgaggagacagcggttcccggagccgcttcggccgagctggcttccgaggctggagtacagcagcaaccattggagctgaggccaggtgagtacagggtactgctttgcgtggacattggggagacgagagggggtggccaccggcctgaattgttgagggaacttcagcggctacacgtgacccatacggtaagaaaactgcatgtgggagattttgtctgggtggcgcaagagaccaatccccgtgatccagcaaacccaggagagctagtgttggaccatatcgtggaaaggaaacggctcgacgatttgtgctcctctattatcgacggcaggtttcgtgagcaaaaatttcggcttaagaggtgcggcctggaacgccgagtgtacctggtggaggagcacgggtccgtgcacaacctttccttgcctgagtctactctgctacaagctgtcactaacacacaggtcatcgacggttttttcgtgaaaaggaccgctgacattaaggagtcagcagcttatctggctctcctgacgaggggcttgcaaagactgtatcagggacacaccctgagatctcgaccatggggcactccagggaatccagagagcggggctatgacttctcccaatcctctgtgctctctgctgacattcagtgactttaacgcgggtgcaattaagaataaagcccaaagtgtacgcgaggtttttgccagacagttgatgcaagtgcggggtgtgagcggcgagaaagcagcggcactagtggatcggtatagcactcccgcttctttacttgcagcctatgacgcttgtgctactcctaaggagcaggaaacactgctcagcaccataaagtgcggtaggctgcagcgcaacttggggcctgccctgtctcgaactctgagtcagttatattgttcatacgggcctctgacgtag

SEQ ID NO: 342496 - DNA, 1656 bp, Artificial Sequence
  derived and/or modified sequence
atggcggctcctgtgaggttaggcagaaaaagacctcttccggcatgccctaatcctctttttgtcagatggttaaccgagtggcgtgatgaggcgacccgatcccgcaggcgaacgaggttcgtatttcaaaaagccctgcggtcgctgcgtagataccctctgcctttgcgaagcggcaaagaagccaagatcctacagcactttggggatgggctctgcagaatgctcgacgaacgcttacagaggcatcggacctccggaggggatcacgctccagattctcctagcggtgagaacagcccagctcctcagggacgcttagccgaagtgcaggatagtagtatgccggttccagcccaaccaaaagccggaggctccggaagctactggccggctcgccactctggagctagagtgatcctgctggttttgtatcgagaacacctcaatcctaacggccaccacttcctgaccaaagaggagcttttgcagcgatgcgcacaaaaaagcccgcgtgtagctccgggaagtgccaggccttggcctgccctacgatcactgttgcatcggaatctggtgcttcgcacgcaccagccagctcgttattctctcacgccagagggactggaattagcccagaaactggcagagtcagaggggctatccttgctgaatgtcggcatcgggccaaaggagccccctggagaggaaacagccgtgcccggagccgcatcagccgagctggcctctgaagccggagtgcagcagcaacccctggaattgagacctggtgagtatagggtgttactatgtgtggatatcggcgaaacccggggtggcggacaccgccctgagctgctccgggagctgcagagactgcacgtaacacataccgtgagaaagctgcacgtcggagacttcgtatgggtggcccaggagactaaccctagagaccctgctaaccccggagagctggtattggaccacatcgtggagagaaagcggctggatgatctgtgcagctccatcattgacgggcgattccgggagcagaagtttcgcctcaaacggtgcgggctcgaaagacgcgtgtatctcgtcgaggagcacggctctgttcacaatctatcattacctgagtctactctgctgcaggccgtgaccaatacccaagttatagatggttttttcgttaaacgcacagcagatataaaggagagtgcggcttacctggcgctgctaacacggggactgcagcgcctgtaccagggccataccttgagaagtagaccttgggggacccctggcaacccagagtccggcgctatgacatccccaaatcctctctgcagcctcctcaccttctctgacttcaacgccggagcgatcaagaacaaagctcagagcgtgcgcgaagtgttcgccaggcagctgatgcaggtccggggagtgtccggcgagaaggccgcagccctcgtggatcgttattccacccccgctagcttactagccgcttatgatgcttgtgccactcctaaagaacaggaaaccttgttgagcacaatcaagtgcggtcgcctgcagcggaatcttggccctgctctcagtcgcaccctatcacagctgtactgcagctacggacccctgacttag

SEQ ID NO: 342497 - protein, 135 aa, Artificial Sequence
  derived and/or modified sequence
MVRHQPLQYYEPQLCLSCLTGIYGCRWKRYQRSHDDTTPWERLWFLLLTFTFGLTLTWLYFWWEVHNDYDEFNWYLYNRMGYWSDWPVPILVTTAAAFAYIAGLLVLALCHIAVGQQMNLHWLHKASSGLPLSPL

SEQ ID NO: 342498 - DNA, 3106 bp, Artificial Sequence
  derived and/or modified sequence
tggtgcctgactcctcacccttcccctgcctcactgccctgtgcttcctcctgcaggacaagctgggggcctccatgggcgcctgagggccaggcgccagggccgtgggcacgagtatggtgagacaccagcccctgcagtactacgagccacagctgtgcctctcctgcctcacgggcatctacggctgccgttggaagcgctaccagcgctcccatgatgataccacaccgtgggagcgcctctggttcctgctcctcaccttcacctttggcctcacgctcacctggctttacttctggtgggaagtccacaatgactatgatgaattcaactggtacctctacaaccgcatgggctactggagcgactggcccgtacccatccttgtgaccacagctgctgccttcgcatacatcgctggcctcctggtcctggcactatgtcacattgccgtggggcagcagatgaacctgcactggctgcacaaggcctcctctgggcttccactatcccctctgtgagggagtttcttctcctggctgcaaagctggcatttgaaagaactgcaccagctggcaccccgggtggggctggcacatgctgtggtcaccttctggggccatgcctggctctcagcaggctgccctgagcacactgcactgctcttctgtcctcgcctgactcccctgcctcagtggcagcagcccccagcccaggacctgcacagaggaggcgtctgtcagcgacccaacctgagccccagagaggagcactgggtaccacacagccccaagatcgggctggtggtcatcctggcttccacggtggtggccatgtcggccgtggcccagctgtgggaggacgagtgggaggtgctgctgatctccctgcagggcacagcgccattcctgcatgtgggggctgtggcagcagtcaccatgctctcctggatcgtggcaggacagttcgcccgcgcagagcggacctcctcccaggtgaccattctctgtaccttcttcaccgtggtgtttgccctctacctggcccctctcaccatctcctctccctgcatcatggagaagaaagacctcggccccaagcctgctctcattggccaccgcggggcccccatgctggctccagagcacacgctcatgtccttccggaaggccctcgagcagaagctgtacgggctccaggctgacattaccatcagcctggacggcgtgcccttcctcatgcatgacaccaccctgcggcgcaccaccaacgtggaggaggagttcccggagctggcccgcaggcctgcctccatgcttaactggaccaccctgcagagactcaacgctggccagtggttcctgaagactgaccccttctggacagccagctccctgtcaccctccgaccacagagaggcccagaaccagtccatctgcagcctggcagagctcctggagctggccaagggcaatgccacactgctgctcaacctgcgtgacccgccccgggagcacccctaccgcagcagttttatcaacgtgactctggaggccgtgctgcactccggcttcccccagcaccaggtcatgtggctgcctagcaggcagaggcccctggtgcggaaggtggctcccggcttccaacagacatcaggctccaaggaggcagtcgccagcctgcggagaggccacatccagcggctgaacctgcgctacactcaggtgtcccgccaggagctcagggactacgcgtcctggaacctgagtgtgaacctctacacagtcaacgcaccgtggctcttctccctgctgtggtgtgcgggggtcccatccgtcacctctgacaactcccacgccctgtcccaggtgccttcccccctctggatcatgcccccggacgagtactgtctcatgtgggtcactgccgacctggtctccttcaccctcatcgtgggcatcttcgtgctccagaagtggcgcctgggtggcatacggagctacaaccctgagcagatcatgctgagtgctgcggtgcgccggaccagccgggacgtcagcatcatgaaggagaagcttattttctcagagatcagcgatggtgtagaggtctccgatgtgctctccgtatgttcagacaacagttatgacacatatgccaacagcaccgccacccctgtgggcccccgagggggtggcagccacaccaagaccctcatagagcggagtgggcgttagctgaagacatgtctgtcccacctgtacctgacacagaagctggggagcctaggagagctggtggaagtgtgtctgaactcggagtgctctgggagcgggctccacagcctccttgtgggctccagccccttgtcagccgcagcctctcttgagggggactccctgtctcctgaggcccagctgggccaggactccatcctttcagatgcccctgcaggcctggggctccttctgggaagtatggggcctagggcttggtccccctcttctgaggccctctcctgtatcccgacctggaagctttgatgggtcatgggccatgccataccccctgtggcaatggagtgtgtggatgctcacctgtgccatctgtcctcctgtctgtgccaggaggcacctgagttctctgctgttatcctgccccaagggcctgggccgagcctctacctgaagcaactctgctcttcctgtcagtctcaaagcacaaggaggttcagcccaggaggaagccagctgcaatgtggagacacgtcctcctccccaacccacctcatgccaccgccaaccccctgccccaggagcgggcctgagccacgtcctctaggagcagctggagatggccaaaagagtgagctcaggactactggatcccatgcccaggtgtccagcagacctcaaggcagaagggtcacctaacccaggagtccacagactgatgtgacctcaggttcccacatcagtggccacagggcagggcccacctggtagaagtgttctggatatggccagggtgggtgtgtggctaagtgggcctgaacagagggaacctagggcccttggccaatgtgattaaagctgccatcttg

SEQ ID NO: 342499 - protein, 486 aa, Artificial Sequence
  derived and/or modified sequence
MVRHQPLQYYEPQLCLSCLTGIYGCRWKRYQRSHDDTTPGTAPFLHVGAVAAVTMLSWIVAGQFARAERTSSQVTILCTFFTVVFALYLAPLTISSPCIMEKKDLGPKPALIGHRGAPMLAPEHTLMSFRKALEQKLYGLQADITISLDGVPFLMHDTTLRRTTNVEEEFPELARRPASMLNWTTLQRLNAGQWFLKTDPFWTASSLSPSDHREAQNQSICSLAELLELAKGNATLLLNLRDPPREHPYRSSFINVTLEAVLHSGFPQHQVMWLPSRQRPLVRKVAPGFQQTSGSKEAVASLRRGHIQRLNLRYTQVSRQELRDYASWNLSVNLYTVNAPWLFSLLWCAGVPSVTSDNSHALSQVPSPLWIMPPDEYCLMWVTADLVSFTLIVGIFVLQKWRLGGIRSYNPEQIMLSAAVRRTSRDVSIMKEKLIFSEISDGVEVSDVLSVCSDNSYDTYANSTATPVGPRGGGSHTKTLIERSGR

SEQ ID NO: 342500 - protein, 467 aa, Artificial Sequence
  derived and/or modified sequence
MSAVAQLWEDEWEVLLISLQGTAPFLHVGAVAAVTMLSWIVAGQFARAERTSSQVTILCTFFTVVFALYLAPLTISSPCIMEKKDLGPKPALIGHRGAPMLAPEHTLMSFRKALEQKLYGLQADITISLDGVPFLMHDTTLRRTTNVEEEFPELARRPASMLNWTTLQRLNAGQWFLKTDPFWTASSLSPSDHREAQNQSICSLAELLELAKGNATLLLNLRDPPREHPYRSSFINVTLEAVLHSGFPQHQVMWLPSRQRPLVRKVAPGFQQTSGSKEAVASLRRGHIQRLNLRYTQVSRQELRDYASWNLSVNLYTVNAPWLFSLLWCAGVPSVTSDNSHALSQVPSPLWIMPPDEYCLMWVTADLVSFTLIVGIFVLQKWRLGGIRSYNPEQIMLSAAVRRTSRDVSIMKEKLIFSEISDGVEVSDVLSVCSDNSYDTYANSTATPVGPRGGGSHTKTLIERSGR

SEQ ID NO: 342501 - protein, 360 aa, Artificial Sequence
  derived and/or modified sequence
MSFRKALEQKLYGLQADITISLDGVPFLMHDTTLRRTTNVEEEFPELARRPASMLNWTTLQRLNAGQWFLKTDPFWTASSLSPSDHREAQNQSICSLAELLELAKGNATLLLNLRDPPREHPYRSSFINVTLEAVLHSGFPQHQVMWLPSRQRPLVRKVAPGFQQTSGSKEAVASLRRGHIQRLNLRYTQVSRQELRDYASWNLSVNLYTVNAPWLFSLLWCAGVPSVTSDNSHALSQVPSPLWIMPPDEYCLMWVTADLVSFTLIVGIFVLQKWRLGGIRSYNPEQIMLSAAVRRTSRDVSIMKEKLIFSEISDGVEVSDVLSVCSDNSYDTYANSTATPVGPRGGGSHTKTLIERSGR

SEQ ID NO: 342502 - DNA, 2424 bp, Artificial Sequence
  derived and/or modified sequence
cggccgtggcccagctgtgggaggacgagtgggaggtgctgctgatctccctgcagggcacagcgccattcctgcatgtgggggctgtggcagcagtcaccatgctctcctggatcgtggcaggacagttcgcccgcgcagagcggacctcctcccaggtgaccattctctgtaccttcttcaccgtggtgtttgccctctacctggcccctctcaccatctcctctccctgcatcatggagaagaaagacctcggccccaagcctgctctcattggccaccgcggggcccccatggcatcaggagaaccctccaggagagctgggaggcagctcagagcccactgtgacagtgagtacggctgaaccgacgtgagttggagaaagacgaagggatcaaagtcagcgccgcattctgccaccagtgcactccatagccctgcaggagagcttcgctggctccagagcacacgctcatgtccttccggaaggccctcgagcagaagctgtacgggctccaggctgacattaccatcagcctggacggcgtgcccttcctcatgcatgacaccaccctgcggcgcaccaccaacgtggaggaggagttcccggagctggcccgcaggcctgcctccatgcttaactggaccaccctgcagagactcaacgctggccagtggttcctgaagactgaccccttctggacagccagctccctgtcaccctccgaccacagagaggcccagaaccagtccatctgcagcctggcagagctcctggagctggccaagggcaatgccacactgctgctcaacctgcgtgacccgccccgggagcacccctaccgcagcagttttatcaacgtgactctggaggccgtgctgcactccggcttcccccagcaccaggtcatgtggctgcctagcaggcagaggcccctggtgcggaaggtggctcccggcttccaacagacatcaggctccaaggaggcagtcgccagcctgcggagaggccacatccagcggctgaacctgcgctacactcaggtgtcccgccaggagctcagggactacgcgtcctggaacctgagtgtgaacctctacacagtcaacgcaccgtggctcttctccctgctgtggtgtgcgggggtcccatccgtcacctctgacaactcccacgccctgtcccaggtgccttcccccctctggatcatgcccccggacgagtactgtctcatgtgggtcactgccgacctggtctccttcaccctcatcgtgggcatcttcgtgctccagaagtggcgcctgggtggcatacggagctacaaccctgagcagatcatgctgagtgctgcggtgcgccggaccagccgggacgtcagcatcatgaaggagaagcttattttctcagagatcagcgatggtgtagaggtctccgatgtgctctccgtatgttcagacaacagttatgacacatatgccaacagcaccgccacccctgtgggcccccgagggggtggcagccacaccaagaccctcatagagcggagtgggcgttagctgaagacatgtctgtcccacctgtacctgacacagaagctggggagcctaggagagctggtggaagtgtgtctgaactcggagtgctctgggagcgggctccacagcctccttgtgggctccagccccttgtcagccgcagcctctcttgagggggactccctgtctcctgaggcccagctgggccaggactccatcctttcagatgcccctgcaggcctggggctccttctgggaagtatggggcctagggcttggtccccctcttctgaggccctctcctgtatcccgacctggaagctttgatgggtcatgggccatgccataccccctgtggcaatggagtgtgtggatgctcacctgtgccatctgtcctcctgtctgtgccaggaggcacctgagttctctgctgttatcctgccccaagggcctgggccgagcctctacctgaagcaactctgctcttcctgtcagtctcaaagcacaaggaggttcagcccaggaggaagccagctgcaatgtggagacacgtcctcctccccaacccacctcatgccaccgccaaccccctgccccaggagcgggcctgagccacgtcctctaggagcagctggagatggccaaaagagtgagctcaggactactggatcccatgcccaggtgtccagcagacctcaaggcagaagggtcacctaacccaggagtccacagactgatgtgacctcaggttcccacatcagtggccacagggcagggcccacctggtagaagtgttctggatatggccagggtgggtgtgtggctaagtgggcctgaacagagggaacctagggcccttggccaatgtgattaaagctgccatcttg

SEQ ID NO: 342503 - DNA, 1083 bp, Artificial Sequence
  derived and/or modified sequence
atgagctttcggaaggcgcttgaacaaaagctgtacggactacaggccgacattactatcagtctcgacggagtgcctttcttgatgcacgatacaaccctgagacgaaccaccaatgttgaggaagaatttcctgagttggcccggcgccccgcttccatgctaaattggaccactctacagcggctgaatgccggacagtggtttctgaagaccgatcccttttggactgcctcatccctatcgcccagcgatcaccgtgaagctcaaaaccagtccatctgcagccttgccgaactactggagctcgccaagggaaatgcaactctgctgctcaacctcagagatccccccagggagcatccatatcgcagctctttcattaacgtcactctcgaggctgtgctgcatagcggattccctcaacatcaggtgatgtggctgccttctcggcagcgccctctggtcagaaaggtcgcccccggatttcagcagacaagtggctcaaaggaggccgttgcgtctttacggagagggcatatccagcgcctcaacctgaggtacacccaggtcagcagacaagagcttcgcgattatgcttcctggaacctaagcgtaaatttgtacactgtcaatgcaccttggctcttttctctgctgtggtgtgcaggtgtgccctccgtgacttccgacaatagccacgccctgagccaggtaccctctcccttgtggatcatgccaccagatgagtactgtttgatgtgggtgacagctgacctggtgagctttacacttattgtggggatctttgtgctgcagaagtggcgcctcggtggaatccggagctataatccagagcagatcatgctctcagcagcagtgaggcggacttcacgcgacgtcagcattatgaaggagaaactcatttttagcgagattagcgatggtgtcgaggtgtcagatgtgctcagcgtgtgctctgacaattcctacgatacttacgccaacagcactgccacacccgtggggccgcgaggcggcgggagccacacgaaaactttaatcgagcgaagtggacggtag

SEQ ID NO: 342504 - DNA, 1083 bp, Artificial Sequence
  derived and/or modified sequence
atgtccttcaggaaggccctggagcagaagctgtatggcctgcaggccgacatcaccatcagcctggatggagtgcccttcctgatgcatgacaccaccctgcggaggaccaccaacgtggaggaggagttccctgagctggcccggcggcctgcctccatgctgaactggaccaccctgcagaggctgaatgccggccagtggttcctgaagacagaccccttctggacagccagcagcctgagccccagcgaccaccgggaggcccagaaccagagcatctgcagcctggccgagctgctggagctggccaagggaaatgccaccctgctgctgaacctgcgggaccccccccgggagcacccctaccgcagcagcttcatcaacgtgaccctggaggccgtgctgcacagcggcttcccccagcaccaggtgatgtggctgcccagccggcagaggcccctggtgaggaaggtggcccctggcttccagcagaccagcggcagcaaggaggccgtggccagcctgcggcggggccacatccagaggctgaacctgcgctacacccaggtgtcccggcaggagctgcgggactatgcctcctggaacctgtctgtgaacctgtacacagtgaatgccccctggctgttcagcctgctgtggtgtgccggcgtgcccagcgtgaccagtgacaacagccacgccctgagccaggtgcccagccccctgtggatcatgcccccagatgagtactgcctgatgtgggtgacagctgacctggtgtccttcaccctcatcgtgggcatctttgtgctgcagaagtggaggctgggcggcatccgcagctacaaccctgagcagatcatgctgtctgctgctgtgcggaggaccagcagagatgtgtccatcatgaaggagaagctgatcttcagcgagatcagtgatggagtggaggtgtctgatgtgctgtctgtgtgcagcgacaacagctatgacacctacgccaacagcacagccacccctgtgggcccccggggcggcggcagccacaccaagaccctgattgaaagaagtggccgctag

SEQ ID NO: 342505 - DNA, 1083 bp, Artificial Sequence
  derived and/or modified sequence
atgagcttccggaaggccctggagcagaagctgtacggcctgcaggctgacatcacgatcagcctcgacggagtgccattcctaatgcacgacactacactccgtcgaaccaccaatgtggaggaggaattccctgagttggcgaggagacccgcctcaatgctcaattggaccaccctgcagagattaaacgctggtcaatggttcctcaaaaccgacccattttggaccgcctcctctctgtctccaagcgatcaccgagaagctcaaaatcagagtatttgcagtctggccgaactactggagctcgccaaaggcaacgccactctgctcctgaatctccgcgatcccccacgggaacatccttaccggagttcgttcattaacgtgaccctggaggccgtgctgcactctggtttccctcagcaccaggttatgtggctgccctcacgccagagacctctggttagaaaagtcgccccaggtttccagcagacatctgggtcaaaggaagcggtagcctctctgagacgagggcatattcaacggctcaatttgagatatacgcaggtgagcagacaggagctccgggactacgccagttggaatctgtctgttaacctttatacagtgaatgccccatggctcttctccctgctgtggtgtgccggggtgccaagcgtcacaagcgacaattctcatgcactctcgcaagttccctctcctctatggatcatgcctcctgacgaatattgccttatgtgggtaacggcagacctggtcagctttaccctcatagtgggtatattcgtgcttcaaaaatggcgactaggggggatcagaagctacaatccagagcagataatgctgagtgctgcggttaggcggacctcacgggatgtgagtataatgaaggaaaagctcatatttagcgaaatttctgatggcgtcgaagtgtcggacgttctgtcagtgtgctcagacaattcgtacgatacctatgccaattctaccgcaactcccgtgggacctcgaggaggcggctcgcacacgaagaccctcattgagagatctggccgctag

SEQ ID NO: 342506 - DNA, 1083 bp, Artificial Sequence
  derived and/or modified sequence
atgagcttcaggaaggccctggaacagaagctctacgggttgcaggctgatatcaccatctctctagacggcgtcccgtttttaatgcacgatactacgcttcggagaactacaaacgttgaggaggagtttcccgagctggccaggagacccgcatcaatgttgaactggacgactttgcagcgtttaaacgccggtcaatggtttcttaaaacagatcccttttggaccgcgtcctccctctcccctagcgatcatcgcgaagcccagaaccaaagcatttgctcactagcggagctcctggagctcgccaagggcaatgccactctgctcttgaacttgagagaccccccacgtgagcatccctatcgatcatcattcataaatgtcaccctcgaggccgtactgcactcagggtttccgcaacaccaggtcatgtggctgcctagcagacagcggcctcttgttcgcaaagtggctcctggattccagcagacttcaggttcaaaagaagctgtggcctccctgagacgcggacatatacagcgcctgaatcttcgctacacacaagtgtctcgacaggagctgcgcgattacgcatcttggaacctgtctgtgaacctgtacaccgtcaacgccccttggctattttcgcttttgtggtgcgctggagtcccgagcgtaacttccgataattcacatgcgctgtcccaggtaccatctcctctttggattatgcccccagacgagtactgcctgatgtgggtcactgccgatttggtgtctttcactcttatcgtgggtatctttgttctccagaaatggcgcctgggagggatcagatcttacaatcccgagcaaattatgttgagtgcagctgtcaggagaactagtagagacgtctcaatcatgaaggagaaattgattttctccgaaatttcggatggagtcgaagtctccgacgtcttaagtgtctgctctgacaactcctatgacacgtacgccaatagcacggctacacctgtggggccacgcggtgggggtagccataccaagaccctcatcgaaaggagcggacggtag

SEQ ID NO: 342507 - DNA, 1083 bp, Artificial Sequence
  derived and/or modified sequence
atgagcttcagaaaggccctggagcagaagctgtacggcctgcaggccgacatcaccatcagcctggacggcgtgcccttcctgatgcacgacaccaccctgagaagaaccaccaacgtggaggaggagttccccgagctggccagaagacccgccagcatgctgaactggaccaccctgcagagactgaacgccggccagtggttcctgaagaccgaccccttctggaccgccagcagcctgagccccagcgaccacagagaggcccagaaccagagcatctgcagcctggccgagctgctggagctggccaagggcaacgccaccctgctgctgaacctgagagacccccccagagagcacccctacagaagcagcttcatcaacgtgaccctggaggccgtgctgcacagcggcttcccccagcaccaggtgatgtggctgcccagcagacagagacccctggtgagaaaggtggcccccggcttccagcagaccagcggcagcaaggaggccgtggccagcctgagaagaggccacatccagagactgaacctgagatacacccaggtgagcagacaggagctgagagactacgccagctggaacctgagcgtgaacctgtacaccgtgaacgccccctggctgttcagcctgctgtggtgcgccggcgtgcccagcgtgaccagcgacaacagccacgccctgagccaggtgcccagccccctgtggatcatgccccccgacgagtactgcctgatgtgggtgaccgccgacctggtgagcttcaccctgatcgtgggcatcttcgtgctgcagaagtggagactgggcggcatcagaagctacaaccccgagcagatcatgctgagcgccgccgtgagaagaaccagcagagacgtgagcatcatgaaggagaagctgatcttcagcgagatcagcgacggcgtggaggtgagcgacgtgctgagcgtgtgcagcgacaacagctacgacacctacgccaacagcaccgccacccccgtgggccccagaggcggcggcagccacaccaagaccctgatcgagagaagcggcagatag

SEQ ID NO: 342508 - protein, 215 aa, Artificial Sequence
  derived and/or modified sequence
YGVCSVGLEWLAYLLVPYSLGASATSLLGLLGLWLPRPVPLVAGAGVHLLLTFILFFWAPVPRVLQHSWILYVAAALWVVGSSLNKTGLSTLLGILYEDKERQDFIFTIYHWWQAVAIFTVYLGSSLHMKAKLALLLVTLVAATVSYLRMEQKLRRGVAPRQPRIPRPQHKVRGYRYLEEDNSDESDAEGDLGDGEEAEAEAPPAGPRPGPEPAG

SEQ ID NO: 342509 - DNA, 648 bp, Artificial Sequence
  derived and/or modified sequence
tacggcgtgtgcagcgtgggcctggagtggctggcctacctgctggtgccctacagcctgggcgccagcgccaccagcctgctgggcctgctgggcctgtggctgcccagacccgtgcccctggtggccggcgccggcgtgcacctgctgctgaccttcatcctgttcttctgggcccccgtgcccagagtgctgcagcacagctggatcctgtacgtggccgccgccctgtgggtggtgggcagcagcctgaacaagaccggcctgagcaccctgctgggcatcctgtacgaggacaaggagagacaggacttcatcttcaccatctaccactggtggcaggccgtggccatcttcaccgtgtacctgggcagcagcctgcacatgaaggccaagctggccctgctgctggtgaccctggtggccgccaccgtgagctacctgagaatggagcagaagctgagaagaggcgtggcccccagacagcccagaatccccagaccccagcacaaggtgagaggctacagatacctggaggaggacaacagcgacgagagcgacgccgagggcgacctgggcgacggcgaggaggccgaggccgaggccccccccgccggccccagacccggccccgagcccgccggctag

SEQ ID NO: 342510 - DNA, 648 bp, Artificial Sequence
  derived and/or modified sequence
tacggcgtgtgcagcgttggactggaatggctggcttacttactggtgccatacagcctcggggcatccgctaccagcctactggggctgctgggactgtggttgccccgccccgtgcctttagtggccggggctggagtgcaccttctgttaacgtttatactgttcttctgggcaccagtgccccgggtgctccagcacagttggattttgtatgtggccgcggctctttgggtggtgggctcgagcctgaataagactgggctgagcacccttctggggatcctctatgaggataaagagcgccaggatttcatcttcaccatttatcactggtggcaagcagtcgccatatttactgtctatctcggaagctctttgcatatgaaggctaaactcgccctgctactcgttactcttgtagctgctacggtatcctatctgagaatggaacagaagctacgcagaggcgtggcccccaggcagccccgtatcccccgccctcagcacaaggtgagaggatatcgctatctggaggaggacaactcagacgaaagtgatgcagaaggagaccttggtgatggagaagaggcagaggccgaggccccccccgccgggccaagacccggccctgaaccagctggctag

SEQ ID NO: 342511 - DNA, 438 bp, Artificial Sequence
  derived and/or modified sequence
atgggcccctggccccgggactggctgggcaagggctggaggctgggcagctgtgaggcccgggccggggccaaggaggtgtctgtcatccgccacggggcccccaacccagcccagagccacctgcacgtgcaggcccgggcccaggtgcacagtgaagatggccacagcctgccccctgtggtggatggagaagatgaggtgctgagcctgctggtgtttgtgcaggacagccaggagtgctgccggcaggccgtgcagggccggcagggccggggcgtgacctggggcctgggcctgcccagctaccacctgcggaccctgctgagccctgtgtgtgtgcctgcccgggaccagagggcccccaggaagtgctgtgaggccgtgctggcctgccccctggtggagaccctggtgaccaccctgctgaccaggtag

SEQ ID NO: 342512 - DNA, 648 bp, Artificial Sequence
  derived and/or modified sequence
tatggagtgtgcagcgtgggcctggagtggctggcctacctgctggtgccctacagcctgggcgccagcgccaccagcctgctgggcctgctgggcctgtggctgcccaggcctgtgcccctggtggccggggccggcgtgcacctgctgctgaccttcatcctcttcttctgggcccctgtgccccgggtgctgcagcacagctggatcctgtatgtggccgccgccctgtgggtggtgggcagcagcctgaacaagacaggcctgagcaccctgctgggcatcctgtatgaggacaaggagcggcaggacttcatcttcaccatctaccactggtggcaggccgtggccatcttcaccgtgtacctgggcagcagcctgcacatgaaggccaagctggccctgctgctggtgaccctggtggccgccaccgtgtcctacctgaggatggagcagaagctgcggcggggcgtggccccccggcagccccgcatcccccggccccagcacaaggtgcggggctaccgctacctggaggaggacaacagtgatgaaagtgatgctgagggggacctgggagatggagaggaggccgaggccgaggcccctcctgctggccccaggcctggccctgagcccgccggctag

SEQ ID NO: 342513 - DNA, 438 bp, Artificial Sequence
  derived and/or modified sequence
atgggcccctggccccgggactggctgggcaagggctggcggctgggttcttgcgaagccagagccggagcaaaagaggtcagtgtcatccgacatggagcccccaacccagcacagtcccacctgcatgtacaggcccgcgcacaggtccactccgaggacggccattctctcccaccagtggtagatggagaagatgaagtgctcagcctgctggtgttcgtgcaggattcccaggaatgttgtagacaggctgtgcaggggcggcaggggcgaggcgtgacatgggggctgggactgccttcctaccacctaaggacgctcctgtctcctgtgtgtgtgccagctagggatcagagggccccgcgcaaatgttgcgaagccgtgctggcgtgtccacttgtggagacacttgttactaccctgttgacaagatag

SEQ ID NO: 342514 - DNA, 648 bp, Artificial Sequence
  derived and/or modified sequence
tacggcgtgtgcagcgtgggcctggagtggctggcctacctgctggttccctactcactcggggcctctgcaaccagtctgctaggtcttctgggtttatggctgcccaggcccgtaccattagttgctggcgccggtgtgcacctcctgttaaccttcatcctttttttttgggcccccgtccctcgggttcttcagcacagttggatcctgtatgtggcagcggctctgtgggtcgtggggagttctctgaacaagacgggcctaagcactctcctgggcatcctgtacgaagacaaagagcgacaggactttattttcactatctaccattggtggcaggcggtcgcaatttttaccgtgtacctcgggtccagcctgcatatgaaggctaagctcgcactgcttctcgtgacactcgtggccgccaccgtatcttacctgcggatggaacagaaattgagaagaggtgttgcgcctcggcagcccaggattccgagaccccagcacaaggtccgggggtaccgctacctggaggaagacaatagtgacgaatccgacgccgaaggcgatttgggtgacggggaagaggcggaagctgaagctcctccagctggtccgcgtccaggtcccgagccggccgggtag

SEQ ID NO: 342515 - DNA, 438 bp, Artificial Sequence
  derived and/or modified sequence
atgggcccatggccaagagattggctgggcaagggctggagattaggctcctgcgaggcaagggccggtgccaaggaggttagcgttatccgccatggcgctcccaatccagcacagtcacacctgcacgtgcaagccagggctcaggtgcactccgaagatggccattcgctccctccagtggtggacggcgaagacgaggtgttgtctctcttggtgttcgtgcaagacagtcaagagtgttgcaggcaggctgtccagggacgccaaggcagaggagtcacttgggggctgggcctgccgagctaccacttgcggactctgctctctccagtctgtgtgccggctcgggaccaaagagcacctaggaagtgttgcgaagcggtcctcgcctgcccactggttgaaactctcgttacaaccttgcttactcggtag

SEQ ID NO: 342516 - DNA, 648 bp, Artificial Sequence
  derived and/or modified sequence
tatggagtttgtagcgtcgggctggaatggctggcttacctcctggtcccatattcgctaggggctagcgccacctctttgttaggcctgctgggactgtggctgccaagaccagtaccgcttgtggccggagctggagtgcacctgttgcttacttttatactgttcttttgggcgcctgtgcccagggtgcttcagcacagctggatcctgtatgttgccgctgccctgtgggtggtgggttccagccttaataaaaccggtctttccaccctcttaggtatcctgtacgaggacaaagagcggcaagactttatcttcactatttatcattggtggcaagcggtggccatcttcacggtgtatttgggatcttctctccatatgaaagcgaaacttgcgctgctcctcgtcaccctggtggccgctactgtctcttaccttcgtatggagcaaaagttaagaaggggagttgctcctcgccagcctcgcattccaagaccgcagcataaggtgcggggttaccgttacttggaggaggataacagtgatgagtcagatgccgagggcgatctgggcgacggtgaggaggctgaagctgaagctcctccagccggtcctcgtcccggacccgagcctgctggatag

SEQ ID NO: 342517 - DNA, 645 bp, Artificial Sequence
  derived and/or modified sequence
tatggtgtgtgctcggtggggctggagtggctggcttacctcctcgtgccttacagcctgggcgcctcagccacctcactcctgggcctgctgggcctgtggctgccacgccctgtgcccctggtggctggagcaggggtgcacctgctgctcaccttcatcctctttttctgggcccctgtgcctcgggtcctgcaacacagctggatcctctatgtggcagccgccctttgggttgtgggcagctccctgaacaagactggactcagcacactcctgggaatcttgtatgaagacaaggagagacaggacttcatcttcaccatctaccactggtggcaggctgtggccatcttcaccgtgtacctgggctcgagcctgcacatgaaggctaagctggcgttgctgctggtgacgctggtggcggccacggtctcctacctgcggatggagcagaagctgcggcggggcgtggccccgcggcagccccgcatcccgcggccccagcacaaggtgcgcggttaccgctacttggaggaggacaactcggacgagagcgacgcggagggcgatcttggggacggcgaggaggcggaggcggaggctccgcccgcagggcccaggcctggccccgagcccgctgga

SEQ ID NO: 342518 - protein, 660 aa, Artificial Sequence
  derived and/or modified sequence
MRMPSSTWARIMSSCGCDACRVGPSSVMRPSPRYPRAWVTRTWVPIPPRPMASSGSVPRDCWLLAAIASLTLNDTLLHRVVPHGQSFQNGYAGIFHFQLWQFGEWVDVVVDDLLPIKDGKLVFVHSAEGNEFWSALLEKAYAKVNGSYEALSGGSTSEGFEDFTGGVTEWYELRKAPSDLYQIILKALERGSLLGCSIDISSVLDMEAITFKKLVKGHAYSVTGAKQVNYRGQVVSLIRMRNPWGEVEWTGAWSDSSSEWNNVDPYERDQLRVKMEDGEFWMSFRDFMREFTRLEICNLTPDALKSRTIRKWNTTLYEGTWRRGSTAGGCRNYPATFWVNPQFKIRLDETDDPDDYGDRESGCSFVLALMQKHRRRERRFGRDMETIGFAVYEVPPELVGQPAVHLKRDFFLANASRARSEQFINLREVSTRFRLPPGEYVVVPSTFEPNKEGDFVLRFFSEKSAGTVELDDQIQANLPDEQVLSEEEIDENFKALFRQLAGEDMEISVKELRTILNRIISKHKDLRTKGFSLESCRSMVNLMDRDGNGKLGLVEFNILWNRIRNYLSIFRKFDLDKSGSMSAYEMRMAIESAGFKLNKKLYELIITRYSEPDLAVDFDNFVCCLVRLETMFRFFKTLDTDLDGVVTFDLFKWLQLTMFA

SEQ ID NO: 342519 - protein, 714 aa, Artificial Sequence
  derived and/or modified sequence
MSEEIITPVYCTGVSAQVQKQRARELGLGRHENAIKYLGQDYEQLRVRCLQSGTLFRDEAFPPVPQSLGYKDLGPNSSKTYGIKWKRPTELLSNPQFIVDGATRTDICQGALGDCWLLAAIASLTLNDTLLHRVVPHGQSFQNGYAGIFHFQLWQFGEWVDVVVDDLLPIKDGKLVFVHSAEGNEFWSALLEKAYAKVNGSYEALSGGSTSEGFEDFTGGVTEWYELRKAPSDLYQIILKALERGSLLGCSIDISSVLDMEAITFKKLVKGHAYSVTGAKQVNYRGQVVSLIRMRNPWGEVEWTGAWSDSSSEWNNVDPYERDQLRVKMEDGEFWMSFRDFMREFTRLEICNLTPDALKSRTIRKWNTTLYEGTWRRGSTAGGCRNYPATFWVNPQFKIRLDETDDPDDYGDRESGCSFVLALMQKHRRRERRFGRDMETIGFAVYEVPPELVGQPAVHLKRDFFLANASRARSEQFINLREVSTRFRLPPGEYVVVPSTFEPNKEGDFVLRFFSEKSAGTVELDDQIQANLPDEQVLSEEEIDENFKALFRQLAGEDMEISVKELRTILNRIISKHKDLRTKGFSLESCRSMVNLMDRDGNGKLGLVEFNILWNRIRNYLSIFRKFDLDKSGSMSAYEMRMAIESAGFKLNKKLYELIITRYSEPDLAVDFDNFVCCLVRLETMFRFFKTLDTDLDGVVTFDLFKWLQLTMFA

SEQ ID NO: 342520 - protein, 162 aa, Artificial Sequence
  derived and/or modified sequence
MSEEIITPVYCTGVSAQVQKQRARELGLGRHENAIKYLGQDYEQLRVRCLQSGTLFRDEAFPPVPQSLGYKDLGPNSSKTYGIKWKRPTELLSNPQFIVDGATRTDICQGALGDCWLLAAIASLTLNDTLLHRVVPHGQSFQNGYAGIFHFQLWQFGEWVDV

SEQ ID NO: 342521 - protein, 152 aa, Artificial Sequence
  derived and/or modified sequence
MSEEIITPVYCTGVSAQVQKQRARELGLGRHENAIKYLGQDYEQLRVRCLQSGTLFRDEAFPPVPQSLGYKDLGPNSSKTYGIKWKRPTELLSNPQFIVDGATRTDICQGALGDCWLLAAIASLTLNDTLLHRVVPHGQSFQNGYAGIFHFQ

SEQ ID NO: 342522 - protein, 163 aa, Artificial Sequence
  derived and/or modified sequence
MSEEIITPVYCTGVSAQVQKQRARELGLGRHENAIKYLGQDYEQLRVRCLQSGTLFRDEAFPPVPQSLGYKDLGPNSSKTYGIKWKRPTELLSNPQFIVDGATRTDICQGALGDCWLLAAIASLTLNDTLLHRVVPHGQSFQNGYAGIFHFQLWQFGEWVDVV

SEQ ID NO: 342523 - protein, 191 aa, Artificial Sequence
  derived and/or modified sequence
MSEEIITPVYCTGVSAQVQKQRARELGLGRHENAIKYLGQDYEQLRVRCLQSGTLFRDEAFPPVPQSLGYKDLGPNSSKTYGIKWKRPTELLSNPQFIVDGATRTDICQGALGDCWLLAAIASLTLNDTLLHRVVPHGQSFQNGYAGIFHFQLWQFGEWVDVVVDDLLPIKDGKLVFVHSAEGNEFWSALL

SEQ ID NO: 342524 - protein, 170 aa, Artificial Sequence
  derived and/or modified sequence
MSEEIITPVYCTGVSAQVQKQRARELGLGRHENAIKYLGQDYEQLRVRCLQSGTLFRDEAFPPVPQSLGYKDLGPNSSKTYGIKWKRPTELLSNPQFIVDGATRTDICQGALGDCWLLAAIASLTLNDTLLHRVVPHGQSFQNGYAGIFHFQLWQFGEWVDVVVDDLLPI

SEQ ID NO: 342525 - protein, 122 aa, Artificial Sequence
  derived and/or modified sequence
MSEEIITPVYCTGVSAQVQKQRARELGLGRHENAIKYLGQDYEQLRVRCLQSGTLFRDEAFPPVPQSLGYKDLGPNSSKTYGIKWKRPTELLSNPQFIVDGATRTDICQGALGDCWLLAAIA

SEQ ID NO: 342526 - protein, 63 aa, Artificial Sequence
  derived and/or modified sequence
MSEEIITPVYCTGVSAQVQKQRARELGLGRHENAIKYLGQDYEQLRVRCLQSGTLFRDEAFPP

SEQ ID NO: 342527 - protein, 148 aa, Artificial Sequence
  derived and/or modified sequence
MSEEIITPVYCTGVSAQVQKQRARELGLGRHENAIKYLGQDYEQLRVRCLQSGTLFRDEAFPPVPQSLGYKDLGPNSSKTYGIKWKRPTELLSNPQFIVDGATRTDICQGALGDCWLLAAIASLTLNDTLLHRVVPHGQSFQNGYAGI

SEQ ID NO: 342528 - protein, 136 aa, Artificial Sequence
  derived and/or modified sequence
MSEEIITPVYCTGVSAQVQKQRARELGLGRHENAIKYLGQDYEQLRVRCLQSGTLFRDEAFPPVPQSLGYKDLGPNSSKTYGIKWKRPTELLSNPQFIVDGATRTDICQGALGDCWLLAAIASLTLNDTLLHRVVP

SEQ ID NO: 342529 - DNA, 1983 bp, Artificial Sequence
  derived and/or modified sequence
atgagaatgccatcctccacctgggctcgcatcatgtcatcgtgcgggtgtgatgcatgtagggtcggtcctagcagcgtaatgagaccaagtcctcggtatcctcgcgcctgggtaacacgaacttgggtgccgattcctcctcgtccaatggcatcgagcggctcagtaccaagagactgttggctgctagcagccatcgcaagtttaacactgaatgacaccctgctgcaccgagtagtgccccatggccagagctttcagaacggctacgcaggcatctttcacttccagctctggcagttcggggaatgggtagatgtcgtcgtagatgacctcttgcctatcaaggatgggaagctggtttttgtacattccgccgagggaaatgagttttggagcgcccttctcgaaaaagcgtatgccaaggtcaatggatcttacgaggccttgagcggtggctccactagtgagggcttcgaagacttcacagggggagttacagaatggtatgagttgagaaaggccccttcagacttataccaaatcattctgaaagccctggagcgaggcagtctgctcggttgcagcatcgacattagctcggttcttgacatggaggccattacctttaagaagctggttaaaggccatgcttactctgtaaccggcgctaagcaagtaaactacaggggccaggtcgtcagtctgatccggatgagaaatccatggggagaagtggagtggacaggcgcctggtctgattcgtcctcagagtggaacaacgtggatccctatgagcgggaccagctgagggttaagatggaggacggcgaattttggatgagcttccgcgacttcatgagggagtttacccggttggaaatatgtaacctgacacctgacgccctaaaatccagaacgattcggaaatggaacacaaccctgtacgaagggacatggcgccgtggctcaacggctggcggttgtcgcaactacccagcaactttctgggttaatcctcagtttaaaattcgcctggacgagacggacgatcccgatgactatggggacagagagtcaggttgctcttttgtgcttgccctgatgcaaaagcaccgccgtagagagcgacggtttggaagggatatggagacaattggttttgccgtttacgaagttccaccagagctggtgggccagccagcggtgcatttaaaacgcgattttttcttggccaatgctagcagagctcggtccgagcagttcataaacctgcgcgaggtgagcactcggtttaggctcccaccaggagaatacgtggtggtgccatctacgttcgagcctaacaaggaaggagatttcgtgctccgattcttcagcgagaaaagcgctggaactgtcgagctggacgatcagattcaggctaacctcccagacgaacaagtccttagtgaggaggagatcgacgagaatttcaaggccttgttcagacagctcgcgggagaggacatggagatctcggtgaaagagctaaggactatcctgaatcgcattatttctaagcacaaggatcttcgcactaaggggttctcgttggagtcttgtcgtagtatggtgaacctgatggacagagacggaaatggaaaactggggttggtcgagtttaacatactctggaatcggatccgcaactacctctcaatcttccggaagttcgatcttgacaagagtggttccatgagtgcttacgaaatgcgaatggctattgagtctgccggctttaaattgaacaaaaagctttacgagctgatcataactaggtattcagaacccgaccttgctgtcgattttgataatttcgtgtgctgtctcgttcggcttgaaaccatgtttaggtttttcaagactctggacacagacttagatggggtcgtcacctttgacctctttaagtggctgcagctcaccatgttcgcatag

SEQ ID NO: 342530 - DNA, 2145 bp, Artificial Sequence
  derived and/or modified sequence
atgtctgaggagattatcacgcctgtttactgcaccggtgtttcagcacaagtccagaaacagagggcgcgagaactagggctcggacgtcacgaaaacgccattaagtacctgggacaagactatgagcagctgagagtgagatgcctacagtcaggaaccctgtttcgtgatgaagctttccctcctgtgcctcagagcctgggctacaaagatctgggtcccaatagctccaagacatacgggatcaaatggaagcggcccacagagctcctctccaatccgcagttcatcgtggacggcgctaccagaaccgatatctgtcagggcgccttgggagactgctggttactcgccgctatagcctcccttactttgaacgatacattactacatcgtgtggtaccccatggtcagagttttcagaatgggtacgctggaattttccactttcaactgtggcagtttggcgagtgggtcgacgtggttgtcgatgacctgctcccaataaaggatggtaagcttgtctttgtgcattccgccgaggggaacgagttctggtctgccctcctggagaaagcatatgctaaggtgaacgggagctacgaagccttatccggaggtagtacctctgaaggattcgaggactttactggcggtgtaacagaatggtacgagttgcgtaaggccccaagcgatctgtaccagattattcttaaagctctagagagaggatccttgttgggctgcagtattgatatatcttccgtgctcgacatggaggctatcacatttaaaaaactcgtgaaaggccatgcatattctgtgactggcgcgaagcaggtcaactatcgcggacaggtggtttcccttatccgtatgcgcaacccctggggggaggtagagtggactggagcttggtccgactcttcgtccgagtggaacaacgtggacccatacgagcgggatcagctccgagtaaaaatggaagacggagagttctggatgagcttcagagattttatgcgcgagttcacgcgtctggagatttgcaacctgacccctgatgcattgaagtctcgcaccatacgcaagtggaataccaccctctacgagggaacatggaggagggggtccaccgccggaggctgtagaaattaccccgctaccttctgggtcaacccccagttcaagatccggttggacgagaccgatgacccagatgattacggcgatcgagagtcgggatgttctttcgttttggcactcatgcagaaacataggcggagggaacggcgctttggacgcgacatggagaccatcggcttcgcggtttatgaggtcccgcccgagttagtgggccagcctgcggttcacctgaaacgtgatttcttcctggccaacgcatctagagctaggtctgagcagtttatcaacctccgtgaggtatcgacccgattccgcctgccaccgggggagtatgtcgtggtgccttctaccttcgagcctaataaggaaggggactttgtgttaagattcttttccgaaaaaagcgctgggaccgtggaactagacgatcagattcaggctaaccttcccgatgaacaagttttgagcgaagaagagatagatgagaatttcaaagcactcttccgacagcttgccggggaggacatggagatctctgtaaaagaattgcggaccattcttaatagaatcatcagtaagcacaaagatttgcggacaaaggggttcagtctcgagtcttgcaggtccatggtgaacctcatggatagagacgggaacgggaaactcgggctggtcgaattcaacatattatggaatagaattcggaattacctttctattttcaggaaattcgaccttgataaatccggatctatgagtgcttatgagatgagaatggccatcgagtcagcggggttcaagttaaacaaaaagttatacgaactgatcatcacaaggtactcagaacctgatctggccgttgatttcgacaattttgtgtgttgccttgtgagactggagactatgtttagattcttcaagactttagatacagacctagatggggtggtgacttttgatctcttcaaatggctacagctgaccatgtttgcctag

SEQ ID NO: 342531 - DNA, 2145 bp, Artificial Sequence
  derived and/or modified sequence
atgtccgaggaaatcatcacccccgtctactgtaccggcgtgtcagctcaggttcagaaacaaagagcaagggagctgggcttgggacggcatgagaacgctataaagtatctggggcaggattatgagcagctgcgcgtccgatgcctgcagtccggcaccctgttccgggatgaggcatttccccccgtgccccagagcctgggctataaagacctgggccccaactcttcaaagacatacggaataaaatggaaaagaccaaccgagttactaagcaacccccaattcatcgtggacggggccacacgcacagatatctgccagggcgccctgggagactgttggcttttggctgcaatcgcctcccttacgctgaatgataccttgctgcatcgggtggtcccccacgggcagtctttccaaaacgggtacgcgggaatctttcacttccaattatggcaattcggggagtgggtggatgtagttgttgatgatctgctgcccatcaaagacgggaaactcgtctttgtgcactcggcggaagggaatgagttctggtccgctcttcttgagaaggcgtacgcaaaggtcaatgggtcttatgaagccttaagtggcggctccacgagcgagggtttcgaagattttactggaggtgtcactgagtggtatgagcttcgcaaagcccctagtgatttgtaccagattatcttaaaagccctcgagaggggaagcctacttggctgtagcatagacatctcctccgtccttgacatggaagccattaccttcaaaaaactggtcaaaggacacgcgtattcagtcaccggagcaaaacaggttaattatagggggcaggtggtatctttaatacgaatgcgcaatccctggggtgaggtcgagtggacaggggcatggagcgattcttccagtgaatggaataacgttgacccttatgaacgggaccagttgcgggtcaaaatggaggacggcgaattctggatgagctttagggacttcatgagggagttcacaaggctggaaatttgcaatcttaccccggacgctctcaaaagcagaacaatccgtaaatggaacacaaccctgtatgagggaacttggaggagaggaagcaccgccggcggttgtaggaactacccagccacattctgggtcaacccacaattcaaaattcgcttagatgagacagacgacccggacgattacggagatagagagagcggctgctccttcgtacttgctctgatgcagaagcacaggcgtcgtgagcgtcggtttggcagagatatggagaccatcggttttgccgtgtatgaggtcccaccagagctagtggggcagccagccgtccatttgaaacgggatttctttcttgcaaacgcttctcgggcccgctcagagcaatttattaatttgcgcgaagtctcaacccggtttcgcctcccccctggggaatacgtggtggtgcctagtacgttcgagcccaataaggagggggattttgtacttaggttcttcagcgagaaatcagctggcacagtcgagctggatgaccaaatccaggctaacttgccagacgaacaagtgctgtccgaggaagaaattgacgagaactttaaagcgcttttccgccagctggcaggggaggacatggaaatttccgtgaaggagctgagaacaatactcaacaggatcataagtaagcataaagatcttcggaccaaagggttttcacttgagtcttgtagaagcatggtcaatctgatggatagggatggaaatgggaagctcggccttgtagaattcaatatcctgtggaatcgcatcagaaattacctgtcgatctttaggaagttcgaccttgataagtccggatccatgagtgcatatgaaatgaggatggccatcgagagcgctggtttcaaactgaacaagaagctgtacgagctgattatcactagatactctgaacctgatctcgctgtagatttcgacaactttgtgtgctgcctggttaggctggaaacaatgtttcggttcttcaaaacccttgatacggatcttgatggggtggttacgtttgacctcttcaaatggctgcagctaaccatgtttgcctag

SEQ ID NO: 342532 - DNA, 489 bp, Artificial Sequence
  derived and/or modified sequence
atgagtgaggagattatcacacccgtgtactgtaccggggtgagcgcccaagtacagaaacaaagagcacgcgagctagggctagggcgccatgaaaacgcaattaaatatcttgggcaggactacgaacagttgagagtaaggtgcctgcaatcaggtacactctttagggatgaagctttcccaccagttccccagtccctgggatacaaagacctgggaccgaactcctccaagacatacggcatcaagtggaaaaggcctactgagctgctgagcaatccccagttcatagtggacggcgcaacaagaaccgatatctgtcagggcgcacttggggactgctggctccttgccgccattgcttccctaactctgaatgatacccttctgcaccgcgtcgtcccgcacgggcaaagcttccagaacggttacgcagggatctttcacttccagctgtggcaatttggtgaatgggtggatgtatag

SEQ ID NO: 342533 - DNA, 2145 bp, Artificial Sequence
  derived and/or modified sequence
atgagcgaggaaatcattacaccagtatactgtacaggggtatcagcccaggtgcagaaacagcgagctagggagctagggctgggaagacatgaaaacgccataaagtatcttggccaggactatgaacaattgcgagtccggtgcttgcagagcggaaccctcttccgcgatgaagctttcccacccgttcctcaatccctgggctacaaagatctcgggcctaactcctctaagacgtatggaataaagtggaagcggcccaccgaactactgtccaacccccagtttatcgtcgacggcgccactagaaccgacatttgccaaggagctctgggcgactgttggttgcttgctgctattgcctcactgactctgaatgacaccctgctccacagagtagtgcctcatgggcaaagcttccagaatggctatgcgggaattttccatttccagctgtggcagttcggggagtgggtggatgtggttgtcgacgatctcctgccaattaaggacggcaagctggtgttcgtacactccgccgaaggaaatgaattctggagtgccctcctggaaaaggcatatgcgaaggtgaatggctcatacgaagctctgagcggcggctcaaccagtgagggctttgaggattttacgggcggggtgactgagtggtatgaactccgaaaggcccctagtgacctataccagataattttaaaggccctggaacgcggctctcttctgggatgttcgatagacatctctagcgtccttgatatggaggcgatcacatttaagaagcttgtgaaaggtcacgcgtatagtgtcactggtgctaagcaggtgaattatcggggccaggtcgttagtctcattagaatgcgcaatccttggggcgaggttgaatggactggagcttggtccgattcatcctccgaatggaataatgtcgacccgtacgaacgggatcaattaagagtaaagatggaggatggggagttctggatgagttttcgcgactttatgagagagttcacccgccttgagatttgtaatctgacaccagatgctcttaaaagcagaaccatcaggaaatggaatactacgctctacgaaggaacttggagaagaggaagcacagctgggggatgcagaaattatcctgcgaccttttgggtgaatccccagtttaagatccgtttagatgagacagacgaccccgacgattatggggatcgggaatcgggttgcagcttcgtgctggccttgatgcagaagcaccgaagacgagagagaagattcggcagggacatggaaacaatcgggtttgcagtgtacgaagtgccccctgagctggttgggcaacctgctgttcacctcaaacgcgatttctttctcgctaatgcctcccgggcgcgcagtgagcagtttattaatttaagagaggtttctactaggtttcgcctgccccccggggagtatgtcgtcgtaccaagcacgttcgaaccaaacaaagagggagacttcgtccttagattcttctcagaaaagagtgcaggaacggttgagctcgatgaccaaatccaggcgaaccttcccgatgagcaggttctcagcgaggaagagatcgatgagaactttaaggctttatttcgccagctagcgggggaggacatggagatatctgtgaaggaactgaggaccattcttaatcgaattatctcaaagcacaaggacctgagaaccaaaggcttttcgctcgaatcctgccgctccatggtgaacctcatggaccgggatggcaatggcaagttgggccttgtcgagttcaatattctgtggaaccggatacgaaactacttaagcatttttcgaaagttcgatcttgacaaaagcgggagtatgagtgcatatgaaatgaggatggccattgagagtgctggctttaagctgaacaagaaactatatgaattgattattactcgatactcagaacctgatctggcagtcgatttcgacaattttgtctgctgtctggtgcgcctcgagacgatgtttcgtttcttcaagaccttggataccgaccttgatggcgttgtgacctttgatctttttaagtggcttcagctaacaatgttcgcttag

SEQ ID NO: 342534 - DNA, 459 bp, Artificial Sequence
  derived and/or modified sequence
atgagcgaggaaattattacaccggtgtactgtactggtgtcagcgcacaagtgcagaagcagagagcccgcgaactggggctgggacggcatgagaacgcgattaagtacttggggcaggactatgagcagctccgcgtgagatgccttcaaagtggcactttgtttcgggatgaggcattcccacccgtgccccagtccttgggctacaaggatctgggccccaactcaagtaaaacatatggaatcaaatggaagaggcctaccgagcttctatcaaacccccagtttatagtcgatggtgcgaccaggactgacatttgccaaggcgccctgggcgattgttggctcctcgctgccatcgccagcctgactttaaatgacaccctgctccaccgcgtagttcctcatgggcagtcattccagaatggttatgccggtatcttccattttcagtag

SEQ ID NO: 342535 - DNA, 489 bp, Artificial Sequence
  derived and/or modified sequence
atgtccgaggaaattattaccccagtttattgcaccggcgtgagtgcccaggtgcagaaacagagagctcgggaattgggacttgggcggcacgaaaatgccataaagtatctcggacaggactacgaacaactaagagtgagatgtttgcagagtggcaccctttttcgagatgaagcattcccccctgttccccagagtctgggctacaaagatctcggacctaattccagcaagacatacggtatcaagtggaagaggcctactgagctgctctctaacccccaatttattgtggatggtgctacccgcaccgatatttgccagggcgccctcggcgactgctggctgcttgctgctatcgcctccctgactcttaatgataccctactgcaccgggtcgtcccacatggacagagttttcagaacggctacgcagggattttccattttcagctctggcagttcggggaatgggtggatgtgtag

SEQ ID NO: 342536 - DNA, 492 bp, Artificial Sequence
  derived and/or modified sequence
atgagcgaggagatcataacccctgtttactgcactggcgtctccgctcaagtgcagaagcagcgggctcgtgagctgggactgggccggcatgagaacgctattaaatatctcggacaggactacgaacaacttagagtccgttgcctccagtctgggacactctttagagatgaagcatttcctccagtccctcagtcattgggatacaaagatttagggcctaatagttctaagacgtatggaattaagtggaagagacctaccgagttgcttagcaacccacagttcatcgtagacggagcaactcgaacggacatctgtcagggcgccctaggcgactgctggttgctagccgctattgcaagcttaaccctgaacgacaccttgctgcacagagtggtgccccacggccaatccttccagaacgggtatgctggcattttccattttcaactctggcagttcggcgagtgggtcgacgtggtgtag

SEQ ID NO: 342537 - DNA, 576 bp, Artificial Sequence
  derived and/or modified sequence
atgtccgaagagattatcacccccgtgtattgtactggggtgagcgctcaggtccagaagcagcgcgctcgggaacttggccttggccgacacgagaatgcaataaagtatctgggacaggattacgagcaactacgagtgcggtgtctgcagtcaggcacactgttcagagatgaggccttccctccagttcctcagtcactgggttacaaagacctgggcccgaacagctcgaaaacttatggtatcaaatggaagcggcccactgaactgttatcaaatcctcagtttatcgtagatggcgcaacgagaaccgatatctgccagggagcattaggggactgctggctcctggccgccatagcatctttgaccctgaacgatactttgctacatcgggttgtcccccacggccagagtttccagaatggctatgccggcatattccatttccagctgtggcaattcggggagtgggtggatgtagtggtggacgacctgcttccgatcaaagatggcaagttggtttttgtacactcggcagagggcaacgaattctggtctgccctgctttag

SEQ ID NO: 342538 - DNA, 513 bp, Artificial Sequence
  derived and/or modified sequence
atgtcagaagagattataactccagtttactgcaccggggtctctgctcaggtgcagaagcagcgcgcgagagagctggggcttggcagacacgaaaatgccattaagtacctaggacaggactatgaacagcttcgggtccggtgtctccagtctggaacattattccgggatgaagccttcccacccgtcccccaatcccttggatataaggacctggggccaaactccagcaagacttatggcatcaaatggaagcggcctaccgagttgctctccaacccccaattcatagtggatggcgctaccaggacagatatttgccagggcgcactgggtgattgttggctgctggcagcgatcgcctcactgaccctaaacgatacattgctgcacagagtcgtacctcacggccagtcgttccaaaatggctatgccggcatatttcattttcaactgtggcagttcggcgaatgggttgatgtcgtcgttgacgatctgctgcccatctag

SEQ ID NO: 342539 - DNA, 369 bp, Artificial Sequence
  derived and/or modified sequence
atgtcggaagagattattacccccgtttactgtaccggcgtttccgcccaggttcagaagcagagagctcgggagctgggccttgggaggcacgaaaacgctattaagtatctgggacaggattacgagcaacttcgggtgagatgcctgcagagcggaacactcttccgtgacgaggctttccctcctgtcccccagtctttaggctacaaggacttgggccccaatagctcaaaaacctatggcattaagtggaaacgcccgacagaactgctgtcgaaccctcagtttatcgttgacggggctacaagaacggatatctgccagggagcgctcggtgactgttggctgcttgctgccatcgcttag

SEQ ID NO: 342540 - DNA, 192 bp, Artificial Sequence
  derived and/or modified sequence
atgagtgaagaaattattacacctgtctactgtactggcgtctctgcacaggtgcaaaagcagcgtgctagagagctggggctgggacgacatgagaacgctataaagtatctggggcaggactacgaacagctgcgtgtccgctgcctgcagtcaggcaccctgtttcgcgatgaagccttcccgccctag

SEQ ID NO: 342541 - DNA, 2145 bp, Artificial Sequence
  derived and/or modified sequence
atgagcgaggaaattatcactccagtgtactgtactggggttagtgctcaggtgcagaagcagagagcgagagagctgggactgggaagacacgagaacgcaattaagtatttgggtcaggactacgagcaactgagagtccggtgcctgcaatctggcacgctcttccgcgacgaagcttttccaccagtccctcagtccctgggctataaggacctgggaccaaattccagcaaaacgtacggaatcaagtggaagcggccgactgaactgctgagcaaccctcaattcatcgtagacggcgcgaccaggaccgatatctgccaaggagcgctgggcgattgctggctgctggccgctatagccagcctgaccttgaacgatacactcctgcatcgggtggtgccgcatggtcagtcattccaaaatggttatgccgggatctttcactttcaactgtggcagtttggcgaatgggtcgatgttgttgtagacgatttactgccaatcaaggatggtaaactggtgtttgttcacagcgctgagggaaatgaattctggtccgccttgctcgaaaaggcatacgctaaggttaacgggtcctacgaagccttgagtggggggtcaacttcagaaggcttcgaggattttacgggcggagtgactgagtggtatgaattacggaaagcccccagcgatctgtatcagatcattctgaaagccctcgaacggggaagcctccttggctgttcaattgacatcagctccgtgctggacatggaggccattaccttcaaaaaacttgtgaaggggcacgcttactccgttacaggtgccaaacaagtcaattacaggggacaggttgtaagcctgataagaatgcgtaatccatggggagaggttgaatggaccggcgcttggtcagactcctcgtctgaatggaacaacgtagacccatacgaacgggatcagttgcgcgtgaagatggaagatggggagttttggatgtcatttagggactttatgcgggagttcactagactggaaatctgcaacctgacacccgacgccctgaagagccgcaccataaggaagtggaataccacactctacgaagggacatggagacgcggctccacagccggcggctgcaggaactaccctgctaccttctgggttaatccacagttcaaaatcaggttagatgaaacagacgatccagatgactatggcgacagggagtcaggatgtagcttcgtgcttgccctgatgcagaaacataggaggagggagaggcggttcggtagggatatggagacaatcggctttgccgtctatgaggtaccgcctgagctggtcggccagcccgccgtgcacctgaagcgggatttttttttggccaatgcctcccgagcacgaagtgagcaatttatcaacttacgggaggtgtcaacaaggttcagactaccacctggagaatatgtcgttgtgccatcaacctttgaacctaacaaggagggggactttgtgttgaggtttttttctgaaaagtctgcaggtactgtcgagctggatgaccaaatccaggccaatctgcccgatgagcaagtcctgtctgaggaggaaatcgacgagaactttaaggccctctttagacagttagccggggaagatatggaaattagtgtgaaggagctgagaaccatacttaatagaattatctccaaacacaaagatctgcgcacgaaaggcttcagtctagagtcttgccgatccatggtgaatctgatggaccgagacggcaatggaaagctggggctggtggagttcaacatcctgtggaatcgtattcgcaattacctttctatctttcgcaagtttgatctggacaagtcggggtccatgagtgcctacgagatgcgcatggccattgagtcagccggtttcaagctgaacaaaaagctgtatgaattgataataacacggtatagtgaaccagatctagcagtcgatttcgacaactttgtctgttgtttagtccggcttgagaccatgtttaggttttttaaaactctggacaccgacttagacggcgtggttacattcgatctttttaagtggcttcagctgaccatgtttgcttag

SEQ ID NO: 342542 - DNA, 2145 bp, Artificial Sequence
  derived and/or modified sequence
atgtccgaggagattattactccagtctattgcaccggcgtatctgcccaggtacagaaacagcgggctcgcgagctagggctgggccgccacgagaacgcaataaaatatcttggccaggattatgagcagctgcgcgtgcgctgcctgcaatctggcacattgtttcgggatgaagcatttcccccggtgcctcaatcgctcggctacaaggacttaggacccaactcgagcaaaacttatggtatcaagtggaaacggcccacggagctgcttagcaacccacaatttatcgtcgatggggccacacgcaccgacatatgccaaggagcgttgggggattgctggcttttagcagcgatcgcatcacttacactgaacgataccctgctgcaccgagttgtaccacatgggcagtccttccagaacggctacgccggcatctttcattttcagttgtggcagttcggcgaatgggtagacgttgtggtggacgacctactgcccatcaaggacggtaaactggtgtttgtccatagtgctgaggggaacgagttctggagcgccttattagaaaaggcctacgcgaaggtgaacgggagctacgaagcccttagcgggggaagcacgagcgaaggatttgaagactttacagggggggtgacagagtggtacgagcttcggaaggcaccaagcgatctctatcagataatcctcaaggcattagagagaggatctttgctcggttgcagtatcgatatttccagcgttctcgacatggaggctattacttttaagaagcttgtgaagggccacgcctactcggtcaccggagcaaagcaggtgaactatcgggggcaggtcgtcagtctgatcagaatgcgcaacccctggggcgaggtcgaatggaccggagcctggtctgattcatcttccgaatggaataacgtggatccctatgagcgggatcagctccgagtcaagatggaggatggcgaattctggatgagcttcagagacttcatgcgagaattcactcgactggagatatgtaacctgacgcccgatgccctgaaatcgcgaacgattagaaagtggaatactaccctctacgagggcacatggaggcgcgggtcaactgccggcgggtgtagaaactatccagccactttctgggttaatcctcagtttaagattcgcctggacgagacagacgacccagacgactacggcgaccgcgagtccggatgtagctttgtattagccttgatgcagaagcacagaagaagagagcgccggttcgggagggacatggagacgattggatttgctgtatacgaggtcccacctgagctggtcggccagcctgcggtccacctgaagcgagacttcttcttagctaacgcctccagagcacgatccgagcagtttatcaacctccgcgaagtgtccacccggtttcgccttccgccgggcgagtacgtggtagttccgagcaccttcgagccgaacaaagagggcgatttcgttttgagattttttagtgagaagagcgcgggaacagtggaactagatgatcagatccaggccaacctgccagacgaacaggtgcttagtgaagaggagatcgatgagaactttaaagcactgttcaggcagcttgctggcgaagatatggagatcagcgtgaaagagctgagaacaatcctcaacagaatcataagcaagcacaaagacctccgcactaaggggtttagcctcgaatcctgtaggtccatggtgaacttgatggaccgggatggtaatggcaaattagggctggtggagtttaatattctgtggaacagaataaggaattatctgagcatatttcgcaagttcgacctggacaaatccggctccatgtctgcatatgagatgcgtatggctattgaatctgcggggttcaagctaaataagaagctgtatgagctgattataacgcggtacagcgaacccgatttggctgtggatttcgacaactttgtgtgctgcttagttcgcttagagactatgttccgatttttcaaaacactcgacacagatctggacggagtggtcacatttgacctcttcaaatggcttcaactaactatgttcgcctag

SEQ ID NO: 342543 - DNA, 447 bp, Artificial Sequence
  derived and/or modified sequence
atgtccgaggaaatcattacaccagtttactgcacaggcgttagcgcacaggtgcagaagcagagggctcgggaactgggactcgggcggcacgagaacgccataaagtatctcggccaggattatgaacagctaagggtgcgctgcttgcagtcgggtacgctctttcgcgacgaagcctttccccctgtcccacaatctctgggttataaggacctggggccaaactcaagtaaaacctacggaatcaaatggaaaagacctaccgagctcctaagtaatccacaattcatcgtggatggtgctacgaggaccgatatttgccagggtgctttaggcgattgctggttgttagccgctatcgctagcctcacattgaacgatactctgctacatcgagtggtgccacacggacaatcttttcagaacggatatgccggaatatag

SEQ ID NO: 342544 - DNA, 411 bp, Artificial Sequence
  derived and/or modified sequence
atgtccgaggagattataacccccgtctattgcaccggcgtaagcgcacaggtgcaaaaacagcgggcacgtgagcttgggctgggccgccacgaaaacgctatcaaatatttgggccaagactacgagcagctcagagtccggtgccttcagagcggtaccctgttccgggatgaggcatttcctcccgtgccccagagcctgggatataaagacctcgggcctaactcctccaaaacgtacggcatcaaatggaaaaggcctacagagttgctgtctaacccacagttcatcgtcgacggagctactcgcactgacatttgccagggggccctcggcgactgctggctgttggccgccatagcgtcgctcaccttaaatgataccctcctgcaccgggtcgtcccatag

SEQ ID NO: 342545 - DNA, 1983 bp, Artificial Sequence
  derived and/or modified sequence
atgaggatgcccagcagcacctgggcccgcatcatgagcagctgtggctgtgatgcctgccgggtgggccccagctctgtgatgaggcccagcccccgctacccccgggcctgggtgaccaggacctgggtgcccatccccccccggcccatggccagcagcggctctgtgccccgggactgctggctgctggccgccatcgccagcctgaccctgaatgacaccctgctgcaccgggtggtgccccacggccagagcttccagaatggctacgccggcatcttccacttccagctgtggcagtttggagagtgggtggatgtggtggtggatgacctgctgcccatcaaggatggcaagctggtgtttgtgcacagcgctgagggcaatgagttctggagcgccctgctggagaaggcctatgccaaggtgaatggcagctatgaggccctgagcggcggcagcaccagcgagggctttgaggacttcaccggcggcgtgacagagtggtatgagctgaggaaggcccccagcgacctgtaccagatcatcctgaaggccctggagcggggcagcctgctgggctgcagcattgacatcagctctgtgctggacatggaggccatcaccttcaagaagctggtgaagggccacgcctacagcgtgactggagccaagcaggtgaactaccggggccaggtggtgtccctcatccgcatgaggaacccctggggcgaggtggagtggacaggagcctggagcgacagcagcagcgagtggaacaacgtggacccctatgaaagagaccagctgcgggtgaagatggaggatggagagttctggatgtccttccgggacttcatgagggagttcacccggctggagatctgcaacctgaccccagatgccctgaagagcaggaccatcaggaagtggaacaccaccctgtatgagggcacctggaggcggggcagcacagctgggggctgcaggaactacccagccaccttctgggtgaacccccagttcaagatccggctggatgaaacagatgatcctgatgattatggagaccgggagagcggctgcagctttgtgctggccctgatgcagaagcacagaagaagagagcggcgcttcggccgggacatggagaccatcggctttgctgtgtatgaggtgcccccagagctggtgggccagcctgctgtgcacctgaagagggacttcttcctggccaatgccagccgggcccggtctgagcagttcatcaacctgcgggaggtgtccacccgcttccggctgcccccaggagaatatgtggtggtgcccagcacctttgagcccaacaaggagggggactttgtgctgcgcttcttcagcgagaagtctgctggcaccgtggagctggatgaccagatccaggccaacctgcctgatgagcaggtgctgtctgaggaggagattgatgagaacttcaaggccctcttccggcagctggccggggaggacatggagatctctgtgaaggagctgcggaccatcctgaaccgcatcatcagcaagcacaaggacctgcggaccaagggcttcagcctggagagctgccgctccatggtgaacctgatggacagagatggaaatggcaagctgggcctggtggagttcaacatcctgtggaaccgcatccggaactacctgagcatcttcaggaagtttgacctggacaagagcggctccatgtctgcctatgagatgaggatggccatcgagagcgctggcttcaagctgaacaagaagctgtatgagctgatcatcacccgctacagcgagccagacctggccgtggactttgacaactttgtgtgctgcctggtgcggctggagaccatgttccgcttcttcaagaccctggacacagacctggatggagtggtgacctttgacctcttcaagtggctgcagctgaccatgtttgcctag

SEQ ID NO: 342546 - DNA, 2145 bp, Artificial Sequence
  derived and/or modified sequence
atgtctgaggagatcatcacccctgtgtactgcaccggggtgtctgcccaggtgcagaagcagagggcccgggagctgggcctgggcagacatgaaaatgccatcaagtacctgggccaggactatgagcagctgcgggtgcgctgcctgcagagcggcaccctcttcagagatgaggccttcccccctgtgccccagagcctgggctacaaggacctgggccccaacagcagcaagacctacggcatcaagtggaagaggcccacagagctgctgagcaacccccagttcatcgtggatggagccaccaggacagacatctgccagggcgccctgggggactgctggctgctggccgccatcgccagcctgaccctgaatgacaccctgctgcaccgggtggtgccccacggccagagcttccagaatggctacgccggcatcttccacttccagctgtggcagtttggagagtgggtggatgtggtggtggatgacctgctgcccatcaaggatggcaagctggtgtttgtgcacagcgctgagggcaatgagttctggagcgccctgctggagaaggcctatgccaaggtgaatggcagctatgaggccctgagcggcggcagcaccagcgagggctttgaggacttcaccggcggcgtgacagagtggtatgagctgaggaaggcccccagcgacctgtaccagatcatcctgaaggccctggagcggggcagcctgctgggctgcagcattgacatcagctctgtgctggacatggaggccatcaccttcaagaagctggtgaagggccacgcctacagcgtgactggagccaagcaggtgaactaccggggccaggtggtgtccctcatccgcatgaggaacccctggggcgaggtggagtggacaggagcctggagcgacagcagcagcgagtggaacaacgtggacccctatgaaagagaccagctgcgggtgaagatggaggatggagagttctggatgtccttccgggacttcatgagggagttcacccggctggagatctgcaacctgaccccagatgccctgaagagcaggaccatcaggaagtggaacaccaccctgtatgagggcacctggaggcggggcagcacagctgggggctgcaggaactacccagccaccttctgggtgaacccccagttcaagatccggctggatgaaacagatgatcctgatgattatggagaccgggagagcggctgcagctttgtgctggccctgatgcagaagcacagaagaagagagcggcgcttcggccgggacatggagaccatcggctttgctgtgtatgaggtgcccccagagctggtgggccagcctgctgtgcacctgaagagggacttcttcctggccaatgccagccgggcccggtctgagcagttcatcaacctgcgggaggtgtccacccgcttccggctgcccccaggagaatatgtggtggtgcccagcacctttgagcccaacaaggagggggactttgtgctgcgcttcttcagcgagaagtctgctggcaccgtggagctggatgaccagatccaggccaacctgcctgatgagcaggtgctgtctgaggaggagattgatgagaacttcaaggccctcttccggcagctggccggggaggacatggagatctctgtgaaggagctgcggaccatcctgaaccgcatcatcagcaagcacaaggacctgcggaccaagggcttcagcctggagagctgccgctccatggtgaacctgatggacagagatggaaatggcaagctgggcctggtggagttcaacatcctgtggaaccgcatccggaactacctgagcatcttcaggaagtttgacctggacaagagcggctccatgtctgcctatgagatgaggatggccatcgagagcgctggcttcaagctgaacaagaagctgtatgagctgatcatcacccgctacagcgagccagacctggccgtggactttgacaactttgtgtgctgcctggtgcggctggagaccatgttccgcttcttcaagaccctggacacagacctggatggagtggtgacctttgacctcttcaagtggctgcagctgaccatgtttgcctag

SEQ ID NO: 342547 - DNA, 489 bp, Artificial Sequence
  derived and/or modified sequence
atgtctgaggagatcatcacccctgtgtactgcaccggggtgtctgcccaggtgcagaagcagagggcccgggagctgggcctgggcagacatgaaaatgccatcaagtacctgggccaggactatgagcagctgcgggtgcgctgcctgcagagcggcaccctcttcagagatgaggccttcccccctgtgccccagagcctgggctacaaggacctgggccccaacagcagcaagacctacggcatcaagtggaagaggcccacagagctgctgagcaacccccagttcatcgtggatggagccaccaggacagacatctgccagggcgccctgggggactgctggctgctggccgccatcgccagcctgaccctgaatgacaccctgctgcaccgggtggtgccccacggccagagcttccagaatggctacgccggcatcttccacttccagctgtggcagtttggagagtgggtggatgtgtag

SEQ ID NO: 342548 - DNA, 459 bp, Artificial Sequence
  derived and/or modified sequence
atgtctgaggagatcatcacccctgtgtactgcaccggggtgtctgcccaggtgcagaagcagagggcccgggagctgggcctgggcagacatgaaaatgccatcaagtacctgggccaggactatgagcagctgcgggtgcgctgcctgcagagcggcaccctcttcagagatgaggccttcccccctgtgccccagagcctgggctacaaggacctgggccccaacagcagcaagacctacggcatcaagtggaagaggcccacagagctgctgagcaacccccagttcatcgtggatggagccaccaggacagacatctgccagggcgccctgggggactgctggctgctggccgccatcgccagcctgaccctgaatgacaccctgctgcaccgggtggtgccccacggccagagcttccagaatggctacgccggcatcttccacttccagtag

SEQ ID NO: 342549 - DNA, 492 bp, Artificial Sequence
  derived and/or modified sequence
atgtctgaggagatcatcacccctgtgtactgcaccggggtgtctgcccaggtgcagaagcagagggcccgggagctgggcctgggcagacatgaaaatgccatcaagtacctgggccaggactatgagcagctgcgggtgcgctgcctgcagagcggcaccctcttcagagatgaggccttcccccctgtgccccagagcctgggctacaaggacctgggccccaacagcagcaagacctacggcatcaagtggaagaggcccacagagctgctgagcaacccccagttcatcgtggatggagccaccaggacagacatctgccagggcgccctgggggactgctggctgctggccgccatcgccagcctgaccctgaatgacaccctgctgcaccgggtggtgccccacggccagagcttccagaatggctacgccggcatcttccacttccagctgtggcagtttggagagtgggtggatgtggtgtag

SEQ ID NO: 342550 - DNA, 576 bp, Artificial Sequence
  derived and/or modified sequence
atgtctgaggagatcatcacccctgtgtactgcaccggggtgtctgcccaggtgcagaagcagagggcccgggagctgggcctgggcagacatgaaaatgccatcaagtacctgggccaggactatgagcagctgcgggtgcgctgcctgcagagcggcaccctcttcagagatgaggccttcccccctgtgccccagagcctgggctacaaggacctgggccccaacagcagcaagacctacggcatcaagtggaagaggcccacagagctgctgagcaacccccagttcatcgtggatggagccaccaggacagacatctgccagggcgccctgggggactgctggctgctggccgccatcgccagcctgaccctgaatgacaccctgctgcaccgggtggtgccccacggccagagcttccagaatggctacgccggcatcttccacttccagctgtggcagtttggagagtgggtggatgtggtggtggatgacctgctgcccatcaaggatggcaagctggtgtttgtgcacagcgctgagggcaatgagttctggagcgccctgctgtag

SEQ ID NO: 342551 - DNA, 513 bp, Artificial Sequence
  derived and/or modified sequence
atgtctgaggagatcatcacccctgtgtactgcaccggggtgtctgcccaggtgcagaagcagagggcccgggagctgggcctgggcagacatgaaaatgccatcaagtacctgggccaggactatgagcagctgcgggtgcgctgcctgcagagcggcaccctcttcagagatgaggccttcccccctgtgccccagagcctgggctacaaggacctgggccccaacagcagcaagacctacggcatcaagtggaagaggcccacagagctgctgagcaacccccagttcatcgtggatggagccaccaggacagacatctgccagggcgccctgggggactgctggctgctggccgccatcgccagcctgaccctgaatgacaccctgctgcaccgggtggtgccccacggccagagcttccagaatggctacgccggcatcttccacttccagctgtggcagtttggagagtgggtggatgtggtggtggatgacctgctgcccatctag

SEQ ID NO: 342552 - DNA, 369 bp, Artificial Sequence
  derived and/or modified sequence
atgtctgaggagatcatcacccctgtgtactgcaccggggtgtctgcccaggtgcagaagcagagggcccgggagctgggcctgggcagacatgaaaatgccatcaagtacctgggccaggactatgagcagctgcgggtgcgctgcctgcagagcggcaccctcttcagagatgaggccttcccccctgtgccccagagcctgggctacaaggacctgggccccaacagcagcaagacctacggcatcaagtggaagaggcccacagagctgctgagcaacccccagttcatcgtggatggagccaccaggacagacatctgccagggcgccctgggggactgctggctgctggccgccatcgcctag

SEQ ID NO: 342553 - DNA, 192 bp, Artificial Sequence
  derived and/or modified sequence
atgtctgaggagatcatcacccctgtgtactgcaccggggtgtctgcccaggtgcagaagcagagggcccgggagctgggcctgggcagacatgaaaatgccatcaagtacctgggccaggactatgagcagctgcgggtgcgctgcctgcagagcggcaccctcttcagagatgaggccttccccccatag

SEQ ID NO: 342554 - DNA, 447 bp, Artificial Sequence
  derived and/or modified sequence
atgtctgaggagatcatcacccctgtgtactgcaccggggtgtctgcccaggtgcagaagcagagggcccgggagctgggcctgggcagacatgaaaatgccatcaagtacctgggccaggactatgagcagctgcgggtgcgctgcctgcagagcggcaccctcttcagagatgaggccttcccccctgtgccccagagcctgggctacaaggacctgggccccaacagcagcaagacctacggcatcaagtggaagaggcccacagagctgctgagcaacccccagttcatcgtggatggagccaccaggacagacatctgccagggcgccctgggggactgctggctgctggccgccatcgccagcctgaccctgaatgacaccctgctgcaccgggtggtgccccacggccagagcttccagaatggctacgccggcatctag

SEQ ID NO: 342555 - DNA, 411 bp, Artificial Sequence
  derived and/or modified sequence
atgtctgaggagatcatcacccctgtgtactgcaccggggtgtctgcccaggtgcagaagcagagggcccgggagctgggcctgggcagacatgaaaatgccatcaagtacctgggccaggactatgagcagctgcgggtgcgctgcctgcagagcggcaccctcttcagagatgaggccttcccccctgtgccccagagcctgggctacaaggacctgggccccaacagcagcaagacctacggcatcaagtggaagaggcccacagagctgctgagcaacccccagttcatcgtggatggagccaccaggacagacatctgccagggcgccctgggggactgctggctgctggccgccatcgccagcctgaccctgaatgacaccctgctgcaccgggtggtgccctag

SEQ ID NO: 342556 - DNA, 1983 bp, Artificial Sequence
  derived and/or modified sequence
atgcggatgcccagcagcacctgggcccggatcatgagcagctgcgggtgtgacgcatgtagagtaggaccaagctcagttatgcgacccagcccccggtacccaagagcctgggtgacacggacctgggttcccatcccccctcgaccgatggccagctccggcagtgtgccaagggactgctggcttctggccgctatcgcctccctgactctcaacgacaccctgctgcacagggttgtgcctcacggccagtctttccagaacgggtatgcaggcatttttcacttccagctgtggcagttcggggagtgggtggacgtagtcgttgacgacctccttccaattaaagacggcaagctggtattcgttcattcagctgagggtaacgagttctggtccgcccttcttgagaaggcgtatgcaaaagtcaacggttcctacgaagccctgagtgggggatctactagtgaaggattcgaggacttcaccggaggcgtcactgagtggtacgaactgcgaaaggccccttctgacctgtaccagattatccttaaggccctggagagagggtccctcctcggatgttccatagacattagtagtgtgttggacatggaggcaattacttttaaaaagctagtgaagggccacgcctactccgtcaccggagctaagcaggtaaactaccggggacaggtggtctccctcattcgaatgcgtaatccatggggcgaggtggaatggacaggcgcatggagcgatagttcgtcagagtggaacaacgtcgacccgtatgagcgtgaccagctccgcgtcaaaatggaagacggggaattctggatgtcattcagagacttcatgcgagagtttactaggctagagatatgtaacctgaccccagacgctcttaaaagtcgaaccatcaggaagtggaatacgaccctgtatgaaggcacttggcggcgcggctccaccgccggcggttgtaggaattaccctgccacattttgggtaaacccgcagttcaagattcgtcttgacgagaccgacgatcctgacgactacggcgatcgagaatctggttgttcttttgttttggccttgatgcagaagcatcgaagacgtgagcgcagattcggcagagacatggagacaatcggatttgcggtatacgaagtgccaccggaacttgtggggcagcccgccgtccacctgaaacgggacttcttcctcgctaatgccagtagggccagatccgaacaatttatcaatttacgtgaagtttctacaagattccgactaccaccgggcgagtatgttgtagttccaagcacattcgagcctaacaaggaaggcgattttgtgctcagattttttagcgagaaaagtgcgggaaccgttgagctcgacgatcaaattcaggccaatctgccagacgaacaggttctttccgaagaagagatcgatgagaacttcaaagctctgtttcgccaactggcaggcgaagatatggaaatctctgtcaaggaacttcgaacaattctgaacaggatcatatcaaaacacaaagacctccggacaaagggctttagcctggaaagctgcaggtccatggtgaacctgatggacagagacgggaacggtaagctcgggttggtagagttcaatatcttatggaatcgaatccggaactatctgtcaatcttccgcaagtttgacctggataagagcgggtctatgagcgcctacgaaatgcggatggctatcgagtccgcaggcttcaagctgaacaagaagctttacgagcttatcatcaccaggtacagcgaacccgacttggcagtggattttgataactttgtttgctgcctcgtgaggcttgagactatgtttcgttttttcaaaaccctcgatactgatttagacggggtggtcacttttgatttgtttaaatggctgcagctcaccatgtttgcctag

SEQ ID NO: 342557 - DNA, 2145 bp, Artificial Sequence
  derived and/or modified sequence
atgagcgaggagatcatcacccccgtgtactgcaccggcgtgagcgcacaagtacagaagcagcgagctagagaattaggtctcggccgccacgaaaacgccatcaaatatttgggccaagactacgagcagcttagggtgaggtgcttgcaatcaggaactctgttccgtgatgaggcctttcctccagtgccccagagccttggctacaaggatctgggacccaactccagcaaaacatacgggattaagtggaaaagaccgactgagttgctgagcaacccacagtttatagtcgatggagccactcggactgatatctgccaaggagccctcggcgactgttggttgctggcggcaatcgccagcttgacgctgaacgacacccttcttcatcgggtcgtgcctcacggtcagtcattccagaacggctacgctgggatatttcacttccagttatggcagttcggagaatgggtcgatgtggtcgtggacgacctcctccccatcaaggatggaaaacttgtgtttgtgcactcggcagagggtaatgagttttggtccgccttgctcgagaaagcctacgcaaaagtcaacggctcctatgaagccctaagtggcggctcaacatccgaaggatttgaagattttaccggcggtgtcaccgaatggtatgaactgcgaaaagccccgtctgacctttatcagataattctcaaggccctggagcggggctccctgctaggatgcagtattgacattagttccgtgcttgatatggaggctatcaccttcaaaaaactggtcaagggccacgcctactctgtgactggtgccaagcaggtgaactatcgcggacaggtcgtgagtttaattcgcatgcggaatccttggggtgaggttgaatggactggcgcctggagcgactcctcctccgagtggaataacgttgacccatatgagcgcgatcagcttcgggtgaagatggaagatggcgagttctggatgagcttcagagacttcatgcgagagttcacaagactagagatttgtaatctgacccccgacgccttaaagagtagaaccatccggaagtggaataccacgctttacgaagggacgtggcgacggggctcaaccgcaggtggctgccggaattatcctgctaccttctgggtgaatcctcaatttaagattaggctcgacgagaccgacgatcccgatgactatggtgaccgagaaagcggatgcagcttcgttctcgccctgatgcagaagcaccgtcgcagagagcggaggttcggccgagacatggagaccatcgggtttgcggtgtacgaggtgccaccagagctcgtgggccagcctgctgttcatctcaaacgggatttctttctggctaacgcttccagggccagatccgagcaattcataaacctgagagaggttagtacccggttccggctccctcccggtgagtacgtggtggtcccaagtaccttcgagcctaacaaggaaggagacttcgttctgcgcttcttctctgaaaaatcagcaggaacagtggagctcgatgaccagatccaggccaatctgcctgatgagcaagtattaagcgaagaagaaattgatgaaaactttaaggcccttttccgccagctggccggtgaagacatggagatctctgtaaaggaactgaggacgatactgaaccgcattatttccaaacacaaggatctgaggacaaaagggttcagcttggagagttgtaggtccatggtgaatctcatggaccgtgatgggaatggcaagttaggcctggtcgagtttaacatcttgtggaatcgtattagaaactacctgtctattttccgcaaattcgatttggataaatccggtagcatgagcgcctacgagatgagaatggcaatcgaatctgctggctttaagctaaataaaaagctttacgagctcataatcactcggtattccgagccagatctcgcagtcgattttgacaattttgtatgttgtcttgtgcggctcgaaaccatgttcaggtttttcaagaccctggatacagatctcgacggcgtggttacattcgatctgtttaagtggttgcaactcaccatgtttgcctag

SEQ ID NO: 342558 - DNA, 2145 bp, Artificial Sequence
  derived and/or modified sequence
atgagcgaggagatcatcacccccgtgtactgcaccggcgtgagcgcgcaagtgcagaaacagagagcgagggagctcgggttgggtcggcatgagaatgcaattaaatatctggggcaggattatgagcaattaagggtccgctgcctgcaaagcggaacactttttagggatgaggccttcccaccagtaccccagagcctcgggtataaagatctcggccccaactcttctaagacgtacggaatcaagtggaagagaccaactgagcttttgtctaacccccagtttattgtggacggagccactcgcacagatatctgccaaggggcattgggcgattgttggctgctggctgcgatcgctagcctgaccctcaacgataccctgctccacagggttgtgccccacggccagagcttccagaacggttatgctggcattttccattttcaattatggcagttcggggaatgggtcgacgtggttgtcgatgacctcttaccaattaaggatggcaagctcgtgttcgtgcacagcgccgagggaaacgagttctggagcgccctgctcgaaaaggcctacgctaaagtgaacggctcatacgaggcccttagtggcggatccacaagtgagggttttgaagatttcacgggcggggttaccgaatggtatgagctccgcaaggcaccttctgatctctatcagattatcctgaaagccctcgagcgaggttccctgctcgggtgctcaatcgacatcagttcagtgctcgacatggaggcgattacatttaagaagctggtaaaagggcatgcgtatagtgtgactggagccaaacaagttaattatagagggcaggtggtctctctgatcaggatgcggaacccatggggcgaggtggaatggactggcgcttggtcagactcgagcagtgaatggaacaatgttgacccatatgagcgtgatcagctgcgggtcaagatggaggacggcgagttctggatgagctttcgagacttcatgcgcgagttcactcgtctggagatctgcaacctgacaccagacgctttaaaatccagaactattcgcaagtggaacacaaccttgtatgaaggcacctggcggagaggtagcacagccggagggtgcaggaattatccagccactttttgggtaaacccacaatttaaaatccgcctggatgaaacagacgatccggatgattacggcgatcgcgagtctggttgcagctttgtgctggcccttatgcaaaaacatcgacgaagggagcgtcgtttcggccgggacatggaaactatcgggtttgccgtctatgaggtaccacctgaacttgtcggccaaccagcagtgcatttgaagcgcgatttctttttggccaacgccagcagagctaggtcagaacagtttattaatctgcgagaggtgtctacaaggtttcggctcccaccaggggaatacgtggtcgtgcctagtacttttgaacccaacaaagaaggcgatttcgtactgcggtttttctccgaaaaatcagccggcacggtggaacttgacgatcagattcaggctaacctgccagatgaacaagttttgagtgaggaagagatcgatgaaaactttaaagctctgttccgtcagcttgctggtgaagacatggaaatctcggttaaggagctgcgaacaattctcaaccggattatttcaaaacacaaagacttaaggaccaaaggattttcgctggaatcatgccgatccatggtgaatctgatggacagagacgggaacggcaagctgggactggtcgagtttaacatcctgtggaacagaattaggaattaccttagcatttttaggaaatttgatctggacaagagcgggtctatgtctgcatacgagatgcggatggcaattgaaagcgctggattcaaacttaataaaaagctgtatgaattgattataaccagatactccgaacccgatcttgcagtggattttgataactttgtatgttgtctcgtgcgcctcgagactatgtttcggtttttcaagacattagatacagacctcgatggggtagtgaccttcgatcttttcaagtggcttcagctcactatgttcgcttag

SEQ ID NO: 342559 - DNA, 489 bp, Artificial Sequence
  derived and/or modified sequence
atgagcgaggagatcatcacccccgtgtactgcaccggcgtgagcgcccaggtgcaaaagcaacgagccagagagctgggtttaggccgccacgagaacgcgatcaagtacctgggccaggactatgaacagcttcgagtgagatgcctgcagagcggaaccttgtttagggatgaagctttccctcctgtacctcagagcctggggtataaggacctgggcccgaattcttctaagacctacggaattaagtggaaacgccctaccgaactgctctcaaatccccagttcatcgtagatggagctacaaggacagatatttgtcaaggcgcccttggcgactgctggctcctggccgccatcgctagcctcaccctaaatgatacgctgctgcatagggtggtcccacatggacagtccttccagaacggctacgcgggaattttccactttcaactgtggcaattcggagagtgggttgatgtttag

SEQ ID NO: 342560 - DNA, 2145 bp, Artificial Sequence
  derived and/or modified sequence
atgagcgaggagatcatcacccccgtgtactgcaccggcgtgagcgcacaggttcaaaaacagagagctagggagctggggttgggccgccacgaaaacgccatcaagtacttaggacaggactacgaacaactgagggttaggtgccttcaatccggtacactctttcgtgatgaggcctttccaccggtgccccagtccctcggatacaaggatcttgggcccaattcatccaagacctatggcattaaatggaaacggccaactgagctgctgtctaacccccaattcatcgtagatggagctaccagaacagatatttgtcagggtgccctgggggattgttggcttctggcagctatagccagcctcacactgaatgatacgttgctgcaccgggtcgtgccgcacggtcaatccttccaaaacgggtacgcagggatttttcacttccagctctggcagtttggagagtgggtggatgtggttgtggatgacctgttgccaatcaaggacggcaagctggtgttcgttcacagcgcagaaggtaacgagttctggtccgccctgctcgaaaaagcttatgctaaggtgaatggctcatatgaagctctctcaggcggctccaccagcgagggtttcgaagatttcactggaggtgtgactgagtggtatgagctgcgaaaggcaccgtccgacctgtaccagatcattctaaaggccctagagagaggtagtctgctcggctgtagtattgatatcagctctgtcctcgacatggaggccatcacttttaagaaactggtcaagggtcacgcctattccgttaccggcgctaaacaagtgaactatcggggccaagtggtgtctctgattaggatgagaaacccatggggtgaagtcgaatggaccggagcatggtccgactcgagttccgaatggaacaatgttgatccatacgagcgcgaccagttaagagtaaagatggaagacggcgaattctggatgtccttcagggactttatgagagaatttactcggctggaaatttgcaatctcacaccagacgctttgaagagcaggacgattcgcaaatggaacacaacactatacgagggcacctggcgccgtggctccacagccggcggttgtcgcaactaccccgctactttctgggtcaacccacagttcaagattcgactcgatgaaaccgacgatcctgacgactacggggaccgtgaaagcggttgttcattcgtgctcgcgctgatgcaaaagcacagacgacgagagcgcagatttggaagggacatggagacaataggctttgcagtctatgaggttccaccggagctcgtggggcagcccgctgtacacctcaaaagggacttctttttggcaaatgcctcacgcgctcgcagtgaacaattcatcaacctgagggaagtttctacgcgctttcggttgccccccggggaatacgtggtggtgccaagcactttcgaacccaacaaggaaggtgactttgtgctgagatttttctccgagaagagcgctggaacagtggagctggacgatcaaattcaggcaaacctccccgacgagcaagtgctctcggaagaagagattgatgaaaacttcaaggctctatttagacagcttgcaggcgaagatatggaaataagcgtcaaggagttgaggacaattcttaaccggatcatttctaagcacaaggatctcaggacaaagggctttagcctcgagtcttgcaggagtatggtcaatctcatggacagggacggaaacggcaagttaggacttgtcgagttcaatattttgtggaataggatcaggaattacctttcaatattccgtaagttcgacttggataagtctggatctatgtcggcctacgagatgcgtatggccattgagtccgctgggttcaaactgaataagaaactgtacgagttaatcatcacccgctatagcgagccagatctggctgttgacttcgacaacttcgtgtgttgtctggtgcgactggaaactatgtttaggttcttcaaaaccctggataccgatttagatggcgtcgtgacatttgacttatttaaatggcttcagctcaccatgttcgcgtag

SEQ ID NO: 342561 - DNA, 459 bp, Artificial Sequence
  derived and/or modified sequence
atgagcgaggagatcatcacccccgtgtactgcaccggcgtgagcgcccaggttcagaagcaaagggcccgggagctgggcctcgggaggcatgaaaatgcaataaagtacctgggtcaggattacgagcagctgagggtgaggtgccttcagagtggaaccctttttagggacgaggcgttccctcctgtgccccagtcacttggttacaaagatctcggcccgaactcctcgaagacctacggtatcaagtggaagagacctacagagttacttagcaatccccaatttattgtagatggcgcaacccgcaccgatatctgccagggagctctgggagattgctggcttctggccgcgatcgcaagtctgactctcaatgacaccctccttcaccgtgtcgtgccccacggacagagctttcaaaacggctacgcggggatctttcactttcagtag

SEQ ID NO: 342562 - DNA, 489 bp, Artificial Sequence
  derived and/or modified sequence
atgagcgaggagatcatcacccccgtgtactgcaccggcgtgagcgcgcaggttcagaagcagcgagcccgcgaactcggtttgggccgtcatgagaacgctatcaaatatctgggacaagactatgagcaactccgtgtgcgctgcctccaaagtggcactctgtttcgcgatgaagctttccccccagtcccccaaagtctagggtataaagacctgggccccaattcaagtaaaacttatggcataaaatggaagcggcccacagagctgctgtcaaatcctcagtttatcgtggatggcgccacacgcactgatatctgccagggagccctgggagactgctggctgttggctgctatcgctagtctgacgcttaacgataccctgctgcaccgggtggtgcctcatggacagtctttccagaacggctacgctggtatatttcatttccagctgtggcagttcggggaatgggttgatgtgtag

SEQ ID NO: 342563 - DNA, 492 bp, Artificial Sequence
  derived and/or modified sequence
atgagcgaggagatcatcacccccgtgtactgcaccggcgtgagcgcacaggtgcagaagcagcgcgctcgcgagctcggactgggcaggcacgagaacgccatcaaatacctgggccaggattatgaacagctccgagttagatgcttacagtcaggcacgttattccgcgatgaggccttccctccagtcccccaatctctgggttacaaggacctcggcccaaactcttctaaaacctacgggatcaaatggaagcgccccaccgagctgttgtccaatcctcagtttatcgtggacggggccacccgtactgacatttgccagggggccctgggagactgctggctattggccgccatcgcaagtctgacactcaacgacactttgcttcaccgagtcgtgccgcatggccagagcttccagaatgggtacgcaggaatcttccatttccagctgtggcagttcggggagtgggtagatgtcgtctag

SEQ ID NO: 342564 - DNA, 576 bp, Artificial Sequence
  derived and/or modified sequence
atgagcgaggagatcatcacccccgtgtactgcaccggcgtgagcgcccaggtgcagaagcaacgggccagggagttgggcctcgggagacacgagaatgccattaaatacctgggccaggattacgagcaattaagagtccggtgcctgcagtctgggactctgtttcgcgatgaggcatttccccctgtgccacagtctctggggtacaaggacctggggccaaactcctccaagacgtacggcatcaaatggaagcgtcccacagagttgctgagtaatccgcagttcatagtagacggggccacccgtacggatatatgtcagggcgcactgggtgactgctggctgttggcagcaatcgcttccctgactcttaatgacacactgctgcatcgagtcgtaccccatgggcagtcttttcagaacggctatgccggcatcttccattttcaactgtggcagttcggagaatgggtggatgtcgtagtcgatgacctcctgccaattaaagacggcaagctcgtgtttgttcattccgctgagggaaacgaattctggtcagccctgctgtag

SEQ ID NO: 342565 - DNA, 513 bp, Artificial Sequence
  derived and/or modified sequence
atgagcgaggagatcatcacccccgtgtactgcaccggcgtgagcgcacaggtgcagaaacagagagcacgggagctgggccttggtcgtcatgagaacgccattaagtatctgggccaggattacgagcaactcagggtgcggtgtttgcagtccgggaccttattcagagacgaagcgtttccccccgtgccgcagtctttaggctacaaggacttaggaccaaactcgtcaaagacctacggaatcaagtggaagcggccaactgaattgcttagcaatccccaattcatagtcgatggtgccaccaggacagatatctgtcaaggagctctaggggattgttggctgctcgcagcgattgctagtctaactcttaacgacactctgctccacagagtagtgccccatggacagtcatttcagaacggttatgctggcatttttcattttcaattatggcagttcggcgagtgggtggacgttgtcgtggacgatttgctgccgatctag

SEQ ID NO: 342566 - DNA, 369 bp, Artificial Sequence
  derived and/or modified sequence
atgagcgaggagatcatcacccccgtgtactgcaccggcgtgagcgcacaggtgcaaaagcaaagagctagagaactgggtctcggacgccacgaaaatgccatcaagtacctaggccaggattacgagcaactcagggtaaggtgtctacaaagcggcaccctgttccgggatgaggcgttccctccggtcccacaaagcctcgggtataaagatcttggccccaactcctctaaaacctatgggataaagtggaaacgccctactgagttgctctctaatcctcagtttatcgtggacggtgccaccaggacagacatttgccaaggcgccctgggagactgttggttactcgccgcgattgcttag

SEQ ID NO: 342567 - DNA, 192 bp, Artificial Sequence
  derived and/or modified sequence
atgagcgaggagatcatcacccccgtgtactgcaccggcgtgagcgcccaggtgcagaaacaacgagcacgggaacttggactggggcgacacgaaaacgccataaagtatctgggacaggactacgaacagctcagggtcaggtgtctccagagcggaacgctctttagagatgaagcattccccccatag

SEQ ID NO: 342568 - DNA, 2145 bp, Artificial Sequence
  derived and/or modified sequence
atgagcgaggagatcatcacccccgtgtactgcaccggcgtgagcgcccaggtgcagaagcagagggctagggagttaggtctgggacggcacgagaacgcaatcaagtacctgggtcaggattacgaacagttgcgggtgcggtgcttgcagagcggtacactattcagggacgaggcattccccccagtccctcagtccctcggttataaggaccttgggcctaactcttcaaaaacttacggaatcaagtggaagcgaccaacagagttactgtctaacccacagtttattgttgacggagccactcgcactgatatctgccaaggagctcttggcgattgttggctgcttgccgcaatcgcgtctttgactctgaacgataccttgctgcacagggttgttccccatgggcagtctttccagaacggctatgcaggaatcttccacttccagctatggcaattcggcgagtgggtcgacgttgtggtggacgatctgctgcccataaaggacggaaaattagtctttgtgcattctgccgaaggtaacgaattctggtcagcgcttctcgagaaggcgtatgctaaggtaaacggcagttacgaggcacttagtggcggcagtaccagtgagggtttcgaggactttacaggtggcgtgacagagtggtacgaactgcgaaaggcaccctctgatctgtaccaaatcatcctgaaggccctcgaacggggtagcctgctgggttgtagcatcgacatctcttccgtgctggacatggaagcaataacatttaagaagcttgtcaaaggccatgcttattcagtaaccggagccaaacaggtaaactacaggggacaggttgtctccttgatacgtatgcggaatccgtggggggaggtcgaatggactggagcctggtcagacagcagcagtgaatggaataacgtggacccctatgagagggaccagctccgggtcaagatggaagatggcgagttttggatgtcatttagagacttcatgagggagtttacccgactggaaatctgcaatctgaccccggatgcgcttaaatcccgcactataaggaagtggaataccaccttatacgagggcacctggcgccgcggctctacagcagggggatgcagaaattacccggccacattttgggttaatccgcagtttaagatccggctggacgagacagatgatcctgacgactatggcgaccgggagagtggatgcagtttcgtgttggccctgatgcaaaagcatcggcgccgagagcggcgatttggccgggacatggaaacaattggattcgctgtgtacgaagtgccgccagaattggtgggccagcccgcagttcacctgaagagggatttcttcctggcaaacgcctcccgggctcgatccgagcaatttatcaatctgagggaagtctctacacgtttccgattgccgcctggtgagtacgtggtggtcccttcaacctttgagcccaacaaggagggtgatttcgtcctcagattcttctcagaaaagtccgcgggcactgtcgagttagatgatcagattcaggcaaatctgcctgacgaacaggtactgtcagaggaagagatagacgagaattttaaagcgctgttcaggcaactcgctggtgaagacatggaaatttccgttaaagaacttcgtacgattcttaacagaataattagtaaacataaggacctccgtacaaaaggtttttctctggagtcttgtcgtagcatggtcaacctcatggatagagacgggaatggaaaactcggccttgtcgagttcaatatcttatggaacaggatccggaattacctgtccatttttcgaaaattcgacctggacaagtccggttcaatgtcagcctatgagatgaggatggcaatagaaagcgctggatttaagcttaacaaaaaactttacgagctaataataactcgctactcggagcctgatctggctgtggactttgataacttcgtttgttgtctggtgaggctcgagaccatgtttaggttctttaagacgctggacaccgacttagacggagtggtgaccttcgacctgttcaagtggttacagttaacgatgttcgcttag

SEQ ID NO: 342569 - DNA, 2145 bp, Artificial Sequence
  derived and/or modified sequence
atgagcgaggagatcatcacccccgtgtactgcaccggcgtgagcgcccaggtccagaaacagcgtgcgcgggagctcggcctggggaggcatgagaacgcaatcaaatatttaggccaggattatgagcagctgagagtgcgctgcctgcagtccggcacactatttcgcgacgaggcatttccgcccgtgccgcagtcactagggtacaaagacttgggccccaatagtagtaaaacttacggcattaagtggaagcgcccaacggagctgctgagtaacccacagttcatcgtggacggtgcgacacgcaccgacatttgccaaggggccctgggggactgttggctacttgctgctattgcttcacttacactcaatgataccctcctgcatcgggtggtcccacatggccaatccttccagaacggctatgccggcattttccactttcaactctggcagtttggagaatgggtggatgttgtggtggacgacctgcttccaatcaaagacgggaagctggtgtttgtccacagtgccgaggggaacgaattctggtcagctctcctcgagaaggcatatgctaaagtaaatgggagttacgaggccctgtcgggggggtcaacatctgagggctttgaggacttcaccgggggcgttaccgagtggtacgaattgcgcaaagctccaagcgacctgtatcagatcattttaaaggcgctggaaaggggatccctgctcgggtgttctatcgacatcagcagcgtgctggacatggaggctatcacctttaagaaacttgtgaagggccacgcttattccgtaaccggagccaagcaagtgaactatcgtggacaggtggttagtttgatccgtatgagaaatccttggggcgaggttgaatggactggagcttggtccgactcatctagcgagtggaacaacgtcgacccctatgagcgggatcagctcagggtgaagatggaggacggcgagttttggatgtccttcagagacttcatgagggagtttacacggctggaaatctgtaatctgacccccgatgcattgaagagccgaacaatccgaaaatggaataccacactctatgagggcacttggagaaggggcagcacggccggagggtgcaggaactatcccgcaactttttgggttaacccgcagtttaaaattcgtctggacgagacggacgatccagacgattacggcgatagagagtcagggtgtagtttcgtgttagctcttatgcagaaacatcgcaggcgggaacgccgattcggtcgagatatggaaactatcggcttcgccgtgtacgaagtgccacccgagctggtcgggcagcccgctgtacacctgaaaagggattttttccttgccaatgcttcccgcgctagaagcgaacagtttatcaacttgagggaagttagcacaaggttcaggctaccacccggcgagtatgttgtggtgccttctacttttgagcccaacaaggagggcgatttcgttttgcggttcttttctgagaagagcgcaggaactgtggagctcgatgaccagatccaggccaatctcccagatgagcaggtcctgtccgaggaggagatagatgagaacttcaaagccctattccggcagttggccggggaagacatggaaatttccgtgaaagagctcagaaccattcttaatagaatcattagtaaacacaaggacttacggacgaagggtttcagtctagagagctgtcggtccatggtaaatctgatggatcgagatggaaacgggaaattgggattagttgagtttaatatattatggaatcgcatacggaactatctgagcatatttcgcaagttcgacctggacaaatcaggatctatgtcagcttacgagatgaggatggcaatcgagtccgccggctttaaactcaacaagaaattgtacgagctgatcatcacaagatactccgagcccgatcttgctgtagacttcgacaacttcgtgtgctgtctggttcgactcgaaaccatgttcaggttctttaagaccctggacaccgacctcgacggcgtcgtgacttttgatcttttcaaatggctgcagctgactatgtttgcatag

SEQ ID NO: 342570 - DNA, 447 bp, Artificial Sequence
  derived and/or modified sequence
atgagcgaggagatcatcacccccgtgtactgcaccggcgtgagcgcccaggtgcagaagcaacgagctcgggagctcggtttggggcgacacgaaaacgccattaaatatctggggcaggattatgaacagctgagagttcggtgcctgcagtcaggcacgcttttcagagatgaggcttttccacccgtgccccaaagccttgggtataaggatctgggcccgaattcatccaagacctatggcatcaagtggaaaagaccaacagaactcctgagcaatcctcagttcattgtggacggcgctactaggactgacatatgtcagggcgcccttggagactgttggctcctggcggcgatagcctcactaacactgaatgacaccctcttgcatcgggtggtccctcacggacaatcctttcagaatgggtacgccggtatttag

SEQ ID NO: 342571 - DNA, 411 bp, Artificial Sequence
  derived and/or modified sequence
atgagcgaggagatcatcacccccgtgtactgcaccggcgtgagcgctcaggtgcagaagcagcgggctcgagaattaggattgggccggcacgagaatgccattaaatacttaggacaggactacgaacagctgagggttcggtgccttcagagtgggaccctgttcagagacgaggcgtttcccccagtaccccagtccctcggttataaggacctaggtccaaactcctcgaaaacatatggaatcaagtggaagaggcctacagagctgctgagtaatccccagttcatagtagacggtgccactaggacggacatttgtcagggagccctcggcgattgctggctgctagccgctatagcatccctgactctgaatgatacactgctgcaccgcgtggtcccttag

SEQ ID NO: 342572 - DNA, 1983 bp, Artificial Sequence
  derived and/or modified sequence
atgcggatgccatcctctacatgggcccgaattatgtcaagctgcggctgtgacgcttgcagagtcggacccagttcggttatgcggccaagcccacggtacccacgcgcttgggtgacccgcacatgggtccccatccccccacgcccaatggcctccagtggatctgtccctagggattgctggctgctagcagctatcgcaagcctgacactaaatgacactctgcttcaccgcgtggtcccgcacggtcagagctttcagaatgggtacgctggcatttttcacttccagctgtggcaattcggcgagtgggttgatgtcgtagtggacgacctcctgcccatcaaagatggtaaactggtattcgtgcattccgccgaaggcaatgaattctggtctgcactgcttgaaaaagcatacgcaaaggtcaatggctcctatgaagccctgtccgggggtagcacgagtgaggggtttgaagatttcaccggtggagtgactgaatggtatgagctgcgaaaagcccctagtgatctttatcagatcatccttaaggcattggaacggggatccttattgggctgtagtatcgatatctcatcagtgctggatatggaggctataacgttcaaaaagttagtgaaaggacacgcctactcagtgaccggtgctaagcaagtgaattaccgcggacaggttgtgagccttattaggatgagaaacccatggggtgaagtggagtggaccggggcttggagcgattcaagctccgaatggaataacgtggatccatacgaacgcgatcaacttcgtgtaaaaatggaagatggcgagttttggatgtccttccgggactttatgagggagttcacgcgtcttgaaatctgtaaccttacccctgatgcactgaagtcgcgcactattagaaaatggaacacaactttatacgaggggacatggcggcgaggctccaccgccggtgggtgccggaactaccccgcaaccttttgggtcaacccacagttcaaaattcgattggatgagaccgacgacccggacgactacggcgatagagagtcagggtgcagcttcgtcctagccctgatgcagaagcaccggcgtcgcgaacgtagatttggaagggacatggagaccatcgggttcgcagtgtacgaggtgcccccagaactggtgggccagcctgcggtccatctgaagcgggactttttccttgctaacgcttcacgggctagatctgagcagttcattaatttgcgggaggtgtctacacgcttccggctgccgcctggagagtacgtggtcgtcccgagcacgttcgagcctaataaggagggtgattttgttttgcgtttcttctccgagaagagcgctgggacggtggaactcgacgatcagattcaggctaacctgcctgacgagcaggtcctgtctgaagaagagatcgacgagaattttaaggctctgtttcggcagttggcaggtgaagatatggaaatatctgtgaaagagctgagaaccatcctgaataggattatctctaaacataaggacctgcgtacgaaaggattctcactggagagctgccggagtatggtaaacctcatggaccgtgacgggaacgggaagctcgggctcgtggagttcaacatcctgtggaacaggataaggaactacctgagtatctttaggaaattcgatctcgacaagagcggctcaatgagtgcctacgagatgcggatggccattgagtccgccggtttcaagctgaacaagaaactctatgaacttattattactcggtactcggagcccgatcttgccgttgattttgataacttcgtctgttgcctagtccggctcgagacgatgtttcgcttttttaagaccttggacaccgatttagacggggtggttacatttgacttgtttaaatggctgcagctaactatgtttgcctag

SEQ ID NO: 342573 - DNA, 2145 bp, Artificial Sequence
  derived and/or modified sequence
atgagcgaggaaattattactcccgtctattgtactggcgtgtctgcccaggtacagaaacaaagggctcgagaactcggtctgggacggcatgagaacgcaataaagtatttaggtcaagactacgaacagctacgggtgcggtgcttgcaatctgggactctcttccgggacgaagcttttcccccagtgccccagtcccttggctataaagacctggggccaaacagctccaaaacatacggaataaagtggaaaaggccgaccgaacttctctctaatccgcagttcattgttgatggtgcaacaaggacagacatttgccagggggctctgggagattgttggctgctcgccgcaattgcctcccttactctcaacgacaccctactgcaccgcgtggtcccacacggacagtcattccagaacgggtacgcaggcattttccactttcaactgtggcagttcggcgagtgggtcgacgtcgtggtagatgatttgctccctatcaaggatggtaagctggtatttgtgcatagcgccgaagggaacgaattttggtccgctctcctcgaaaaggcttacgcaaaggttaacgggtcatacgaggccctgtcaggcggatccacgtccgagggtttcgaggatttcacggggggagttaccgagtggtacgagctgcgaaaagcccctagtgatttgtaccagattatccttaaagccctcgaacgcggatcactactgggatgttccatagacatcagttccgttcttgatatggaggccattacctttaaaaagctggtgaagggccacgcttacagcgtcaccggcgctaagcaggtgaattacaggggacaagttgtgagtcttatccgtatgaggaacccatggggcgaggtcgaatggacgggcgcttggtcagattctagtagcgaatggaataacgtggacccatatgagagagaccaactccgcgtaaaaatggaggatggagaattttggatgtcctttagggatttcatgcgagagttcacacggctcgaaatatgtaatctcacaccagacgctctgaaaagcaggaccattaggaagtggaataccacgctgtacgaaggtacctggagaagaggatccactgctggcggatgtagaaattatcccgctaccttttgggtgaaccctcaatttaaaattagactagatgagaccgacgatcccgacgactacggggacagagagtccggatgctcgtttgtcctggctctgatgcagaaacacaggcgcagggagcgccgattcgggcgagacatggaaactatagggttcgcagtgtacgaagtgccaccggagctcgtaggtcagcccgctgtgcatttaaagcgagacttcttcctggccaatgctagtcgggctcgaagcgagcagtttattaacctaagggaagtctcaacgagatttcggctccccccaggcgaatacgttgttgtgccatctactttcgaacctaataaggaaggcgacttcgtgctgcggttcttctctgaaaagtctgccggaactgttgagttggatgatcaaatccaggcaaacctcccagacgagcaagtgcttagcgaggaagagattgatgaaaactttaaagctctgttccggcagctagccggtgaagacatggagatcagcgtgaaggaactccgaaccatccttaatcggatcatatcaaaacacaaggacctacggacaaaagggttctccctcgagtcctgtcggagcatggtgaatttaatggacagagatggaaacggcaagttaggtctggttgagtttaatatcctgtggaacaggatacgcaactacctgtccatatttcggaagttcgatctcgacaagtctggttccatgtctgcctacgagatgcgcatggccatcgagagtgccggattcaagctaaataagaaattatatgagctgattatcacaagatactccgaacccgacctggcagtggacttcgataatttcgtatgttgtctcgtgaggctagaaactatgttccgattttttaaaaccctggacacagacttggacggagtggtgaccttcgatctgttcaagtggcttcagctgaccatgttcgcctag

SEQ ID NO: 342574 - DNA, 2145 bp, Artificial Sequence
  derived and/or modified sequence
atgagcgaagagataatcacccctgtgtactgtactggtgtcagcgcacaggtccaaaaacaacgcgctcgggagctcggactgggcaggcacgaaaacgctatcaaatacctgggccaggattacgagcaactgagagtacgatgtctgcaatccgggactctgtttcgtgacgaggcatttccaccagtgcctcagtctctgggatacaaggatctgggccctaattcctcaaagacttacggaatcaagtggaagcgccctacggagcttctctctaacccacagtttatcgttgacggcgctacccgcaccgacatctgccaaggcgcattaggcgattgctggcttctcgcagcaattgcgtccttgacgctcaatgatacccttttacaccgagtggtcccgcatggacagtctttccagaacggttatgctggaattttccacttccagctgtggcaatttggcgagtgggtagatgtagtggtggacgacctcctgccgatcaaagatggtaagttagtatttgttcacagtgccgaaggaaatgaattctggtccgcgctgctcgaaaaagcctatgcaaaagtgaatggctcctacgaggctctgtccgggggttcgaccagcgagggatttgaagattttactggcggtgttaccgaatggtacgaactccgaaaagctccgtcagatttgtaccagataatccttaaagccctagagcgcggaagcctgctgggctgctctattgacatttcaagtgttcttgacatggaagctatcacttttaagaaacttgtgaagggacacgcctactcagtaactggggctaaacaggtgaattaccgcggacaagtcgtgagtctgatccgtatgagaaatccatggggcgaggtggagtggacgggagcatggtcagacagcagcagtgaatggaataacgtggatccatacgaaagagatcagctccgggtgaaaatggaggacggagagttctggatgagtttcagagattttatgcgcgagttcacacggctagagatttgcaacctcaccccggacgctcttaagtcacgtactatccggaaatggaatactaccctgtacgagggaacttggcgacgaggctccaccgccggaggatgccggaattatccagcaaccttctgggttaatccacagttcaaaatcaggttggacgaaacagacgatccagatgattacggggaccgagagagcggctgcagtttcgtcctcgcattaatgcagaaacaccgtcgtagagaacgacgctttggtagagatatggaaactattggttttgccgtttatgaagttccaccagagttagttggacaacctgccgtgcatctcaagcgagatttctttctggctaacgccagcagggcaagatcggagcaatttatcaacttgagagaggtgtccacccgctttcggttgcctcctggcgagtacgtagtagtgccttcgacattcgagccaaacaaggagggggacttcgtactgcggttcttcagcgagaagtccgcagggacggtagagctggacgaccagattcaagccaatctaccggatgaacaagtactgtcagaagaggagatcgatgaaaatttcaaggcccttttcagacagctggctggtgaagacatggagatctccgtaaaggagttgcgcaccattctgaatagaattattagtaaacacaaagaccttcgcaccaaaggcttcagtctcgaatcttgtcggtccatggtgaatctgatggatcgagacggcaatgggaaattgggattggtggagtttaatatcctgtggaatcgaatccgcaactacctgtccatattccggaagtttgatctcgacaagagcggttccatgtccgcctatgaaatgcggatggccattgagagcgccggtttcaagctcaataaaaagctctacgagctgataatcactaggtatagtgaaccagatctcgcagtcgacttcgacaacttcgtctgttgccttgtgcgtctggagacgatgttcaggtttttcaaaacactggatacagatcttgatggggtcgtaactttcgatttattcaagtggttgcaactgacaatgttcgcttag

SEQ ID NO: 342575 - DNA, 489 bp, Artificial Sequence
  derived and/or modified sequence
atgagcgaggagattatcacgccagtgtattgtaccggggtttccgctcaagtccagaagcagagagccagggagctgggcctgggtcgccacgagaatgctatcaaatatcttggccaggattacgaacagctgagagtgagatgcctgcagtctggaactctctttagggatgaggctttcccccctgttccacagagcctgggatataaggatcttggtcctaattctagtaagacctatggaattaagtggaagcgacccactgaacttctgagtaatcctcaatttattgtggacggcgctacccgtaccgacatctgtcagggcgctcttggagactgctggctgctggcagccattgcatcattgacgctaaatgatactttactccaccgagtcgttccccatggccaaagctttcagaacggttatgctggcatcttccacttccagctgtggcagttcggtgaatgggtggacgtctag

SEQ ID NO: 342576 - DNA, 2145 bp, Artificial Sequence
  derived and/or modified sequence
atgagcgaggagattataacgccagtgtattgcaccggcgtctctgcccaggttcagaaacagcgggctagggagctaggattgggtagacacgaaaacgccattaaatatctcggccaggactatgaacaactcagggtacggtgcctccagagcggtactttatttagagatgaggctttcccacctgttcctcagagtctggggtacaaggacctcggtccaaattcctcaaagacatatggcatcaagtggaagagacctaccgagctgctcagtaatcctcagtttatcgttgatggggcaacccgtacagatatctgccaaggagcacttggcgattgctggcttttggccgcaatcgcttctctcacacttaatgacacactcctgcatagagtagttcctcatggacaaagcttccaaaatggatacgcaggcatttttcattttcagttgtggcagttcggagagtgggtggatgtggtcgtggacgacctcctcccgattaaggatggaaagttagtgttcgtccattccgcggagggcaatgagttttggtcagccctgctggagaaagcctatgcaaaagtcaacggttcctacgaggcactctccggtggctctacatctgagggattcgaggactttactggcggagtcaccgagtggtatgaactgcgcaaggctccaagtgacctgtatcagatcatcctgaaggctctcgaacgcggaagcctcctcggctgtagcatcgatatcagctcagttctggacatggaggccatcacattcaaaaagctggtcaaggggcacgcatactcagtgaccggcgctaaacaggtgaactaccgcggacaggtagtgtcattaatacgaatgcgcaatccttggggcgaggtggagtggaccggagcgtggagcgattcttcctcagagtggaacaacgtcgacccttatgagcgtgatcagcttcgagtgaagatggaggacggcgagttctggatgtccttccgcgactttatgagagagttcacacggctggagatctgcaatctgacaccagacgcattaaagtcccgtactattcgcaaatggaatacaacactgtatgagggaacctggagacggggttcgaccgccggtgggtgtcggaactatccggcaactttctgggtgaatccacagttcaaaataaggctggatgagacagacgatcccgatgattacggcgatcgcgaatcagggtgtagtttcgtgttagcactcatgcagaaacatcgccgtcgagagcgcagatttggccgagatatggagaccataggcttcgctgtatatgaagtcccacctgagctggtcggacaacccgcagtgcacctcaaacgcgatttttttctggccaacgccagccgtgcaagatcagagcagtttatcaacctaagagaggtgtccactcgctttcggctgccgcctggagagtacgtggttgtgcccagcacattcgaaccaaataaagagggcgactttgtactgcgatttttttctgagaaaagcgccggaaccgtggagctggacgatcagatccaggccaatctgccggatgagcaggtgttgagcgaggaggaaatcgatgagaatttcaaggccttgtttagacagttggccggagaggatatggagataagcgtgaaggagctcaggaccatcctgaaccgcataatctctaagcacaaggatctgaggactaaaggattctctctggagagctgccgcagtatggtgaacctaatggacagggacggaaacggcaagttaggcctggtagaattcaatatcctttggaatcgaataagaaactacctgagtatcttcagaaagttcgacctggataaaagtggctccatgagtgcctatgaaatgaggatggctatcgaatcagctggattcaaactgaacaagaaactctatgaattgatcatcaccagatactccgagccggatttggcggtcgacttcgacaattttgtctgctgtctggtccggcttgagacaatgtttagattcttcaagaccctcgataccgacctcgatggcgtggttacttttgacctgttcaagtggctgcagctcacaatgttcgcgtag

SEQ ID NO: 342577 - DNA, 459 bp, Artificial Sequence
  derived and/or modified sequence
atgagcgaggagattatcacccccgtttactgcaccggtgtttctgctcaagtgcaaaagcaacgggcaagggaactgggtttaggccgacacgagaatgccatcaaatacttaggccaagactacgaacaacttagggtgagatgcctccagagtggcacactgtttcgagacgaggcattcccacctgttccgcaaagcttgggatataaggatctcgggcctaactcatctaaaacctacgggattaagtggaagcgcccaacagagctcctcagcaatccgcagtttatcgtggatggcgctactcggaccgatatttgccagggagctctgggggactgttggttgttggccgcaattgcttccctcacactaaacgacacactcctccaccgtgtggtgcctcatggccagagtttccaaaatggatacgccggtatattccactttcaatag

SEQ ID NO: 342578 - DNA, 489 bp, Artificial Sequence
  derived and/or modified sequence
atgagcgaagagataattacccccgtctactgcactggcgtgagtgcccaggtccagaaacagagggctcgcgaacttggcctggggaggcatgagaatgccatcaagtacctggggcaggactacgagcaacttcgtgttaggtgtctgcagtcaggaaccctcttcagggatgaggcttttccaccggtgccgcagtccctgggctacaaagacctggggccaaactcctcaaagacttacggcataaaatggaaacgcccaacagaactgctgtctaatccccagtttatcgtcgacggtgcgacaaggactgacatttgccagggcgcactcggagattgttggctgctggccgctatagcctcacttaccctaaacgacacactgctgcacagggtggttccccacggccaatcttttcagaacgggtatgccggaatatttcatttccagttatggcagtttggtgaatgggttgacgtatag

SEQ ID NO: 342579 - DNA, 492 bp, Artificial Sequence
  derived and/or modified sequence
atgagcgaggaaatcataacccctgtgtactgcactggcgtgtccgctcaggtacagaagcagagggcaagagaactgggcctgggcagacatgaaaatgccattaaataccttggacaggactatgagcagctcagagtgcgttgcctacagtctgggacgctttttagggacgaagcttttcccccagtaccccagtcacttgggtataaagatctcggccctaattcaagcaagacctacggcatcaaatggaagaggcccaccgagctcctatcgaatccccagtttatcgtcgatggcgcaacccggaccgatatctgtcagggcgcattgggcgattgctggcttctcgccgctatcgcatccttgaccctgaacgacactttgctccatcgtgtcgttccccacggacagtcatttcagaacggctacgccggaatcttccattttcaactgtggcaatttggcgaatgggttgacgtagtctag

SEQ ID NO: 342580 - DNA, 576 bp, Artificial Sequence
  derived and/or modified sequence
atgagcgaagaaattatcacacccgtatattgcactggggtgtctgctcaagtccagaagcagcgtgctcgggagctcgggctgggcaggcacgaaaatgcaattaagtatctgggacaggactacgagcagctcagagtgaggtgcttacaatcaggtacgctgttcagagacgaggcttttccgccagtcccacagtctcttggatacaaggacctagggccaaactcaagtaagacgtatgggatcaaatggaaaaggccaacagagctcctgtcaaatccccagttcatcgtggatggtgccacaaggacggatatatgccagggcgcactcggcgactgttggctgctcgccgctatcgcttcacttacgctgaacgatacgttgttgcatcgtgtggtgcctcacgggcagtcattccagaatggctatgcaggcatttttcacttccagttgtggcagtttggggaatgggtcgacgtcgtggtggacgacctgctgcccatcaaagacgggaagctcgtattcgtgcactccgctgagggaaacgagttctggagtgctctgctctag

SEQ ID NO: 342581 - DNA, 513 bp, Artificial Sequence
  derived and/or modified sequence
atgagcgaggagatcataactccagtgtactgtaccggggtttccgcccaggtccaaaaacagcgggctcgagaactgggtctcggtaggcacgaaaacgccataaaatatcttggtcaggactatgagcagctgagggtgagatgtttgcagtcgggtacattgttccgggacgaggcctttcccccagtgccacagtcactgggctacaaggacctcggaccaaatagtagtaagacttacggaatcaaatggaaacgaccgaccgaactcctgtccaacccgcagtttatcgtcgatggggcaacccggaccgatatctgtcagggggcattgggggattgttggcttctggccgcaatcgcatcacttactttgaatgatacactgttgcatagggtcgtgccacatggccagagctttcagaacggttatgctggaattttccacttccagctgtggcagttcggcgagtgggtggacgttgtcgttgacgatcttctgcccatatag

SEQ ID NO: 342582 - DNA, 369 bp, Artificial Sequence
  derived and/or modified sequence
atgtcagaggagatcattacacccgtatactgcacaggcgtctcagcgcaggtgcagaagcagcgtgccagggagctggggctggggagacatgaaaatgccataaagtaccttggccaggactatgaacagcttcgggtgcggtgcctgcaaagcggcacactctttcgggatgaggcgttccctcccgttcctcaaagcttaggttataaggatctcgggcctaactcctctaagacctatgggattaagtggaagagaccaacagagctgctgagtaatcctcaattcattgtggacggcgcaacgagaaccgacatttgtcagggcgctctgggtgattgttggttgctggccgcaattgcatag

SEQ ID NO: 342583 - DNA, 192 bp, Artificial Sequence
  derived and/or modified sequence
atgtctgaggagattatcacaccggtctactgtactggggtgagcgcccaagtgcagaaacagcgagctagagaattgggacttggtaggcatgaaaacgcaattaagtatctcgggcaggactatgagcagctgcgggtgcggtgtctgcaatccggcacacttttccgagacgaggccttcccaccttag

SEQ ID NO: 342584 - DNA, 2145 bp, Artificial Sequence
  derived and/or modified sequence
atgagtgaagagattatcacaccagtgtactgcacgggtgtgagcgctcaagtccagaagcagcgcgcacgggagctcggattgggcagacacgagaacgcaattaagtacctggggcaagattacgagcagttgcgagtgaggtgtttgcagagtggcaccctttttagagatgaagcttttcccccagtcccacaatccttgggatacaaagatctcgggccaaactctagcaagacttatggcataaaatggaagcgacccactgagctgctctctaatccccagttcatagtcgacggagccactcgcactgatatctgtcagggagctttgggagactgttggttgctggccgctatcgccagcctgactctgaatgacacactgctacacagagtagtgccacatggccagtcttttcagaatggatatgcgggaatcttccactttcaactgtggcaatttggtgagtgggtggatgttgtcgtggacgacctacttccgataaaagatggaaaactggtgttcgtccattcagcagaaggcaatgagttttggtctgccctactggagaaggcttacgctaaggttaacgggagttacgaggccctttcaggcggttctacaagcgaaggattcgaggactttacgggaggcgttaccgagtggtacgaattgagaaaggcccctagcgacctttatcagatcatcttaaaggctctggaaagaggctccctcctgggttgttcaattgacatcagctctgttttggacatggaggcgatcacatttaagaagttggtgaagggccatgcatactcagttaccggagcaaagcaggtgaattaccggggacaggtggtgagcctgattcggatgcgcaacccttggggagaagtagaatggaccggggcatggagtgattcatcttccgagtggaacaatgtggatccgtatgaaagggaccagctgagagttaagatggaggacggggaattttggatgagttttagggatttcatgcgcgaatttactcgcctggaaatctgcaatctgacccctgatgccctaaaatcgagaacaatccgtaaatggaacacgaccttatacgagggaacttggagaagagggagtaccgcaggcggttgtagaaactacccagctaccttctgggtgaacccccagttcaaaattcgcctggacgagactgatgatccggacgactacggtgaccgggagagtggatgtagcttcgttctggcactgatgcaaaagcatcgaaggcgcgagaggagattcggacgtgacatggaaacaatagggtttgccgtatatgaggtccctcctgagctggtgggccagcccgctgtccacctcaaacgggacttctttctagcgaatgccagtcgcgctaggtccgagcaattcatcaacctccgggaagtgtctacgaggttccgtctcccacccggtgagtacgtcgtggttccaagcacgtttgagcctaacaaagagggtgattttgttctccggtttttctctgagaaaagcgccggaacagtggagctcgatgatcagattcaggccaacttgccagacgagcaagtgctcagcgaggaagaaatagacgagaatttcaaagccctgttcaggcagttagcgggtgaagacatggaaattagcgtgaaggaattacgcactattctcaaccgcatcatatcaaagcataaggatctcagaacgaagggcttctctctcgaatcatgtcgttcaatggtcaacctcatggatcgagacggaaacggcaaattgggactcgttgagttcaatatcctgtggaaccgcatccggaactatctttccattttccggaaattcgacctggacaagagtggttccatgtctgcctacgaaatgcgtatggccatagagtccgccggtttcaagcttaataagaaactatacgaactgattattacaaggtattccgagccagatctagctgtagactttgataacttcgtctgctgcctcgtcaggctggagaccatgtttagattttttaaaacattggacaccgatctagatggtgttgtaacctttgacctgtttaagtggctgcagctcaccatgttcgcatag

SEQ ID NO: 342585 - DNA, 2145 bp, Artificial Sequence
  derived and/or modified sequence
atgtcagaagagattatcaccccagtatattgcacaggggtatccgcccaggtgcagaaacagcgggcaagagagcttggtcttgggaggcacgaaaatgcaatcaaatatctcggacaggattatgaacagctcagggtccgatgtctccagagcggtacgttgttccgagacgaggcgttccctcctgtgccacaaagcttgggctataaggatcttgggcctaattcctccaaaacatatgggataaagtggaagcgcccaaccgagctgttaagtaatccccagtttatagttgatggagccaccaggacagacatctgccaaggagccttgggagactgctggctattagcggcaattgcctctctgactcttaatgatactctactgcacagggtggtcccccacgggcagtcattccaaaatggatacgccggaatttttcacttccagctctggcaatttggagagtgggtcgacgtcgtggtcgatgatttactgcctattaaagatggcaagcttgtgtttgtgcatagcgccgaagggaatgagttctggtcagctctgctcgagaaggcttatgccaaggttaatgggagctatgaggcgttatccggcggatcaacctctgaaggatttgaggatttcacgggcggagtgacggagtggtacgagctgcgaaaagcccctagtgatctttaccagattattctgaaagcactggaaagaggttccttgcttgggtgttcgatcgacataagcagtgtcctcgacatggaagccattacatttaagaagctggtaaagggtcatgcatatagcgttactggagcaaaacaagtcaactataggggacaggtggtttcactgatacgcatgaggaatccttggggcgaagtcgaatggactggtgcatggagcgattcgtcatcagagtggaacaacgtggacccctatgaacgcgatcaacttcgtgtaaagatggaagatggcgagttttggatgagctttcgggacttcatgagagaattcaccagactggagatctgcaacctgaccccagacgccctgaaatcccgcaccattcgcaaatggaatacaactctttatgagggaacttggagaaggggcagcacagccggtggttgcagaaactacccagctactttctgggtaaacccccagtttaaaattagactggatgaaacagatgatccggatgactacggcgatcgcgaatccggctgcagtttcgtattggccctgatgcagaaacataggagaagggagcggaggtttggcagggacatggagactatcggtttcgctgtctacgaagttccaccagagctggtcggccaaccagccgtgcatctcaaaagggacttcttcctagccaatgcttctcgagccagatctgaacaatttattaatctgagggaggtgtccactcggttcaggcttccgcctggagagtacgtggtggtgccctctaccttcgaaccaaataaggagggggacttcgtgctgcgtttctttagcgagaaatcagccggaaccgttgagctggatgaccagattcaggctaacttgcccgatgaacaagttctgtctgaggaggagattgatgaaaacttcaaagctctattcaggcaattggccggagaggacatggagattagcgtgaaggagctcagaacgatcctcaacaggatcatcagtaagcacaaagacttgaggaccaagggcttcagcttggagagctgccgctctatggtaaaccttatggaccgagacggcaacggcaagctcgggttagtggaattcaatatcctctggaatcgcattaggaactatctgtcaatcttccgcaaatttgacctcgataagagcggcagtatgtctgcctacgagatgcgaatggctatcgaatcggctgggttcaaactcaataagaagctatacgagcttatcattacacgctacagcgagccagatcttgccgttgatttcgacaatttcgtgtgctgtttagttcgcctggagacaatgttccggttctttaaaacactggacactgatcttgacggggtcgtcacctttgatcttttcaagtggctccagcttaccatgtttgcttag

SEQ ID NO: 342586 - DNA, 447 bp, Artificial Sequence
  derived and/or modified sequence
atgagtgaagagattatcaccccagtctactgtaccggggtgagtgctcaggtgcaaaagcagcgggctcgcgaactggggcttggcaggcacgaaaacgccattaagtatctggggcaagattacgagcaactgcgtgtgcgctgcttgcagagtggcactttgttccgagatgaggccttccctcctgttcctcaaagtcttggatacaaggatttgggtccgaatagctcgaagacctatgggattaagtggaagagaccaaccgagcttcttagcaatccccagtttatagttgacggggctacccggacggacatttgtcagggcgcattgggcgactgttggttacttgcagctatcgcctctctgacactgaacgacacactcctacatagagtcgttccccacggtcagagctttcagaatggatatgccggaatatag

SEQ ID NO: 342587 - DNA, 411 bp, Artificial Sequence
  derived and/or modified sequence
atgagcgaggaaatcattacaccagtgtattgcactggcgtgtccgctcaggtgcagaagcagagggctagagagttaggtttgggccgtcatgagaatgctatcaagtatctgggccaggactacgaacagctaagggtgcggtgtcttcagtcaggaaccttgttcagagatgaagcattccctccggtcccccagtctttgggctacaaggatttgggtcccaattcttcgaagacctacggaatcaaatggaagaggccaacagaacttctgtcaaatccacaattcatcgtggacggcgctaccaggacagatatatgtcaaggtgccctcggcgactgttggttgttggctgccattgcttctctcaccctaaacgatacattactccatcgtgtcgtaccgtag

SEQ ID NO: 342588 - DNA, 2390 bp, Artificial Sequence
  derived and/or modified sequence
tgggccctgccctgagctgccaccgggaagccagcctcagggactgcagcgacccccaaacacccctcccccaggatgtcggaggagatcatcacgccggtgtactgcactggggtgtcagcccaagtgcagaagcagcgggccagggagctgggcctgggccgccatgagaatgccatcaagtacctgggccaggattatgagcagctgcgggtgcgatgcctgcagagtgggaccctcttccgtgatgaggccttccccccggtaccccagagcctgggttacaaggacctgggtcccaattcctccaagacctatggcatcaagtggaagcgtcccacgggactgctggctcttggcggccatcgcctccctcactctcaacgacaccctcctgcaccgagtggttccgcacggccagagcttccagaatggctatgccggcatcttccatttccagctgtggcaatttggggagtgggtggacgtggtcgtggatgacctgctgcccatcaaggacgggaagctagtgttcgtgcactctgccgaaggcaacgagttctggagcgccctgcttgagaaggcctatgccaaggtaaatggcagctacgaggccctgtcagggggcagcacctcagagggctttgaggacttcacaggcggggttaccgagtggtacgagttgcgcaaggctcccagtgacctctaccagatcatcctcaaggcgctggagcggggctccctgctgggctgctccatagacatctccagcgttctagacatggaggccatcactttcaagaagttggtgaagggccatgcctactctgtgaccggggccaagcaggtgaactaccgaggccaggtggtgagcctgatccggatgcggaacccctggggcgaggtggagtggacgggagcctggagcgacagctcctcagagtggaacaacgtggacccatatgaacgggaccagctccgggtcaagatggaggacggggagttctggatgtcattccgagacttcatgcgggagttcacccgcctggagatctgcaacctcacacccgacgccctcaagagccggaccatccgcaaatggaacaccacactctacgaaggcacctggcggcgggggagcaccgcggggggctgccgaaactacccagccaccttctgggtgaaccctcagttcaagatccggctggatgagacggatgacccggacgactacggggaccgcgagtcaggctgcagcttcgtgctcgcccttatgcagaagcaccgtcgccgcgagcgccgcttcggccgcgacatggagactattggcttcgcggtctacgaggtccctccggagctggtgggccagccggccgtacacttgaagcgtgacttcttcctggccaatgcgtctcgggcgcgctcagagcagttcatcaacctgcgagaggtcagcacccgcttccgcctgccacccggggagtatgtggtggtgccctccaccttcgagcccaacaaggagggcgacttcgtgctgcgcttcttctcagagaagagtgctgggactgtggagctggatgaccagatccaggccaatctccccgatgagcaagtgctctcagaagaggagattgacgagaacttcaaggccctcttcaggcagctggcaggggaggacatggagatcagcgtgaaggagttgcggacaatcctcaataggatcatcagcaaacacaaagacctgcggaccaagggcttcagcctagagtcgtgccgcagcatggtgaacctcatggatcgtgatggcaatgggaagctgggcctggtggagttcaacatcctgtggaaccgcatccggaattacctgtccatcttccggaagtttgacctggacaagtcgggcagcatgagtgcctacgagatgcggatggccattgagtcggcaggcttcaagctcaacaagaagctgtacgagctcatcatcacccgctactcggagcccgacctggcggtcgactttgacaatttcgtttgctgcctggtgcggctagagaccatgttccgatttttcaaaactctggacacagatctggatggagttgtgacctttgacttgtttaagtggttgcagctgaccatgtttgcatgaggcagggactcggtcccccttgccgtgctcccctccctcctcgtctgccaagcctcgcctcctaccacaccacaccaggccaccccagctgcaagtgccttccttggagcagagaggcagcctcgtcctcctgtcccctctcctcccagccaccatcgttcatctgctccgggcagaactgtgtggcccctgcctgtgccagccatgggctcgggatggactccctgggccccacccattg

SEQ ID NO: 342589 - DNA, 3007 bp, Artificial Sequence
  derived and/or modified sequence
aaggagagagggagggcggagggcggaggggcggcgggaggagggcggggaggagcgctcttcctggttgggccctgccctgagctgccaccgggaagccagcctcagggactgcagcgacccccaaacacccctcccccaggatgtcggaggagatcatcacgccggtgtactgcactggggtgtcagcccaagtgcagaagcagcgggccagggagctgggcctgggccgccatgagaatgccatcaagtacctgggccaggattatgagcagctgcgggtgcgatgcctgcagagtgggaccctcttccgtgatgaggccttccccccggtaccccagagcctgggttacaaggacctgggtcccaattcctccaagacctatggcatcaagtggaagcgtcccacggaactgctgtcaaacccccagttcattgtggatggagctacccgcacagacatctgccagggagcactgggggactgctggctcttggcggccatcgcctccctcactctcaacgacaccctcctgcaccgagtggttccgcacggccagagcttccagaatggctatgccggcatcttccatttccagctgtggcaatttggggagtgggtggacgtggtcgtggatgacctgctgcccatcaaggacgggaagctagtgttcgtgcactctgccgaaggcaacgagttctggagcgccctgcttgagaaggcctatgccaaggtaaatggcagctacgaggccctgtcagggggcagcacctcagagggctttgaggacttcacaggcggggttaccgagtggtacgagttgcgcaaggctcccagtgacctctaccagatcatcctcaaggcgctggagcggggctccctgctgggctgctccatagacatctccagcgttctagacatggaggccatcactttcaagaagttggtgaagggccatgcctactctgtgaccggggccaagcaggtgaactaccgaggccaggtggtgagcctgatccggatgcggaacccctggggcgaggtggagtggacgggagcctggagcgacagctcctcagagtggaacaacgtggacccatatgaacgggaccagctccgggtcaagatggaggacggggagttctggatgtcattccgagacttcatgcgggagttcacccgcctggagatctgcaacctcacacccgacgccctcaagagccggaccatccgcaaatggaacaccacactctacgaaggcacctggcggcgggggagcaccgcggggggctgccgaaactacccagccaccttctgggtgaaccctcagttcaagatccggctggatgagacggatgacccggacgactacggggaccgcgagtcaggctgcagcttcgtgctcgcccttatgcagaagcaccgtcgccgcgagcgccgcttcggccgcgacatggagactattggcttcgcggtctacgaggtccctccggagctggtgggccagccggccgtacacttgaagcgtgacttcttcctggccaatgcgtctcgggcgcgctcagagcagttcatcaacctgcgagaggtcagcacccgcttccgcctgccacccggggagtatgtggtggtgccctccaccttcgagcccaacaaggagggcgacttcgtgctgcgcttcttctcagagaagagtgctgggactgtggagctggatgaccagatccaggccaatctccccgatgagcaagtgctctcagaagaggagattgacgagaacttcaaggccctcttcaggcagctggcaggggaggacatggagatcagcgtgaaggagttgcggacaatcctcaataggatcatcagcaaacacaaagacctgcggaccaagggcttcagcctagagtcgtgccgcagcatggtgaacctcatggatcgtgatggcaatgggaagctgggcctggtggagttcaacatcctgtggaaccgcatccggaattacctgtccatcttccggaagtttgacctggacaagtcgggcagcatgagtgcctacgagatgcggatggccattgagtcggcaggcttcaagctcaacaagaagctgtacgagctcatcatcacccgctactcggagcccgacctggcggtcgactttgacaatttcgtttgctgcctggtgcggctagagaccatgttccgatttttcaaaactctggacacagatctggatggagttgtgacctttgacttgtttaagtggttgcagctgaccatgtttgcatgaggcagggactcggtcccccttgccgtgctcccctccctcctcgtctgccaagcctcgcctcctaccacaccacaccaggccaccccagctgcaagtgccttccttggagcagagaggcagcctcgtcctcctgtcccctctcctcccagccaccatcgttcatctgctccgggcagaactgtgtggcccctgcctgtgccagccatgggctcgggatggactccctgggccccacccattgccaagccaggaaggcagctttcgcttgttcctgcctcgggacagccccgggtttccccagcatcctgatgtgtcccctctccccacttcagaggccacccactcagcaccaccggcctggccttgcctgcagactataaactataaccactagctcgacacagtctgcagtccaggcgtgtggagccgcctcccggctcggggaggccccggggctgggaacgcctgtgccttcctgcgccgaagccaacgccccctctgtccttccctggccctgctgccgaccaggagctgcccagcctgtgggcggtcggccttccctccttcgctccttttttatattagtgattttaaaggggactcttcagggacttgtgtactggttatgggggtgccagaggcactaggcttggggtggggaggtcccgtgttccatatagaggaaccccaaataataaaaggccccacatctgtctgtg

SEQ ID NO: 342590 - DNA, 2960 bp, Artificial Sequence
  derived and/or modified sequence
tggcccccggcctgcggagggaggggcggggagacaccgtgagtaagagatagtcagagaccgtgccggagagataagggagagccgagaggaagcggggatgtcggaggagatcatcacgccggtgtactgcactggggtgtcagcccaagtgcagaagcagcgggccagggagctgggcctgggccgccatgagaatgccatcaagtacctgggccaggattatgagcagctgcgggtgcgatgcctgcagagtgggaccctcttccgtgatgaggccttccccccggtaccccagagcctgggttacaaggacctgggtcccaattcctccaagacctatggcatcaagtggaagcgtcccacggaactgctgtcaaacccccagttcattgtggatggagctacccgcacagacatctgccagggagcactgggggactgctggctcttggcggccatcgcctccctcactctcaacgacaccctcctgcaccgagtggttccgcacggccagagcttccagaatggctatgccggcatcttccatttccagctgtggcaatttggggagtgggtggacgtggtcgtggatgacctgctgcccatcaaggacgggaagctagtgttcgtgcactctgccgaaggcaacgagttctggagcgccctgcttgagaaggcctatgccaaggtaaatggcagctacgaggccctgtcagggggcagcacctcagagggctttgaggacttcacaggcggggttaccgagtggtacgagttgcgcaaggctcccagtgacctctaccagatcatcctcaaggcgctggagcggggctccctgctgggctgctccatagacatctccagcgttctagacatggaggccatcactttcaagaagttggtgaagggccatgcctactctgtgaccggggccaagcaggtgaactaccgaggccaggtggtgagcctgatccggatgcggaacccctggggcgaggtggagtggacgggagcctggagcgacagctcctcagagtggaacaacgtggacccatatgaacgggaccagctccgggtcaagatggaggacggggagttctggatgtcattccgagacttcatgcgggagttcacccgcctggagatctgcaacctcacacccgacgccctcaagagccggaccatccgcaaatggaacaccacactctacgaaggcacctggcggcgggggagcaccgcggggggctgccgaaactacccagccaccttctgggtgaaccctcagttcaagatccggctggatgagacggatgacccggacgactacggggaccgcgagtcaggctgcagcttcgtgctcgcccttatgcagaagcaccgtcgccgcgagcgccgcttcggccgcgacatggagactattggcttcgcggtctacgaggtccctccggagctggtgggccagccggccgtacacttgaagcgtgacttcttcctggccaatgcgtctcgggcgcgctcagagcagttcatcaacctgcgagaggtcagcacccgcttccgcctgccacccggggagtatgtggtggtgccctccaccttcgagcccaacaaggagggcgacttcgtgctgcgcttcttctcagagaagagtgctgggactgtggagctggatgaccagatccaggccaatctccccgatgagcaagtgctctcagaagaggagattgacgagaacttcaaggccctcttcaggcagctggcaggggaggacatggagatcagcgtgaaggagttgcggacaatcctcaataggatcatcagcaaacacaaagacctgcggaccaagggcttcagcctagagtcgtgccgcagcatggtgaacctcatggatcgtgatggcaatgggaagctgggcctggtggagttcaacatcctgtggaaccgcatccggaattacctgtccatcttccggaagtttgacctggacaagtcgggcagcatgagtgcctacgagatgcggatggccattgagtcggcaggcttcaagctcaacaagaagctgtacgagctcatcatcacccgctactcggagcccgacctggcggtcgactttgacaatttcgtttgctgcctggtgcggctagagaccatgttccgatttttcaaaactctggacacagatctggatggagttgtgacctttgacttgtttaagtggttgcagctgaccatgtttgcatgaggcagggactcggtcccccttgccgtgctcccctccctcctcgtctgccaagcctcgcctcctaccacaccacaccaggccaccccagctgcaagtgccttccttggagcagagaggcagcctcgtcctcctgtcccctctcctcccagccaccatcgttcatctgctccgggcagaactgtgtggcccctgcctgtgccagccatgggctcgggatggactccctgggccccacccattgccaagccaggaaggcagctttcgcttgttcctgcctcgggacagccccgggtttccccagcatcctgatgtgtcccctctccccacttcagaggccacccactcagcaccaccggcctggccttgcctgcagactataaactataaccactagctcgacacagtctgcagtccaggcgtgtggagccgcctcccggctcggggaggccccggggctgggaacgcctgtgccttcctgcgccgaagccaacgccccctctgtccttccctggccctgctgccgaccaggagctgcccagcctgtgggcggtcggccttccctccttcgctccttttttatattagtgattttaaaggggactcttcagggacttgtgtactggttatgggggtgccagaggcactaggcttggggtggggaggtcccgtgttccatatagaggaaccccaaataataaaaggccccacatctgtc

SEQ ID NO: 342591 - DNA, 550 bp, Artificial Sequence
  derived and/or modified sequence
ctaatttgtcctctcgcggaattggcccccggcctgcggagggaggggcggggagacaccgtgagatgtcggaggagatcatcacgccggtgtactgcactggggtgtcagcccaagtgcagaagcagcgggccagggagctgggcctgggccgccatgagaatgccatcaagtacctgggccaggattatgagcagctgcgggtgcgatgcctgcagagtgggaccctcttccgtgatgaggccttccccccggtaccccagagcctgggttacaaggacctgggtcccaattcctccaagacctatggcatcaagtggaagcgtcccacggaactgctgtcaaacccccagttcattgtggatggagctacccgcacagacatctgccagggagcactgggggactgctggctcttggcggccatcgcctccctcactctcaacgacaccctcctgcaccgagtggttccgcacggccagagcttccagaatggctatgccggcatcttccatttccagctgtggcaatttggggagtgggtggacgt

SEQ ID NO: 342592 - DNA, 3086 bp, Artificial Sequence
  derived and/or modified sequence
gggatccgggaaaggagaggtggccggcacgcctgggaactgggaaatccctttcctggattcactgggagcaccgggaggtggctgagaaccctacttctgtgaggggagcagtgaggcagggaaaccctaggtttggggatggataagcaggggcaggagagcagagcttgcaggcaggagcccaggttctagtcttgggaaggcctgggttctgagcaggcccatctgtccggcaggatgtcggaggagatcatcacgccggtgtactgcactggggtgtcagcccaagtgcagaagcagcgggccagggagctgggcctgggccgccatgagaatgccatcaagtacctgggccaggattatgagcagctgcgggtgcgatgcctgcagagtgggaccctcttccgtgatgaggccttccccccggtaccccagagcctgggttacaaggacctgggtcccaattcctccaagacctatggcatcaagtggaagcgtcccacggaactgctgtcaaacccccagttcattgtggatggagctacccgcacagacatctgccagggagcactgggggactgctggctcttggcggccatcgcctccctcactctcaacgacaccctcctgcaccgagtggttccgcacggccagagcttccagaatggctatgccggcatcttccatttccagctgtggcaatttggggagtgggtggacgtggtcgtggatgacctgctgcccatcaaggacgggaagctagtgttcgtgcactctgccgaaggcaacgagttctggagcgccctgcttgagaaggcctatgccaaggtaaatggcagctacgaggccctgtcagggggcagcacctcagagggctttgaggacttcacaggcggggttaccgagtggtacgagttgcgcaaggctcccagtgacctctaccagatcatcctcaaggcgctggagcggggctccctgctgggctgctccatagacatctccagcgttctagacatggaggccatcactttcaagaagttggtgaagggccatgcctactctgtgaccggggccaagcaggtgaactaccgaggccaggtggtgagcctgatccggatgcggaacccctggggcgaggtggagtggacgggagcctggagcgacagctcctcagagtggaacaacgtggacccatatgaacgggaccagctccgggtcaagatggaggacggggagttctggatgtcattccgagacttcatgcgggagttcacccgcctggagatctgcaacctcacacccgacgccctcaagagccggaccatccgcaaatggaacaccacactctacgaaggcacctggcggcgggggagcaccgcggggggctgccgaaactacccagccaccttctgggtgaaccctcagttcaagatccggctggatgagacggatgacccggacgactacggggaccgcgagtcaggctgcagcttcgtgctcgcccttatgcagaagcaccgtcgccgcgagcgccgcttcggccgcgacatggagactattggcttcgcggtctacgaggtccctccggagctggtgggccagccggccgtacacttgaagcgtgacttcttcctggccaatgcgtctcgggcgcgctcagagcagttcatcaacctgcgagaggtcagcacccgcttccgcctgccacccggggagtatgtggtggtgccctccaccttcgagcccaacaaggagggcgacttcgtgctgcgcttcttctcagagaagagtgctgggactgtggagctggatgaccagatccaggccaatctccccgatgagcaagtgctctcagaagaggagattgacgagaacttcaaggccctcttcaggcagctggcaggggaggacatggagatcagcgtgaaggagttgcggacaatcctcaataggatcatcagcaaacacaaagacctgcggaccaagggcttcagcctagagtcgtgccgcagcatggtgaacctcatggatcgtgatggcaatgggaagctgggcctggtggagttcaacatcctgtggaaccgcatccggaattacctgtccatcttccggaagtttgacctggacaagtcgggcagcatgagtgcctacgagatgcggatggccattgagtcggcaggcttcaagctcaacaagaagctgtacgagctcatcatcacccgctactcggagcccgacctggcggtcgactttgacaatttcgtttgctgcctggtgcggctagagaccatgttccgatttttcaaaactctggacacagatctggatggagttgtgacctttgacttgtttaagtggttgcagctgaccatgtttgcatgaggcagggactcggtcccccttgccgtgctcccctccctcctcgtctgccaagcctcgcctcctaccacaccacaccaggccaccccagctgcaagtgccttccttggagcagagaggcagcctcgtcctcctgtcccctctcctcccagccaccatcgttcatctgctccgggcagaactgtgtggcccctgcctgtgccagccatgggctcgggatggactccctgggccccacccattgccaagccaggaaggcagctttcgcttgttcctgcctcgggacagccccgggtttccccagcatcctgatgtgtcccctctccccacttcagaggccacccactcagcaccaccggcctggccttgcctgcagactataaactataaccactagctcgacacagtctgcagtccaggcgtgtggagccgcctcccggctcggggaggccccggggctgggaacgcctgtgccttcctgcgccgaagccaacgccccctctgtccttccctggccctgctgccgaccaggagctgcccagcctgtgggcggtcggccttccctccttcgctccttttttatattagtgattttaaaggggactcttcagggacttgtgtactggttatgggggtgccagaggcactaggcttggggtggggaggtcccgtgttccatatagaggaaccccaaataataaaag

SEQ ID NO: 342593 - DNA, 564 bp, Artificial Sequence
  derived and/or modified sequence
actacagagctgcaagcccctgacaatgggatccgggaaaggagaggtggccggcacgcctgggaactgggaaatccctttcctggattcactgggagcaccgggaggatgtcggaggagatcatcacgccggtgtactgcactggggtgtcagcccaagtgcagaagcagcgggccagggagctgggcctgggccgccatgagaatgccatcaagtacctgggccaggattatgagcagctgcgggtgcgatgcctgcagagtgggaccctcttccgtgatgaggccttccccccggtaccccagagcctgggttacaaggacctgggtcccaattcctccaagacctatggcatcaagtggaagcgtcccacggaactgctgtcaaacccccagttcattgtggatggagctacccgcacagacatctgccagggagcactgggggactgctggctcttggcggccatcgcctccctcactctcaacgacaccctcctgcaccgagtggttccgcacggccagagcttccagaatggctatgccggcatcttccatttccag

SEQ ID NO: 342594 - DNA, 582 bp, Artificial Sequence
  derived and/or modified sequence
gcgctggcccctccccggggactgctctgccttttactaatttgtcctctcgcggaattggcccccggcctgcggagggaggggcggggagacaccgatgtcggaggagatcatcacgccggtgtactgcactggggtgtcagcccaagtgcagaagcagcgggccagggagctgggcctgggccgccatgagaatgccatcaagtacctgggccaggattatgagcagctgcgggtgcgatgcctgcagagtgggaccctcttccgtgatgaggccttccccccggtaccccagagcctgggttacaaggacctgggtcccaattcctccaagacctatggcatcaagtggaagcgtcccacggaactgctgtcaaacccccagttcattgtggatggagctacccgcacagacatctgccagggagcactgggggactgctggctcttggcggccatcgcctccctcactctcaacgacaccctcctgcaccgagtggttccgcacggccagagcttccagaatggctatgccggcatcttccatttccagctgtggcaatttggggagtgggtggacgt

SEQ ID NO: 342595 - DNA, 571 bp, Artificial Sequence
  derived and/or modified sequence
acccttctctgtccctggacacctgcgcagaaagcctaggagctggttccacccatcactcaccaggttaggtatttcaggatgtcggaggagatcatcacgccggtgtactgcactggggtgtcagcccaagtgcagaagcagcgggccagggagctgggcctgggccgccatgagaatgccatcaagtacctgggccaggattatgagcagctgcgggtgcgatgcctgcagagtgggaccctcttccgtgatgaggccttccccccggtaccccagagcctgggttacaaggacctgggtcccaattcctccaagacctatggcatcaagtggaagcgtcccacggaactgctgtcaaacccccagttcattgtggatggagctacccgcacagacatctgccagggagcactgggggactgctggctcttggcggccatcgcctccctcactctcaacgacaccctcctgcaccgagtggttccgcacggccagagcttccagaatggctatgccggcatcttccatttccagctgtggcaatttggggagtgggtggacgtggtcg

SEQ ID NO: 342596 - DNA, 593 bp, Artificial Sequence
  derived and/or modified sequence
gacacatgggcgcttccaggatgtcggaggagatcatcacgccggtgtactgcactggggtgtcagcccaagtgcagaagcagcgggccagggagctgggcctgggccgccatgagaatgccatcaagtacctgggccaggattatgagcagctgcgggtgcgatgcctgcagagtgggaccctcttccgtgatgaggccttccccccggtaccccagagcctgggttacaaggacctgggtcccaattcctccaagacctatggcatcaagtggaagcgtcccacggaactgctgtcaaacccccagttcattgtggatggagctacccgcacagacatctgccagggagcactgggggactgctggctcttggcggccatcgcctccctcactctcaacgacaccctcctgcaccgagtggttccgcacggccagagcttccagaatggctatgccggcatcttccatttccagctgtggcaatttggggagtgggtggacgtggtcgtggatgacctgctgcccatcaaggacgggaagctagtgttcgtgcactctgccgaaggcaacgagttctggagcgccctgctt

SEQ ID NO: 342597 - DNA, 576 bp, Artificial Sequence
  derived and/or modified sequence
aatctcggccccgcgccggggctggctgggaacggcgggagcagctgcggtcgcgcggagcgaggatgtcggaggagatcatcacgccggtgtactgcactggggtgtcagcccaagtgcagaagcagcgggccagggagctgggcctgggccgccatgagaatgccatcaagtacctgggccaggattatgagcagctgcgggtgcgatgcctgcagagtgggaccctcttccgtgatgaggccttccccccggtaccccagagcctgggttacaaggacctgggtcccaattcctccaagacctatggcatcaagtggaagcgtcccacggaactgctgtcaaacccccagttcattgtggatggagctacccgcacagacatctgccagggagcactgggggactgctggctcttggcggccatcgcctccctcactctcaacgacaccctcctgcaccgagtggttccgcacggccagagcttccagaatggctatgccggcatcttccatttccagctgtggcaatttggggagtgggtggacgtggtcgtggatgacctgctgcccatca

SEQ ID NO: 342598 - DNA, 496 bp, Artificial Sequence
  derived and/or modified sequence
actacagagctgcaagcccctgacaatgggatccgggaaaggagaggtggccggcacgcctgggaactgggaaatccctttcctggattcactgggagcaccgggaggtggctgagaaccctacttctgatgtcggaggagatcatcacgccggtgtactgcactggggtgtcagcccaagtgcagaagcagcgggccagggagctgggcctgggccgccatgagaatgccatcaagtacctgggccaggattatgagcagctgcgggtgcgatgcctgcagagtgggaccctcttccgtgatgaggccttccccccggtaccccagagcctgggttacaaggacctgggtcccaattcctccaagacctatggcatcaagtggaagcgtcccacggaactgctgtcaaacccccagttcattgtggatggagctacccgcacagacatctgccagggagcactgggggactgctggctcttggcggccatcgcct

SEQ ID NO: 342599 - DNA, 568 bp, Artificial Sequence
  derived and/or modified sequence
cttcctggttgggccctgccctgagctgccaccgggaagccagcctcagggactgcagcgacccccaaacacccctcccccaggtaagaagctgggtagccgagccgggattccttgaccctggccactgctcctgggctgaggggctgccccagcacggtcccttctcgggggcctctgcgttcctggagcaggggtgggggctggcggagcggcacagcccaggcgcctgtcccagcctggctcaccgctgtccccaggggctgggctagggcccaccagctctgatatcgagcctgctgcgggggcctgaggagggggaccccgaccgtctggggttttcagcccacggcaaggggccggtgcaccaggagcttggatgtcggaggagatcatcacgccggtgtactgcactggggtgtcagcccaagtgcagaagcagcgggccagggagctgggcctgggccgccatgagaatgccatcaagtacctgggccaggattatgagcagctgcgggtgcgatgcctgcagagtgggaccctcttccgtgatgaggccttccccccg

SEQ ID NO: 342600 - DNA, 2792 bp, Artificial Sequence
  derived and/or modified sequence
ctctcgcggaattggcccccggcctgcggagggaggggcggggagacaccgtgagtaagagatagtcagagaccgatgtcggaggagatcatcacgccggtgtactgcactggggtgtcagcccaagtgcagaagcagcgggccagggagctgggcctgggccgccatgagaatgccatcaagtacctgggccaggattatgagcagctgcgggtgcgatgcctgcagagtgggaccctcttccgtgatgaggccttccccccggtaccccagagcctgggttacaaggacctgggtcccaattcctccaagacctatggcatcaagtggaagcgtcccacggaactgctgtcaaacccccagttcattgtggatggagctacccgcacagacatctgccagggagcactgggggactgctggctcttggcggccatcgcctccctcactctcaacgacaccctcctgcaccgagtggttccgcacggccagagcttccagaatggctatgccggcatcttccatttccagctgtggcaatttggggagtgggtggacgtggtcgtggatgacctgctgcccatcaaggacgggaagctagtgttcgtgcactctgccgaaggcaacgagttctggagcgccctgcttgagaaggcctatgccaaggtaaatggcagctacgaggccctgtcagggggcagcacctcagagggctttgaggacttcacaggcggggttaccgagtggtacgagttgcgcaaggctcccagtgacctctaccagatcatcctcaaggcgctggagcggggctccctgctgggctgctccatagacatctccagcgttctagacatggaggccatcactttcaagaagttggtgaagggccatgcctactctgtgaccggggccaagcaggtgaactaccgaggccaggtggtgagcctgatccggatgcggaacccctggggcgaggtggagtggacgggagcctggagcgacagctcctcagagtggaacaacgtggacccatatgaacgggaccagctccgggtcaagatggaggacggggagttctggatgtcattccgagacttcatgcgggagttcacccgcctggagatctgcaacctcacacccgacgccctcaagagccggaccatccgcaaatggaacaccacactctacgaaggcacctggcggcgggggagcaccgcggggggctgccgaaactacccagccaccttctgggtgaaccctcagttcaagatccggctggatgagacggatgacccggacgactacggggaccgcgagtcaggctgcagcttcgtgctcgcccttatgcagaagcaccgtcgccgcgagcgccgcttcggccgcgacatggagactattggcttcgcggtctacgaggtccctccggagctggtgggccagccggccgtacacttgaagcgtgacttcttcctggccaatgcgtctcgggcgcgctcagagcagttcatcaacctgcgagaggtcagcacccgcttccgcctgccacccggggagtatgtggtggtgccctccaccttcgagcccaacaaggagggcgacttcgtgctgcgcttcttctcagagaagagtgctgggactgtggagctggatgaccagatccaggccaatctccccgatgagcaagtgctctcagaagaggagattgacgagaacttcaaggccctcttcaggcagctggcaggggaggacatggagatcagcgtgaaggagttgcggacaatcctcaataggatcatcagcaaacacaaagacctgcggaccaagggcttcagcctagagtcgtgccgcagcatggtgaacctcatggatcgtgatggcaatgggaagctgggcctggtggagttcaacatcctgtggaaccgcatccggaattacctgtccatcttccggaagtttgacctggacaagtcgggcagcatgagtgcctacgagatgcggatggccattgagtcggcaggcttcaagctcaacaagaagctgtacgagctcatcatcacccgctactcggagcccgacctggcggtcgactttgacaatttcgtttgctgcctggtgcggctagagaccatgttccgatttttcaaaactctggacacagatctggatggagttgtgacctttgacttgtttaagtggttgcagctgaccatgtttgcatgaggcagggactcggtcccccttgccgtgctcccctccctcctcgtctgccaagcctcgcctcctaccacaccacaccaggccaccccagctgcaagtgccttccttggagcagagaggcagcctcgtcctcctgtcccctctcctcccagccaccatcgttcatctgctccgggcagaactgtgtggcccctgcctgtgccagccatgggctcgggatggactccctgggccccacccattgccaagccaggaaggcagctttcgcttgttcctgcctcgggacagccccgggtttccccagcatcctgatgtgtcccctctccccacttcagaggccacccactcagcaccaccggcctggccttgcctgcagactataaactataaccactagctcgacacagtctgcagtccaggcgtgtggagccgcctcccggctcggggaggccccggggctgggaacgcctgtgccttcctgcgccgaagccaacgccccctctgtccttccctggccctgctgccgaccaggagctgcccagcctgtgggcggtcggccttccctccttcgctcc

SEQ ID NO: 342601 - DNA, 3083 bp, Artificial Sequence
  derived and/or modified sequence
gaaagtcgggccgaacggggcagggacttacccaaggtcacgcagcgagcccggtccccctgcgttccccggggagcgctgagccgggacgcggcggtggggtggggaaggggagtggcgcggccctgcggggtgaggctgccgtttgctgagtgtccggcaggggtctgctcgctgccagcccggcccctcctcagagcagctgccgcagcccgaggatgtcggaggagatcatcacgccggtgtactgcactggggtgtcagcccaagtgcagaagcagcgggccagggagctgggcctgggccgccatgagaatgccatcaagtacctgggccaggattatgagcagctgcgggtgcgatgcctgcagagtgggaccctcttccgtgatgaggccttccccccggtaccccagagcctgggttacaaggacctgggtcccaattcctccaagacctatggcatcaagtggaagcgtcccacggaactgctgtcaaacccccagttcattgtggatggagctacccgcacagacatctgccagggagcactgggggactgctggctcttggcggccatcgcctccctcactctcaacgacaccctcctgcaccgagtggttccgcacggccagagcttccagaatggctatgccggcatcttccatttccagctgtggcaatttggggagtgggtggacgtggtcgtggatgacctgctgcccatcaaggacgggaagctagtgttcgtgcactctgccgaaggcaacgagttctggagcgccctgcttgagaaggcctatgccaaggtaaatggcagctacgaggccctgtcagggggcagcacctcagagggctttgaggacttcacaggcggggttaccgagtggtacgagttgcgcaaggctcccagtgacctctaccagatcatcctcaaggcgctggagcggggctccctgctgggctgctccatagacatctccagcgttctagacatggaggccatcactttcaagaagttggtgaagggccatgcctactctgtgaccggggccaagcaggtgaactaccgaggccaggtggtgagcctgatccggatgcggaacccctggggcgaggtggagtggacgggagcctggagcgacagctcctcagagtggaacaacgtggacccatatgaacgggaccagctccgggtcaagatggaggacggggagttctggatgtcattccgagacttcatgcgggagttcacccgcctggagatctgcaacctcacacccgacgccctcaagagccggaccatccgcaaatggaacaccacactctacgaaggcacctggcggcgggggagcaccgcggggggctgccgaaactacccagccaccttctgggtgaaccctcagttcaagatccggctggatgagacggatgacccggacgactacggggaccgcgagtcaggctgcagcttcgtgctcgcccttatgcagaagcaccgtcgccgcgagcgccgcttcggccgcgacatggagactattggcttcgcggtctacgaggtccctccggagctggtgggccagccggccgtacacttgaagcgtgacttcttcctggccaatgcgtctcgggcgcgctcagagcagttcatcaacctgcgagaggtcagcacccgcttccgcctgccacccggggagtatgtggtggtgccctccaccttcgagcccaacaaggagggcgacttcgtgctgcgcttcttctcagagaagagtgctgggactgtggagctggatgaccagatccaggccaatctccccgatgagcaagtgctctcagaagaggagattgacgagaacttcaaggccctcttcaggcagctggcaggggaggacatggagatcagcgtgaaggagttgcggacaatcctcaataggatcatcagcaaacacaaagacctgcggaccaagggcttcagcctagagtcgtgccgcagcatggtgaacctcatggatcgtgatggcaatgggaagctgggcctggtggagttcaacatcctgtggaaccgcatccggaattacctgtccatcttccggaagtttgacctggacaagtcgggcagcatgagtgcctacgagatgcggatggccattgagtcggcaggcttcaagctcaacaagaagctgtacgagctcatcatcacccgctactcggagcccgacctggcggtcgactttgacaatttcgtttgctgcctggtgcggctagagaccatgttccgatttttcaaaactctggacacagatctggatggagttgtgacctttgacttgtttaagtggttgcagctgaccatgtttgcatgaggcagggactcggtcccccttgccgtgctcccctccctcctcgtctgccaagcctcgcctcctaccacaccacaccaggccaccccagctgcaagtgccttccttggagcagagaggcagcctcgtcctcctgtcccctctcctcccagccaccatcgttcatctgctccgggcagaactgtgtggcccctgcctgtgccagccatgggctcgggatggactccctgggccccacccattgccaagccaggaaggcagctttcgcttgttcctgcctcgggacagccccgggtttccccagcatcctgatgtgtcccctctccccacttcagaggccacccactcagcaccaccggcctggccttgcctgcagactataaactataaccactagctcgacacagtctgcagtccaggcgtgtggagccgcctcccggctcggggaggccccggggctgggaacgcctgtgccttcctgcgccgaagccaacgccccctctgtccttccctggccctgctgccgaccaggagctgcccagcctgtgggcggtcggccttccctccttcgctccttttttatattagtgattttaaaggggactcttcagggacttgtgtactggttatgggggtgccagaggcactaggcttggggtggggaggtcccgtgttccatatagaggaaccccaaataataaaaggccccacatctgtctgtga

SEQ ID NO: 342602 - DNA, 573 bp, Artificial Sequence
  derived and/or modified sequence
cctgacaatgggatccgggaaaggagaggtggccggcacgcctgggaactgggaaatccctttcctggattcactgggagcaccgggaggtggctgagaaccctacttctgtgaggggagcagtgaggatgtcggaggagatcatcacgccggtgtactgcactggggtgtcagcccaagtgcagaagcagcgggccagggagctgggcctgggccgccatgagaatgccatcaagtacctgggccaggattatgagcagctgcgggtgcgatgcctgcagagtgggaccctcttccgtgatgaggccttccccccggtaccccagagcctgggttacaaggacctgggtcccaattcctccaagacctatggcatcaagtggaagcgtcccacggaactgctgtcaaacccccagttcattgtggatggagctacccgcacagacatctgccagggagcactgggggactgctggctcttggcggccatcgcctccctcactctcaacgacaccctcctgcaccgagtggttccgcacggccagagcttccagaatggctatgccggcatct

SEQ ID NO: 342603 - DNA, 581 bp, Artificial Sequence
  derived and/or modified sequence
gttgggccctgccctgagctgccaccgggaagccagcctcagggactgcagcgacccccaaacacccctcccccagttccttgtgctgtctggaggctccgccctgccccacctgacctgctggctcactacagagctgcaagcccctgacaatgggatccgggaaaggagaggatgtcggaggagatcatcacgccggtgtactgcactggggtgtcagcccaagtgcagaagcagcgggccagggagctgggcctgggccgccatgagaatgccatcaagtacctgggccaggattatgagcagctgcgggtgcgatgcctgcagagtgggaccctcttccgtgatgaggccttccccccggtaccccagagcctgggttacaaggacctgggtcccaattcctccaagacctatggcatcaagtggaagcgtcccacggaactgctgtcaaacccccagttcattgtggatggagctacccgcacagacatctgccagggagcactgggggactgctggctcttggcggccatcgcctccctcactctcaacgacaccctcctgcaccgagtggttcc

SEQ ID NO: 342604 - DNA, 1983 bp, Artificial Sequence
  derived and/or modified sequence
atgagaatgcccagcagcacctgggccagaatcatgagcagctgcggctgcgacgcctgcagagtgggccccagcagcgtgatgagacccagccccagataccccagagcctgggtgaccagaacctgggtgcccatcccccccagacccatggccagcagcggcagcgtgcccagagactgctggctgctggccgccatcgccagcctgaccctgaacgacaccctgctgcacagagtggtgccccacggccagagcttccagaacggctacgccggcatcttccacttccagctgtggcagttcggcgagtgggtggacgtggtggtggacgacctgctgcccatcaaggacggcaagctggtgttcgtgcacagcgccgagggcaacgagttctggagcgccctgctggagaaggcctacgccaaggtgaacggcagctacgaggccctgagcggcggcagcaccagcgagggcttcgaggacttcaccggcggcgtgaccgagtggtacgagctgagaaaggcccccagcgacctgtaccagatcatcctgaaggccctggagagaggcagcctgctgggctgcagcatcgacatcagcagcgtgctggacatggaggccatcaccttcaagaagctggtgaagggccacgcctacagcgtgaccggcgccaagcaggtgaactacagaggccaggtggtgagcctgatcagaatgagaaacccctggggcgaggtggagtggaccggcgcctggagcgacagcagcagcgagtggaacaacgtggacccctacgagagagaccagctgagagtgaagatggaggacggcgagttctggatgagcttcagagacttcatgagagagttcaccagactggagatctgcaacctgacccccgacgccctgaagagcagaaccatcagaaagtggaacaccaccctgtacgagggcacctggagaagaggcagcaccgccggcggctgcagaaactaccccgccaccttctgggtgaacccccagttcaagatcagactggacgagaccgacgaccccgacgactacggcgacagagagagcggctgcagcttcgtgctggccctgatgcagaagcacagaagaagagagagaagattcggcagagacatggagaccatcggcttcgccgtgtacgaggtgccccccgagctggtgggccagcccgccgtgcacctgaagagagacttcttcctggccaacgccagcagagccagaagcgagcagttcatcaacctgagagaggtgagcaccagattcagactgccccccggcgagtacgtggtggtgcccagcaccttcgagcccaacaaggagggcgacttcgtgctgagattcttcagcgagaagagcgccggcaccgtggagctggacgaccagatccaggccaacctgcccgacgagcaggtgctgagcgaggaggagatcgacgagaacttcaaggccctgttcagacagctggccggcgaggacatggagatcagcgtgaaggagctgagaaccatcctgaacagaatcatcagcaagcacaaggacctgagaaccaagggcttcagcctggagagctgcagaagcatggtgaacctgatggacagagacggcaacggcaagctgggcctggtggagttcaacatcctgtggaacagaatcagaaactacctgagcatcttcagaaagttcgacctggacaagagcggcagcatgagcgcctacgagatgagaatggccatcgagagcgccggcttcaagctgaacaagaagctgtacgagctgatcatcaccagatacagcgagcccgacctggccgtggacttcgacaacttcgtgtgctgcctggtgagactggagaccatgttcagattcttcaagaccctggacaccgacctggacggcgtggtgaccttcgacctgttcaagtggctgcagctgaccatgttcgcctag

SEQ ID NO: 342605 - DNA, 2145 bp, Artificial Sequence
  derived and/or modified sequence
atgagcgaggagatcatcacccccgtgtactgcaccggcgtgagcgcccaggtgcagaagcagagagccagagagctgggcctgggcagacacgagaacgccatcaagtacctgggccaggactacgagcagctgagagtgagatgcctgcagagcggcaccctgttcagagacgaggccttcccccccgtgccccagagcctgggctacaaggacctgggccccaacagcagcaagacctacggcatcaagtggaagagacccaccgagctgctgagcaacccccagttcatcgtggacggcgccaccagaaccgacatctgccagggcgccctgggcgactgctggctgctggccgccatcgccagcctgaccctgaacgacaccctgctgcacagagtggtgccccacggccagagcttccagaacggctacgccggcatcttccacttccagctgtggcagttcggcgagtgggtggacgtggtggtggacgacctgctgcccatcaaggacggcaagctggtgttcgtgcacagcgccgagggcaacgagttctggagcgccctgctggagaaggcctacgccaaggtgaacggcagctacgaggccctgagcggcggcagcaccagcgagggcttcgaggacttcaccggcggcgtgaccgagtggtacgagctgagaaaggcccccagcgacctgtaccagatcatcctgaaggccctggagagaggcagcctgctgggctgcagcatcgacatcagcagcgtgctggacatggaggccatcaccttcaagaagctggtgaagggccacgcctacagcgtgaccggcgccaagcaggtgaactacagaggccaggtggtgagcctgatcagaatgagaaacccctggggcgaggtggagtggaccggcgcctggagcgacagcagcagcgagtggaacaacgtggacccctacgagagagaccagctgagagtgaagatggaggacggcgagttctggatgagcttcagagacttcatgagagagttcaccagactggagatctgcaacctgacccccgacgccctgaagagcagaaccatcagaaagtggaacaccaccctgtacgagggcacctggagaagaggcagcaccgccggcggctgcagaaactaccccgccaccttctgggtgaacccccagttcaagatcagactggacgagaccgacgaccccgacgactacggcgacagagagagcggctgcagcttcgtgctggccctgatgcagaagcacagaagaagagagagaagattcggcagagacatggagaccatcggcttcgccgtgtacgaggtgccccccgagctggtgggccagcccgccgtgcacctgaagagagacttcttcctggccaacgccagcagagccagaagcgagcagttcatcaacctgagagaggtgagcaccagattcagactgccccccggcgagtacgtggtggtgcccagcaccttcgagcccaacaaggagggcgacttcgtgctgagattcttcagcgagaagagcgccggcaccgtggagctggacgaccagatccaggccaacctgcccgacgagcaggtgctgagcgaggaggagatcgacgagaacttcaaggccctgttcagacagctggccggcgaggacatggagatcagcgtgaaggagctgagaaccatcctgaacagaatcatcagcaagcacaaggacctgagaaccaagggcttcagcctggagagctgcagaagcatggtgaacctgatggacagagacggcaacggcaagctgggcctggtggagttcaacatcctgtggaacagaatcagaaactacctgagcatcttcagaaagttcgacctggacaagagcggcagcatgagcgcctacgagatgagaatggccatcgagagcgccggcttcaagctgaacaagaagctgtacgagctgatcatcaccagatacagcgagcccgacctggccgtggacttcgacaacttcgtgtgctgcctggtgagactggagaccatgttcagattcttcaagaccctggacaccgacctggacggcgtggtgaccttcgacctgttcaagtggctgcagctgaccatgttcgcctag

SEQ ID NO: 342606 - DNA, 489 bp, Artificial Sequence
  derived and/or modified sequence
atgagcgaggagatcatcacccccgtgtactgcaccggcgtgagcgcccaggtgcagaagcagagagccagagagctgggcctgggcagacacgagaacgccatcaagtacctgggccaggactacgagcagctgagagtgagatgcctgcagagcggcaccctgttcagagacgaggccttcccccccgtgccccagagcctgggctacaaggacctgggccccaacagcagcaagacctacggcatcaagtggaagagacccaccgagctgctgagcaacccccagttcatcgtggacggcgccaccagaaccgacatctgccagggcgccctgggcgactgctggctgctggccgccatcgccagcctgaccctgaacgacaccctgctgcacagagtggtgccccacggccagagcttccagaacggctacgccggcatcttccacttccagctgtggcagttcggcgagtgggtggacgtgtag

SEQ ID NO: 342607 - DNA, 459 bp, Artificial Sequence
  derived and/or modified sequence
atgagcgaggagatcatcacccccgtgtactgcaccggcgtgagcgcccaggtgcagaagcagagagccagagagctgggcctgggcagacacgagaacgccatcaagtacctgggccaggactacgagcagctgagagtgagatgcctgcagagcggcaccctgttcagagacgaggccttcccccccgtgccccagagcctgggctacaaggacctgggccccaacagcagcaagacctacggcatcaagtggaagagacccaccgagctgctgagcaacccccagttcatcgtggacggcgccaccagaaccgacatctgccagggcgccctgggcgactgctggctgctggccgccatcgccagcctgaccctgaacgacaccctgctgcacagagtggtgccccacggccagagcttccagaacggctacgccggcatcttccacttccagtag

SEQ ID NO: 342608 - DNA, 492 bp, Artificial Sequence
  derived and/or modified sequence
atgagcgaggagatcatcacccccgtgtactgcaccggcgtgagcgcccaggtgcagaagcagagagccagagagctgggcctgggcagacacgagaacgccatcaagtacctgggccaggactacgagcagctgagagtgagatgcctgcagagcggcaccctgttcagagacgaggccttcccccccgtgccccagagcctgggctacaaggacctgggccccaacagcagcaagacctacggcatcaagtggaagagacccaccgagctgctgagcaacccccagttcatcgtggacggcgccaccagaaccgacatctgccagggcgccctgggcgactgctggctgctggccgccatcgccagcctgaccctgaacgacaccctgctgcacagagtggtgccccacggccagagcttccagaacggctacgccggcatcttccacttccagctgtggcagttcggcgagtgggtggacgtggtgtag

SEQ ID NO: 342609 - DNA, 576 bp, Artificial Sequence
  derived and/or modified sequence
atgagcgaggagatcatcacccccgtgtactgcaccggcgtgagcgcccaggtgcagaagcagagagccagagagctgggcctgggcagacacgagaacgccatcaagtacctgggccaggactacgagcagctgagagtgagatgcctgcagagcggcaccctgttcagagacgaggccttcccccccgtgccccagagcctgggctacaaggacctgggccccaacagcagcaagacctacggcatcaagtggaagagacccaccgagctgctgagcaacccccagttcatcgtggacggcgccaccagaaccgacatctgccagggcgccctgggcgactgctggctgctggccgccatcgccagcctgaccctgaacgacaccctgctgcacagagtggtgccccacggccagagcttccagaacggctacgccggcatcttccacttccagctgtggcagttcggcgagtgggtggacgtggtggtggacgacctgctgcccatcaaggacggcaagctggtgttcgtgcacagcgccgagggcaacgagttctggagcgccctgctgtag

SEQ ID NO: 342610 - DNA, 513 bp, Artificial Sequence
  derived and/or modified sequence
atgagcgaggagatcatcacccccgtgtactgcaccggcgtgagcgcccaggtgcagaagcagagagccagagagctgggcctgggcagacacgagaacgccatcaagtacctgggccaggactacgagcagctgagagtgagatgcctgcagagcggcaccctgttcagagacgaggccttcccccccgtgccccagagcctgggctacaaggacctgggccccaacagcagcaagacctacggcatcaagtggaagagacccaccgagctgctgagcaacccccagttcatcgtggacggcgccaccagaaccgacatctgccagggcgccctgggcgactgctggctgctggccgccatcgccagcctgaccctgaacgacaccctgctgcacagagtggtgccccacggccagagcttccagaacggctacgccggcatcttccacttccagctgtggcagttcggcgagtgggtggacgtggtggtggacgacctgctgcccatctag

SEQ ID NO: 342611 - DNA, 369 bp, Artificial Sequence
  derived and/or modified sequence
atgagcgaggagatcatcacccccgtgtactgcaccggcgtgagcgcccaggtgcagaagcagagagccagagagctgggcctgggcagacacgagaacgccatcaagtacctgggccaggactacgagcagctgagagtgagatgcctgcagagcggcaccctgttcagagacgaggccttcccccccgtgccccagagcctgggctacaaggacctgggccccaacagcagcaagacctacggcatcaagtggaagagacccaccgagctgctgagcaacccccagttcatcgtggacggcgccaccagaaccgacatctgccagggcgccctgggcgactgctggctgctggccgccatcgcctag

SEQ ID NO: 342612 - DNA, 192 bp, Artificial Sequence
  derived and/or modified sequence
atgagcgaggagatcatcacccccgtgtactgcaccggcgtgagcgcccaggtgcagaagcagagagccagagagctgggcctgggcagacacgagaacgccatcaagtacctgggccaggactacgagcagctgagagtgagatgcctgcagagcggcaccctgttcagagacgaggccttccccccctag

SEQ ID NO: 342613 - DNA, 447 bp, Artificial Sequence
  derived and/or modified sequence
atgagcgaggagatcatcacccccgtgtactgcaccggcgtgagcgcccaggtgcagaagcagagagccagagagctgggcctgggcagacacgagaacgccatcaagtacctgggccaggactacgagcagctgagagtgagatgcctgcagagcggcaccctgttcagagacgaggccttcccccccgtgccccagagcctgggctacaaggacctgggccccaacagcagcaagacctacggcatcaagtggaagagacccaccgagctgctgagcaacccccagttcatcgtggacggcgccaccagaaccgacatctgccagggcgccctgggcgactgctggctgctggccgccatcgccagcctgaccctgaacgacaccctgctgcacagagtggtgccccacggccagagcttccagaacggctacgccggcatctag

SEQ ID NO: 342614 - DNA, 411 bp, Artificial Sequence
  derived and/or modified sequence
atgagcgaggagatcatcacccccgtgtactgcaccggcgtgagcgcccaggtgcagaagcagagagccagagagctgggcctgggcagacacgagaacgccatcaagtacctgggccaggactacgagcagctgagagtgagatgcctgcagagcggcaccctgttcagagacgaggccttcccccccgtgccccagagcctgggctacaaggacctgggccccaacagcagcaagacctacggcatcaagtggaagagacccaccgagctgctgagcaacccccagttcatcgtggacggcgccaccagaaccgacatctgccagggcgccctgggcgactgctggctgctggccgccatcgccagcctgaccctgaacgacaccctgctgcacagagtggtgccctag

SEQ ID NO: 342615 - protein, 667 aa, Artificial Sequence
  derived and/or modified sequence
MAGMKTASGDYIDSSWELRVFVGEEDPEAESVTLRVTGESHIGGVLLKIVEQINRKQDWSDHAIWWEQKRQWLLQTHWTLDKYGILADARLFFGPQHRPVILRLPNRRALRLRASFSQPLFQAVAAICRLLSIRHPEELSLLRAPEKKEKKKKEKEPEEELYDLSKVVLAGGVAPALFRGMPAHFSDSAQTEACYHMLSRPQPPPDPLLLQRLPRPSSLSDKTQLHSRWLDSSRCLMQQGIKAGDALWLRFKYYSFFDLDPKTDPVRLTQLYEQARWDLLLEEIDCTEEEMMVFAALQYHINKLSQSGEVGEPAGTDPGLDDLDVALSNLEVKLEGSAPTDVLDSLTTIPELKDHLRIFRIPRRPRKLTLKGYRQHWVVFKETTLSYYKSQDEAPGDPIQQLNLKGCEVVPDVNVSGQKFCIKLLVPSPEGMSEIYLRCQDEQQYARWMAGCRLASKGRTMADSSYTSEVQAILAFLSLQRTGSGGPGNHPHGPDASAEGLNPYGLVAPRFQRKFKAKQLTPRILEAHQNVAQLSLAEAQLRFIQAWQSLPDFGISYVMVRFKGSRKDEILGIANNRLIRIDLAVGDVVKTWRFSNMRQWNVNWDIRQVAIEFDEHINVAFSCVSASCRIVHEYIGGYIFLSTRERARGEELDEDLFLQLTGGHEAF

SEQ ID NO: 342616 - DNA, 2489 bp, Artificial Sequence
  derived and/or modified sequence
gagaaaggagggcaggaagcccacggcccacaggggtgtagcccgagacccacctgcagcccccagcccttgccaggaaagcagcagccgcagccatggcggggatgaagacagcctccggggactacatcgactcgtcatgggagctgcgggtgtttgtgggagaggaggacccagaggccgagtcggtcaccctgcgggtcactggggagtcgcacatcggcggggtgctcctgaagattgtggagcagatcaatcgcaagcaggactggtcagaccatgctatttggtgggaacagaagaggcagtggctgctgcagacccactggacactggacaagtacgggatcctggccgacgcacgcctcttctttgggccccagcaccggcccgtcatccttcggttgcccaaccgccgcgcactgcgcctccgtgccagcttctcccagcccctcttccaggctgtggctgccatctgccgcctcctcagcatccggcaccccgaggagctgtccctgctccgggctcctgagaagaaggagaagaagaagaaagagaaggagccagaggaagagctctatgacttgagcaaggttgtcttggctgggggcgtggcacctgcactgttccgggggatgccagctcacttctcggacagcgcccagactgaggcctgctaccacatgctgagccggccccagccgccacccgaccccctcctgctccagcgtctgccacggcccagctccctgtcagacaagacccagctccacagcaggtggctggactcgtcgcggtgtctcatgcagcagggcatcaaggccggggacgcactctggctgcgcttcaagtactacagcttcttcgatttggatcccaagacagaccccgtgcggctgacacagctgtatgagcaggcccggtgggacctgctgctggaggagattgactgcaccgaggaggagatgatggtgtttgccgccctgcagtaccacatcaacaagctgtcccagagcggggaggtgggggagccggctggcacagacccagggctggacgacctggatgtggccctgagcaacctggaggtgaagctggaggggtcggcgcccacagatgtgctggacagcctcaccaccatcccagagctcaaggaccatctccgaatctttcgcatcccacgaaggccccggaagctgaccctgaagggctaccgccaacactgggtggtgttcaaggagaccacactgtcctactacaagagccaggacgaggcccctggggaccccattcagcagctcaacctcaagggctgtgaggtggttcccgatgttaacgtctccggccagaagttctgcattaaactcctagtgccctcccctgagggcatgagtgagatctacctgcggtgccaggatgagcagcagtatgcccgctggatggctggctgccgcctggcctccaaaggccgcaccatggccgacagcagctacaccagcgaggtgcaggccatcctggccttcctcagcctgcagcgcacgggcagtgggggcccgggcaaccacccccacggccctgatgcctctgccgagggcctcaacccctacggcctcgttgccccccgtttccagcgaaagttcaaggccaagcagctcaccccacggatcctggaagcccaccagaatgtggcccagttgtcgctggcagaggcccagctgcgcttcatccaggcctggcagtccctgcccgacttcggcatctcctatgtcatggtcaggttcaagggcagcaggaaagacgagatcctgggcatcgccaacaaccgactgatccgcatcgacttggccgtgggcgacgtggtcaagacctggcgtttcagcaacatgcgccagtggaatgtcaactgggacatccggcaggtggccatcgagtttgatgaacacatcaatgtggccttcagctgcgtgtctgccagctgccgaattgtacacgagtatatcgggggctacattttcctgtcgacgcgggagcgggcccgtggggaggagctggatgaagacctcttcctgcagctcaccgggggccatgaggccttctgagggctgtctgattgcccctgccctgctcaccaccctgtcacagccactcccaagcccacacccacaggggctcactgccccacacccgctccaggcaggcacccagctgggcatttcacctgctgtcactgactttgtgcaggccaaggacctggcagggccagacgctgtaccatcacccaggccagggatgggggtgggggtccctgagctcatgtggtgccccctttccttgtctgagtggctgaggctgatacccctgacctatctgcagtcccccagcacacaaggaagaccagatgtagctacaggatgatgaaacatggtttcaaacgagttctttcttgttactttttaaaatttcttttttataaattaatattttattgt

SEQ ID NO: 342617 - DNA, 2004 bp, Artificial Sequence
  derived and/or modified sequence
atggcgggaatgaaaaccgctagcggcgactatattgactcaagctgggagctgagagtattcgttggcgaggaagaccccgaggccgagagtgtgacactgagagtcaccggagagtcacacatcggaggggtgctgctgaagatcgtcgaacaaatcaataggaagcaggattggagtgaccacgccatttggtgggagcaaaagagacaatggctgttacagactcactggacactggacaagtatggaatccttgctgacgctcggctcttctttggcccccagcaccggcctgtgatcctgagactgcctaatcggcgcgccctcaggctaagagcatcattttcccagccattgttccaggcagttgcagctatctgccggctcctgtcaattcgacatcccgaagagctgagcctattaagagcccccgaaaagaaagaaaagaaaaagaaggaaaaagagccagaagaagagttgtacgacttgtcaaaagtcgtgctggctggcggagtggctcccgccttatttcggggcatgccagcgcacttttccgactctgcgcagactgaggcctgttaccacatgctatcccgcccccaacctccgccagacccactcttgctccagaggctgcctcgccccagctcattgtccgataaaacacagcttcatagcagatggcttgatagctctagatgtttgatgcaacagggaattaaggccggagatgcactttggctcagatttaaatactacagtttctttgatctggatcccaagacagaccctgtgcggctgacacagttatacgaacaagcccgatgggatctactcctggaggagatcgattgcactgaggaagaaatgatggtgtttgccgcactgcaatatcatataaataagctgagccagtcaggggaagttggggagcccgcaggcaccgatccaggtttggacgaccttgacgtagctctctcaaacttagaagtaaaactggaaggatccgctccaacagatgtcctagacagtctgaccaccatccctgagctaaaggaccacctgcgtatatttagaattcccagaagaccacgtaaactgaccctaaaggggtaccggcagcattgggtggtttttaaggagactacactgagttactataaatcacaggatgaggctcctggagaccccatccagcagcttaacctcaaggggtgtgaggtggtacccgacgtaaacgtgtcaggtcagaagttctgcattaaacttcttgtgccttccccagaaggtatgtcagaaatctacttgaggtgtcaggacgagcagcagtatgccagatggatggccgggtgcagactggcttcaaagggtaggactatggcggattcatcttacacttcggaggtccaggccattctggcttttttgtcgttacaaaggactggaagcgggggacctgggaatcaccctcacggcccagacgcgtctgcggagggtcttaatccttatggacttgtcgcccctaggttccagcgaaagtttaaagctaaacagctgacacctcgtattctcgaagcccatcaaaacgtcgcacagttgtccctggccgaagcgcagttgaggttcattcaggcttggcagtcccttccagattttggcatatcttatgtgatggtccgcttcaaaggttctcgtaaagacgagattctggggattgccaacaaccgtctcattcggatcgacctggccgtgggtgatgttgtgaagacttggcgcttcagcaacatgcgacagtggaatgtgaattgggacattaggcaggtcgccatcgagttcgatgagcatattaatgtcgctttcagttgtgtctctgctagctgtagaatagttcacgagtacattggaggctatatctttctgtccactagagagagggcccgcggggaagaactggatgaggacctgttcctccaacttacaggcgggcatgaagctttctag

SEQ ID NO: 342618 - DNA, 2004 bp, Artificial Sequence
  derived and/or modified sequence
atggccggcatgaagacagccagcggggactacatcgacagctcctgggagctgcgggtgtttgtgggggaggaggaccctgaggccgagagcgtgaccctgcgggtgactggagagagccacatcggcggcgtgctgctgaagatcgtggagcagatcaacaggaagcaggactggagcgaccacgccatctggtgggagcagaagaggcagtggctgctgcagacccactggaccctggacaagtatggcatcctggctgatgcccggctcttcttcggcccccagcacaggcctgtgatcctgcggctgcccaacagaagagccctgcggctgcgggccagcttcagccagcccctcttccaggccgtggccgccatctgccgcctgctgagcatccgccaccctgaggagctgagcctgctgcgggcccctgagaagaaggagaagaagaagaaggagaaggagcctgaggaggagctgtatgacctgagcaaggtggtgctggccggcggcgtggccccagccctcttccggggcatgcctgcccacttcagtgacagcgcccagacagaggcctgctaccacatgctgagccggccccagcccccaccagaccccctgctgctgcagaggctgccccggcccagcagcctgagtgacaagacccagctgcacagccgctggctggacagcagccgctgcctgatgcagcagggcatcaaggctggagatgccctgtggctgcgcttcaagtactacagcttctttgacctggaccccaagacagatcctgtgcggctgacccagctgtatgagcaggcccgctgggacctgctgctggaggagattgactgcacagaggaggagatgatggtgtttgctgccctgcagtaccacatcaacaagctgagccagagcggggaggtgggggagcccgccggcacagaccccggcctggatgacctggatgtggccctgagcaacctggaggtgaagctggagggcagcgcccccacagatgtgctggacagcctgaccaccatccctgagctgaaggaccacctgcgcatcttccgcatcccccggcggcccaggaagctgaccctgaagggctaccggcagcactgggtggtgttcaaggagaccaccctgagctactacaagagccaggatgaggcccctggggaccccatccagcagctgaacctgaagggctgtgaggtggtgcctgatgtgaatgtgtctggccagaagttctgcatcaagctgctggtgcccagccctgagggcatgtctgagatctacctgcgctgccaggatgagcagcagtatgcccgctggatggccggctgccgcctggccagcaaaggaagaaccatggctgacagcagctacaccagcgaggtgcaggccatcctggccttcctgagcctgcagaggacaggcagcggcggccctggcaaccacccccacggcccagatgccagcgctgagggcctgaacccctacggcctggtggccccccgcttccagaggaagttcaaggccaagcagctgaccccccgcatcctggaggcccaccagaatgtggcccagctgagcctggccgaggcccagctgcgcttcatccaggcctggcagagcctgcctgactttggcatctcctatgtgatggtgcgcttcaagggcagcaggaaggatgagatcctgggcatcgccaacaacagactcatcagaattgacctggccgtgggagatgtggtgaagacctggaggttcagcaacatgaggcagtggaatgtgaactgggacatccggcaggtggccattgaatttgatgagcacatcaacgtggccttcagctgtgtgtctgccagctgccgcatcgtgcatgagtacatcggcggctacatcttcctgagcacccgggagcgggcccggggggaggagctggatgaggacctcttcctgcagctgactggaggccacgaggccttctag

SEQ ID NO: 342619 - DNA, 2004 bp, Artificial Sequence
  derived and/or modified sequence
atggccggcatgaagaccgccagcggcgactacatcgacagcagctgggagctgcgtgtcttcgtcggtgaggaggacccagaggcagagtccgttacactccgcgtgacaggagagagtcacattggcggggttttactgaagatcgtggagcagatcaatagaaagcaggattggtcagaccatgctatttggtgggagcaaaaacggcagtggctactgcagacacactggaccttggataaatatgggatcctggccgatgcccggctgttcttcggcccccagcatcgcccagtcatcctgaggttgccgaacagacgggctctcaggctgcgggcttcgttctcacagcctctgttccaggctgtagctgccatctgtagactcctatcaataagacaccccgaggaactttcacttctcagggcccccgagaagaaggagaaaaagaagaaagaaaaagaacctgaagaagagctttacgacctctcaaaggtggttctcgccggcggcgtggcgccagctctgtttagggggatgccggcccatttctcggactctgcccaaacagaagcatgctaccatatgttatcccgaccacaaccgccccccgacccattgctgctgcagaggctccctcgcccttcatctctctccgataagacacagttgcattccaggtggctcgattcaagtagatgcctaatgcagcaggggatcaaagctggggacgcactgtggttaagatttaagtactattcttttttcgacctcgatccaaaaaccgaccctgtgcggctaacccagctgtacgagcaggcacggtgggatctgctcttggaggagattgattgcaccgaggaggagatgatggtctttgctgccctgcagtaccacattaacaaactgagccagagcggggaagttggagagcccgccggcaccgatccaggcctcgatgatttagacgtcgccctctcaaacctggaggttaaactggagggcagcgcccctaccgatgtcctagatagcctcacaaccatacctgagctgaaagaccatctaagaattttcagaatcccaagacgcccacgtaaactgaccctgaagggctatcggcagcattgggtcgtgttcaaagagacaactctgtcctactacaagtcacaggatgaagcccctggtgatccaatacagcaactcaatctgaaggggtgtgaggtggtgccggacgtaaatgtcagcggccagaagttctgtatcaagctgttggttccatcacccgaaggcatgagcgaaatctatctgaggtgtcaggacgagcagcaatacgcgaggtggatggctggctgccggttggccagtaaagggcgcaccatggcagatagcagctacacttcggaggtccaggcaatactggcattcctctccctccaaaggactgggtccggcgggcccggcaatcatccacatggcccagatgcttctgccgaaggcctgaatccctacggcttggtcgcccctagattccagaggaagttcaaagctaaacaactgactccccggattctggaggctcatcagaatgtggcccagctttcgctggccgaagcccaactcagattcattcaggcatggcaaagtcttcccgactttggaataagctacgtcatggtaagattcaagggtagcagaaaagacgagattttgggtatagccaacaaccgacttataaggatagatttagctgtgggagatgtagtaaagacctggcggttcagtaatatgcgtcagtggaatgtcaactgggacatcagacaggtggctattgagttcgatgagcacattaatgtggccttctcttgcgtgagtgctagctgcagaatagttcacgagtatataggaggatatattttcctgagcacgagagagcgagccaggggggaggagctcgatgaggacttgtttctccagcttactggaggccatgaagctttctag

SEQ ID NO: 342620 - DNA, 2004 bp, Artificial Sequence
  derived and/or modified sequence
atggccggtatgaagacggcctcaggagactacatcgactctagttgggagctcagggtgttcgttggggaggaagaccccgaggcagagtcagtgacgttgagagtgactggggagtcccacattggcggtgttcttctgaaaatcgtggagcagataaatcggaaacaggattggtctgaccatgccatctggtgggagcagaagaggcagtggctgctgcagactcattggacgttggataaatacggaatactggctgatgcacggctgttcttcggacctcagcaccgacctgtcattctgcggctgcccaatcgacgagcacttagactgcgtgcttcattttctcagccgctgtttcaagccgtagcagccatctgtaggctactgtcaatccggcacccagaggaacttagtttgctgcgcgcaccggaaaaaaaagaaaaaaagaagaaagaaaaggagcccgaagaggaactctacgatcttagtaaggtagtgctcgccggaggcgttgcccctgctctgtttcggggaatgcccgcacatttcagtgactccgcccagactgaagcatgttatcacatgctcagccgtcctcagccaccacctgatccactcctgctgcagcgtctgcccaggccttcttcactaagcgataagactcagctgcacagccgctggcttgacagtagcaggtgtctgatgcagcaagggataaaagctggcgatgccctctggctccgcttcaagtactactcgtttttcgacttggacccaaaaactgatcccgttaggcttacgcagctgtacgagcaagctcggtgggatttattactcgaagaaattgactgtacggaggaggaaatgatggtgttcgccgctctgcagtaccacattaataagctgagccaatccggcgaggtcggggagcccgcaggcaccgaccctggtctggatgacttggacgtagccctgagtaatctcgaggttaaattagaaggctccgcaccaaccgacgttcttgacagcctcaccacgatccccgaactgaaagatcacttgcgtatcttcagaattcccagaagacccaggaagttaactttgaaaggctacagacagcactgggtcgtgtttaaggagaccaccctgagttactataagtcccaagacgaggcacccggtgatcccattcagcagctcaatctgaaaggatgcgaagtggtgcccgacgtgaatgtgtctggccagaagttttgcattaaactgctggtgccgagcccagaggggatgagcgagatctacctacgctgccaggatgaacaacaatacgctcgatggatggctggctgtcggttggcgtcgaaagggagaaccatggccgactcctcttataccagtgaggttcaggccattctagcctttctaagtctccagaggaccggctccggaggaccagggaaccacccccacggacctgatgcttccgcggaaggactcaatccttacggcttagtcgctcctaggtttcagagaaagttcaaagcgaaacagcttaccccgagaatcctcgaagcccaccagaatgttgcccaattaagtttggccgaagcacaactccgattcatccaggcgtggcaaagcctgccagacttcggtatatcgtacgttatggtccgcttcaaggggtctcgcaaggacgagatccttggcattgcaaacaatcgactcattcgcatagacttagcagtcggagatgtggtgaagacgtggagattttccaatatgcggcagtggaacgttaattgggatataagacaggtggccattgagttcgacgaacacattaatgttgccttctcatgcgttagcgcatcctgtcgcattgtccacgaatatatcggcggatacatttttttgagcacacgggagagagcccgaggtgaagaactggatgaggatttgtttctgcaactgacaggcggacatgaggccttctag

SEQ ID NO: 342621 - DNA, 2004 bp, Artificial Sequence
  derived and/or modified sequence
atggccggcatgaagaccgccagcggcgactacatcgacagcagctgggagctgagagtgttcgtgggcgaggaggaccccgaggccgagagcgtgaccctgagagtgaccggcgagagccacatcggcggcgtgctgctgaagatcgtggagcagatcaacagaaagcaggactggagcgaccacgccatctggtgggagcagaagagacagtggctgctgcagacccactggaccctggacaagtacggcatcctggccgacgccagactgttcttcggcccccagcacagacccgtgatcctgagactgcccaacagaagagccctgagactgagagccagcttcagccagcccctgttccaggccgtggccgccatctgcagactgctgagcatcagacaccccgaggagctgagcctgctgagagcccccgagaagaaggagaagaagaagaaggagaaggagcccgaggaggagctgtacgacctgagcaaggtggtgctggccggcggcgtggcccccgccctgttcagaggcatgcccgcccacttcagcgacagcgcccagaccgaggcctgctaccacatgctgagcagaccccagcccccccccgaccccctgctgctgcagagactgcccagacccagcagcctgagcgacaagacccagctgcacagcagatggctggacagcagcagatgcctgatgcagcagggcatcaaggccggcgacgccctgtggctgagattcaagtactacagcttcttcgacctggaccccaagaccgaccccgtgagactgacccagctgtacgagcaggccagatgggacctgctgctggaggagatcgactgcaccgaggaggagatgatggtgttcgccgccctgcagtaccacatcaacaagctgagccagagcggcgaggtgggcgagcccgccggcaccgaccccggcctggacgacctggacgtggccctgagcaacctggaggtgaagctggagggcagcgcccccaccgacgtgctggacagcctgaccaccatccccgagctgaaggaccacctgagaatcttcagaatccccagaagacccagaaagctgaccctgaagggctacagacagcactgggtggtgttcaaggagaccaccctgagctactacaagagccaggacgaggcccccggcgaccccatccagcagctgaacctgaagggctgcgaggtggtgcccgacgtgaacgtgagcggccagaagttctgcatcaagctgctggtgcccagccccgagggcatgagcgagatctacctgagatgccaggacgagcagcagtacgccagatggatggccggctgcagactggccagcaagggcagaaccatggccgacagcagctacaccagcgaggtgcaggccatcctggccttcctgagcctgcagagaaccggcagcggcggccccggcaaccacccccacggccccgacgccagcgccgagggcctgaacccctacggcctggtggcccccagattccagagaaagttcaaggccaagcagctgacccccagaatcctggaggcccaccagaacgtggcccagctgagcctggccgaggcccagctgagattcatccaggcctggcagagcctgcccgacttcggcatcagctacgtgatggtgagattcaagggcagcagaaaggacgagatcctgggcatcgccaacaacagactgatcagaatcgacctggccgtgggcgacgtggtgaagacctggagattcagcaacatgagacagtggaacgtgaactgggacatcagacaggtggccatcgagttcgacgagcacatcaacgtggccttcagctgcgtgagcgccagctgcagaatcgtgcacgagtacatcggcggctacatcttcctgagcaccagagagagagccagaggcgaggagctggacgaggacctgttcctgcagctgaccggcggccacgaggccttctag

SEQ ID NO: 342622 - protein, 158 aa, Artificial Sequence
  derived and/or modified sequence
MMCEVMPTISEAEGPPGGGGGHGSGSPSQPDADSHFEQLMVSMLEERDRLLDTLRETQETLALTQGKLHEVGHERDSLQRQLNTALPQEFAALTKELNVCREQLLEREEEIAELKAERNNTRLLLEHLECLVSRHERSLRMTVVKRQAQSPAGVSSEV

SEQ ID NO: 342623 - protein, 99 aa, Artificial Sequence
  derived and/or modified sequence
MMCEVMPTISEAEGPPGGGGGHGSGSPSQPDADSHFEQLMVSMLEERDRLLDTLRETQETLALTQGKLHEVGHERDSLQRQLNTALPQEFAALTKELNV

SEQ ID NO: 342624 - protein, 699 aa, Artificial Sequence
  derived and/or modified sequence
MRLRGASLHHGRPHLGSVPDFRFPMADGHTDSYSTSAVLRRPQKGRLAALRDEPSKVQTLNEQDWERAQQASVLANVAQAFESDADVSDGEDDRDTLLSSVDLLSPSGQADAHTLAMMLQEQLDAINKEIRLIQEEKENTEQRAEEIESRVGSGSLDNLGRFRSMSSIPPYPASSLASSSPPGSGRSTPRRIPHSPAREVDRLGVMTLPSDLRKHRRKLPPSREEVRDDKTTIKCETSPPSSPRALRLDRLHKGALHTVSHEDIRDIRNSTGSQDGPVSNPSSSNSSQDSLHKAPKKKGIKSSIGRLFGKKEKGRPGQTGKEALGQAGVSETDNSSQDALGLSKLGGQAEKNRKLQKKHELLEEARRQGLPFAQWDGPTVVVWLELWVGMPAWYVAACRANVKSGAIMSALSDTEIQREIGISNPLHRLKLRLAIQEIMSLTSPSAPPTSRTTLAYGDMNHEWIGNEWLPSLGLPQYRSYFMECLVDARMLDHLTKKDLRGQLKMVDSFHRNSFQCGIMCLRRLNYDRKELERKREESQSEIKDVLVWSNDRVIRWILSIGLKEYANNLIESGVHGALLALDETFDFSALALLLQIPTQNTQARAVLEREFNNLLVMGTDRRFDEDDDKSFRRAPSWRKKFRPKDIRGLAAGSAETLPANFRVTSSMSSPSMQPKKMQMDGNVSGTQRLDSATVRTYSC

SEQ ID NO: 342625 - DNA, 2100 bp, Artificial Sequence
  derived and/or modified sequence
atgcgcttgcgcggtgcttccttgcaccacgggcggcctcatttgggaagcgtacccgattttaggtttccaatggcagatggtcatactgactcatatagcactagcgcagtgttgcgcaggccccagaagggccgcctagctgctttgcgtgacgagccatcaaaggtgcaaaccttgaacgagcaggattgggagcgcgcccagcaggcctcggttctcgccaatgttgcccaggctttcgagagcgacgcagatgtgtcagacggggaagacgacagggacacactcctctcttccgtggacctgttgtctccttcaggccaggccgatgctcacacattggcgatgatgcttcaagaacagctggatgctattaacaaagaaatcagactgatccaggaagagaaagagaatacagagcagagagcagaagaaattgagtcacgcgtcggcagcggaagtttggataatctggggaggttccgcagcatgtcatccattccaccctaccccgcaagttctcttgcctccagttcccctccagggtctggcagatccactccgaggagaatcccgcactcacccgccagggaagtggaccgcctgggcgttatgacattgccttctgatctgagaaagcaccgccggaagttgccgccctcacgcgaggaggtccgagatgacaagactactatcaagtgtgaaaccagtccaccttcctcgccccgggctctgcggctcgaccggctacacaagggggctttacacacagtgtctcacgaagacatcagggacatcagaaactccacaggctcccaggatggccccgtatccaatccttctagctccaacagcagccaagactccctacataaagcccccaaaaagaaaggaataaaaagctctatcggccgcctgtttgggaaaaaggagaaggggcgccccggacagactggcaaggaggctctgggccaggccggcgtgagcgaaaccgacaacagttcccaggatgccctgggtctatctaagctgggcggacaggccgaaaaaaatcgcaagctgcagaagaagcacgaactactggaggaagcccgccgccagggcctccccttcgctcaatgggacggccctacagtcgtggtctggctggagctctgggtgggaatgcctgcatggtatgtggccgcttgccgtgctaacgttaagtcaggggcgattatgtctgctctgagcgatacagaaatccagagggaaataggtatcagcaacccattgcatcgattaaagctgcgcctcgctatacaggaaatcatgagtctgacatcccccagcgccccccctacatccagaaccactctcgcctatggcgacatgaatcacgaatggatcggcaacgaatggttaccaagccttggcctcccacagtatcgttcttactttatggagtgcctggtggacgcccgtatgctagatcaccttaccaaaaaagatctgagggggcagctcaagatggtggatagtttccacaggaattctttccagtgtggcattatgtgccttcgcagactgaactacgacagaaaggagctggagcgaaagcgcgaggagagtcagagtgagattaaagatgtccttgtgtggtcaaacgatcgcgtgatcagatggatcttatctatcggactgaaggaatacgccaacaatcttatcgagtcaggagtgcacggggccctgctagctctggatgaaacattcgactttagtgcgctggcactcctcctccagattcctactcagaacacacaggctagagccgtgctcgaacgtgaattcaacaatctcctcgttatgggcacagaccgaaggtttgatgaagacgacgacaagagttttaggcgcgccccaagttggcggaagaagttcaggccaaaggacatccgtgggcttgctgcggggtccgctgagactctcccagccaatttccgcgtcacgtcttccatgtcctctccttctatgcagcccaaaaagatgcagatggatgggaacgtatcaggcacacagcgactagactctgccacagtgcggacctacagttgctag

SEQ ID NO: 342626 - DNA, 2100 bp, Artificial Sequence
  derived and/or modified sequence
atgaggctgcggggggccagcctgcaccacggccggccccacctgggctctgtgcctgacttccgcttccccatggctgatggccacacagacagctacagcaccagcgctgtgctgcggcggccccagaagggccgcctggccgccctgagagatgagcccagcaaggtgcagaccctgaatgagcaggactgggagcgggcccagcaggcctctgtgctggccaacgtggcccaggcctttgaaagtgatgctgatgtgtctgatggagaagatgaccgggacaccctgctgagctctgtggacctgctgagccccagcggccaggctgatgcccacaccctggccatgatgctgcaggagcagctggatgccatcaacaaggagatccgcctcatccaggaggagaaggagaacacagagcagagagctgaggagattgagagccgggtgggcagcggcagcctggacaacctgggccgcttccgctccatgagcagcatccccccctacccagccagcagcctggccagcagcagccccccaggcagcggccgcagcaccccccggcgcatcccccacagccctgcccgggaggtggaccggctgggcgtgatgaccctgcccagcgacctgaggaagcacaggaggaagctgccccccagccgggaggaggtgagagatgacaagaccaccatcaagtgtgagaccagcccccccagcagcccccgggccctgcggctggaccggctgcacaagggggccctgcacacagtgtcccatgaggacatccgggacatccggaacagcacaggcagccaggacggccctgtgagcaaccccagcagcagcaacagcagccaggacagcctgcacaaggcccccaagaagaagggcatcaagagcagcatcggccgcctgtttgggaagaaggagaagggccggcccggccagacaggcaaggaggccctgggccaggccggcgtgtctgaaacagacaacagcagccaggatgccctgggcctgagcaagctgggcggccaggccgagaagaacaggaagctgcagaagaagcatgagctgctggaggaggcccggcggcagggcctgccctttgcccagtgggatggccccaccgtggtggtgtggctggagctgtgggtgggcatgcctgcctggtacgtggccgcctgccgggccaacgtgaagagcggggccatcatgtctgccctgagtgacacagagatccagcgggagatcggcatcagcaaccccctgcaccggctgaagctgcggctggccatccaggagatcatgagcctgaccagccccagcgccccacccaccagcaggaccaccctggcctacggggacatgaaccacgagtggattggaaatgagtggctgcccagcctgggcctgccccagtaccgcagctacttcatggagtgcctggtggatgccaggatgctggaccacctgaccaagaaggacctgcggggccagctgaagatggtggacagcttccacagaaattccttccagtgtggcatcatgtgcctgcggcggctgaactatgacaggaaggagctggagaggaagcgggaggagagccagagcgagatcaaggatgtgctggtgtggagcaatgacagagtcatccgctggatcctgagcatcggcctgaaggagtatgccaacaacctgattgagagcggcgtgcatggagccctgctggccctggatgagacctttgacttcagcgccctggccctgctgctgcagatccccacccagaacacccaggcccgggctgtgctggagcgggagttcaacaacctgctggtgatgggcacagacagaagatttgatgaagatgatgacaagagcttccggcgggcccccagctggaggaagaagttccggcccaaggacatccggggcctggccgccggcagcgctgagaccctgcctgccaacttccgggtgaccagctccatgagcagccccagcatgcagcccaagaagatgcagatggatggaaatgtgtctggcacccagaggctggacagcgccaccgtgaggacctacagctgctag

SEQ ID NO: 342627 - DNA, 2100 bp, Artificial Sequence
  derived and/or modified sequence
atgcggctgcggggcgccagcctgcaccacggccggccccacctggggagcgtccccgatttccgctttcctatggccgacggtcacacagactcttattcaaccagcgccgtcctgcgaagaccccagaagggcagactcgccgcacttcgcgacgagccaagtaaagtgcaaaccttgaacgagcaggactgggagagagcacagcaggccagcgtgctggctaacgtggcccaggctttcgaatccgacgctgacgtgtccgacggcgaagacgatcgtgacactttattaagttccgtggacctgctgagcccctcaggccaggctgacgcccataccctggccatgatgctccaggaacaactggacgccatcaataaggaaatccgccttattcaggaagaaaaggagaatacagagcagcgggcagaagaaattgaatccagggttggtagcggttccttggataatctggggaggtttcggagcatgtcatcaattccaccttaccctgcttcttcattagcctcttcttcacctcccggatcagggaggagcaccccacgccgcattccacattccccggctcgcgaggtggaccgcctcggggtcatgaccctgccttccgaccttagaaaacaccggcggaagttgcctccatccagggaagaagttcgcgatgacaagactaccatcaagtgcgagactagtcctccatcctctcccagggccctgcggctcgatcggctgcacaagggagccctgcacaccgtttcccatgaggatattagagatatccggaatagtacaggatcccaggacgggcctgtgtccaatccctcaagttccaacagttcccaagatagtctccacaaggctccaaaaaagaaaggaattaagtcaagcattggaagattgtttggtaaaaaggaaaaaggccggccaggacagacaggcaaagaggcacttgggcaggcaggagtctctgaaactgacaatagctcccaggatgcattggggttgtcgaaactcggcggtcaagcagagaaaaatcggaaactccagaaaaagcacgagctcttagaggaagctaggaggcaaggactcccatttgcgcagtgggatggacccactgtggtggtttggttggagctgtgggtcggcatgcctgcctggtacgtggccgcatgtcgggccaacgtgaaatctggggccattatgtcggctctgtccgacacagaaatccagcgcgaaattggcatctctaatcctttacatagactgaagctgcgccttgcgatacaggaaataatgagcctgacatccccgtccgccccacctacttccaggaccaccttggcttatggagatatgaatcatgaatggatcggcaacgagtggctgcccagcctgggtcttccccagtaccggtcatacttcatggaatgcctggtggacgcccgaatgcttgaccaccttacaaagaaagacctgcgtggacagctgaaaatggtggatagtttccacagaaattcttttcagtgtggtattatgtgcctgagacggctcaattatgacaggaaagaactggagcgtaaacgagaggaaagccagtctgagatcaaagatgtacttgtgtggagcaatgatagagtaataaggtggatactaagcattgggctaaaggaatacgccaataacctcatcgagtctggtgtgcatggtgccctgttagcccttgatgagaccttcgatttctctgctctggcgctccttctgcaaatcccaacacaaaacacccaggccagggcagtgcttgaacgcgagttcaataaccttctcgtcatgggcaccgacagacggtttgatgaggacgatgacaaatcttttaggcgcgcgcctagctggcggaagaaattcaggccgaaagacatccgaggccttgcagcgggctccgctgaaactctgcctgctaactttagggtgacgagctctatgtctagtccatccatgcaacccaaaaagatgcaaatggatggaaacgttagtggtactcaacgattagactcggccaccgtgaggacgtactcatgctag

SEQ ID NO: 342628 - DNA, 2100 bp, Artificial Sequence
  derived and/or modified sequence
atgcgactacggggagcctccctccaccacgggcgaccccatttaggctccgtgcccgacttccgttttccaatggcagacggacatactgatagctatagcacaagtgccgttctccggcgacctcaaaagggtaggctggccgctcttcgagacgagcctagtaaggtacagacacttaacgaacaggactgggagcgagctcagcaggcttctgtgttagccaatgtggcccaggcttttgagtccgacgcggacgtgagcgatggggaggatgatagggatacactattatcttctgttgatttgctgtcacccagtgggcaggccgatgcccacacgctggcaatgatgctgcaggagcagttggatgcgattaataaggagattcgcctcatccaggaggagaaggaaaatacggagcagcgggcagaggagatcgagagtcgggtggggagcgggtctctggacaatcttgggaggtttcggagcatgtctagtattcccccatatcctgcttctagtctggccagtagctctcctcctggctctgggagaagcactccacgtagaataccacacagtccagccagggaggttgatcggttaggcgtgatgacccttccatccgatctgcggaaacataggagaaaactgcccccaagtcgggaggaagtgagggatgataagacaactataaaatgtgagacttcccccccatcctcgccgcgtgccctgagactggaccgcttgcacaaaggcgcactgcataccgtttctcacgaggacatccgtgacatacgtaactctaccggaagccaagacggccctgtgtccaacccttcgtcatctaattcctcgcaggatagtcttcacaaagcccctaagaaaaaaggcataaagtctagcatcggacgactatttggtaaaaaggagaagggaagacctggacaaacggggaaggaggccctgggccaagccggagtatccgagactgataatagttctcaggacgccctcggactgtccaaacttggtggacaggccgagaagaacagaaaattgcagaaaaagcacgaactgcttgaagaggcccgacgacaggggctcccatttgcgcagtgggacggaccaacagtggtggtgtggctggagctatgggtcggcatgcccgcttggtatgttgctgcatgtagggcaaatgtcaagagtggcgctataatgagtgctctctctgacaccgagattcagagggagattggaataagcaaccccttacaccgcttgaagttaagactagctatccaggagattatgtccctgacatccccgagcgctccccctactagccgcaccacccttgcgtatggagacatgaaccacgagtggataggcaatgaatggctgccttcactcggacttccacagtacaggtcctactttatggaatgtctcgtagatgccaggatgttggaccacttgaccaaaaaggaccttagaggccagttaaagatggtcgattcttttcaccgaaactcctttcagtgtggcatcatgtgcctacggaggctgaattacgatcgcaaggagctggagagaaagagagaagaatcccaaagtgaaataaaggacgtgctagtatggagtaacgacagggtcatccgctggattctatctatcggcttgaaggaatacgcgaataacctgatcgaatctggagtgcatggagctctcttagccctcgacgaaaccttcgatttctctgccctggccctgcttctgcagatccctactcaaaatacacaggctagggccgttttagaaagggagttcaacaatctattagtgatggggaccgaccgtaggttcgacgaggatgatgataagagttttcggagagcccctagctggagaaaaaaatttcgacctaaggacatcagaggtctcgcagcaggatccgccgaaactctaccagctaattttagggtcacaagcagcatgagctccccaagtatgcagcccaaaaaaatgcagatggacggcaacgtgtctggcacccagagactagatagtgccaccgtgaggacctactcctgttag

SEQ ID NO: 342629 - DNA, 2100 bp, Artificial Sequence
  derived and/or modified sequence
atgagactgagaggcgccagcctgcaccacggcagaccccacctgggcagcgtgcccgacttcagattccccatggccgacggccacaccgacagctacagcaccagcgccgtgctgagaagaccccagaagggcagactggccgccctgagagacgagcccagcaaggtgcagaccctgaacgagcaggactgggagagagcccagcaggccagcgtgctggccaacgtggcccaggccttcgagagcgacgccgacgtgagcgacggcgaggacgacagagacaccctgctgagcagcgtggacctgctgagccccagcggccaggccgacgcccacaccctggccatgatgctgcaggagcagctggacgccatcaacaaggagatcagactgatccaggaggagaaggagaacaccgagcagagagccgaggagatcgagagcagagtgggcagcggcagcctggacaacctgggcagattcagaagcatgagcagcatccccccctaccccgccagcagcctggccagcagcagcccccccggcagcggcagaagcacccccagaagaatcccccacagccccgccagagaggtggacagactgggcgtgatgaccctgcccagcgacctgagaaagcacagaagaaagctgccccccagcagagaggaggtgagagacgacaagaccaccatcaagtgcgagaccagcccccccagcagccccagagccctgagactggacagactgcacaagggcgccctgcacaccgtgagccacgaggacatcagagacatcagaaacagcaccggcagccaggacggccccgtgagcaaccccagcagcagcaacagcagccaggacagcctgcacaaggcccccaagaagaagggcatcaagagcagcatcggcagactgttcggcaagaaggagaagggcagacccggccagaccggcaaggaggccctgggccaggccggcgtgagcgagaccgacaacagcagccaggacgccctgggcctgagcaagctgggcggccaggccgagaagaacagaaagctgcagaagaagcacgagctgctggaggaggccagaagacagggcctgcccttcgcccagtgggacggccccaccgtggtggtgtggctggagctgtgggtgggcatgcccgcctggtacgtggccgcctgcagagccaacgtgaagagcggcgccatcatgagcgccctgagcgacaccgagatccagagagagatcggcatcagcaaccccctgcacagactgaagctgagactggccatccaggagatcatgagcctgaccagccccagcgccccccccaccagcagaaccaccctggcctacggcgacatgaaccacgagtggatcggcaacgagtggctgcccagcctgggcctgccccagtacagaagctacttcatggagtgcctggtggacgccagaatgctggaccacctgaccaagaaggacctgagaggccagctgaagatggtggacagcttccacagaaacagcttccagtgcggcatcatgtgcctgagaagactgaactacgacagaaaggagctggagagaaagagagaggagagccagagcgagatcaaggacgtgctggtgtggagcaacgacagagtgatcagatggatcctgagcatcggcctgaaggagtacgccaacaacctgatcgagagcggcgtgcacggcgccctgctggccctggacgagaccttcgacttcagcgccctggccctgctgctgcagatccccacccagaacacccaggccagagccgtgctggagagagagttcaacaacctgctggtgatgggcaccgacagaagattcgacgaggacgacgacaagagcttcagaagagcccccagctggagaaagaagttcagacccaaggacatcagaggcctggccgccggcagcgccgagaccctgcccgccaacttcagagtgaccagcagcatgagcagccccagcatgcagcccaagaagatgcagatggacggcaacgtgagcggcacccagagactggacagcgccaccgtgagaacctacagctgctag

SEQ ID NO: 342630 - DNA, 5241 bp, Artificial Sequence
  derived and/or modified sequence
gctcctcctccgctccgccagtgtccggccgcgggccggccttagtgactggggcggcgggccccggggccgcggcgtggggcgggcaggcggacgccggccgcgggctgctttcgtcggctcccaagctctcccggagcgagcagccgcccgcgagccgccgcggagcctcctcgcccgctcccgccggcgagcaagatgatgtgcgaggtgatgccgaccatcagcgaagcagaaggcccccctggaggaggtggaggccatggttccggctccccttcacagccagatgcagattcacattttgaacagttgatggtctccatgctagaagaaagggaccgccttcttgatacactgagagagactcaagaaacgctggccttaacccaggggaagttacacgaggttggtcatgaaagagattccttgcagagacagctcaacacggcacttccacaggagttcgcagcacttactaaagaactcaatgtatgcagggaacagctccttgaaagggaagaagaaattgctgaactgaaagcagaaaggaataacaccaggctgctgttagagcatttggaatgccttgtctccaggcatgagcggtctcttaggatgaccgtggtgaagagacaagcgcagtctccagcaggcgtgtccagcgaagtggaagtgctgaaagcactgaagtccttatttgaacaccacaaagctctggatgaaaaggtgagagagcgattacgagtagcacttgaaagatgtagtttgttagaagaggaattaggtgccacacacaaagagctaatgattcttaaagaacagaataatcagaaaaaaactctaacagatggagtgctggacataaaccatgaacaagaaaatacaccaagcacgagtggaaagagatcttctgatggttctttaagccacgaggaagaccttgctaaagtaattgagctccaagaaatcataagtaagcagtcaagggaacagagccaaatgaaagaacgcctggcttccctttccagtcatgtgacagaactggaagaggatctggacacggctagaaaagatctcatcaaatctgaagaaatgaacacaaaattgcaacgagatgtccgtgaagccatggcccaaaaggaagatatggaagagagaatcactactcttgaaaaacgctacctcgctgcacagcgtgaagccacatctgtgcatgacctcaatgataaacttgaaaatgaaattgcaaataaagattctatgcatcgacagactgaagataaaaaccgccagttacaggagcgcttggaattggcagagcaaaagctgcaacagacactgaggaaggcagagacgctcccggaggtggaggcggagctggcccagagggtggcagcgctttccaaggctgaagagagacacggcaacattgaagaaaggttacgacagatggaagcacagttggaggagaagaatcaagaactgcagcgggcaaggcaaagagaaaaaatgaacgaagaacataataaacgtttatcagacactgttgacaagctgctttcagaatctaatgagaggcttcaacttcatcttaaagagagaatggctgctttggaagataagaactctcttttaagagaagttgaaagtgcaaaaaagcagttagaagaaacacaacacgataaggatcagcttgtcctaaacattgaagcactgagggctgaactagaccacatgagactaagaggtgcttcacttcatcatggccgaccccacttgggcagtgtcccagatttcaggttccccatggcagacggccacacagactcctacagcaccagtgcagtgctgcggcgcccacagaaaggccggctggcagccctgcgagatgagccttccaaggtacaaactcttaatgagcaggattgggaacgtgcccagcaagctagtgtcttggcaaatgtagcacaagcattcgagagtgatgctgacgtgtctgatggtgaagatgacagggacactctcctcagctcagttgacctgctatcgcccagcgggcaggccgacgcgcacacactagccatgatgcttcaggagcagctggacgccatcaacaaagagatcaggttgattcaggaagaaaaagaaaatacagagcagcgggcagaggagattgaaagtcgagttggcagtggaagtctagacaatcttggtcgttttagatcaatgagctccattcccccctaccctgcttcctcgcttgctagctcctcccctccgggcagtgggcgctccaccccacgaaggatccctcacagcccagctcgggaagtggacagactgggcgtcatgacccttcctagtgatttaaggaaacatcgtagaaagttgccaccttccagagaagaggtacgagatgacaagacaaccataaagtgtgaaacctccccgccttcctccccgagagcccttcggttagaccggctgcacaaaggggcgctgcacaccgtcagccacgaggacatcagggacataaggaactccacaggctcccaggatggtcccgtgagcaaccccagcagtagcaacagtagccaggactcgctccacaaagccccaaagaagaaaggcattaagtcctccattggccgcttgtttggcaagaaagaaaagggccgacctggacaaactggcaaagaagcattaggacaagctggtgtttccgagacggataactcatctcaggatgccttgggacttagcaaattggggggacaggctgaaaaaaatcgtaaacttcaaaaaaagcatgaattgctggaggaagcccggagacaaggtttaccttttgcccaatgggacgggccaacggttgtggtctggctagagctctgggttgggatgccagcctggtatgtggctgcctgccgagcaaacgtgaaaagcggggccatcatgtcggccctgtccgacacagagatccagcgtgagattggcatcagcaaccccctgcacaggctgaagctgaggctggccatccaggagatcatgtcgctgaccagcccgtctgccccgcccacatctagaacgacactcgcctatggggacatgaaccacgagtggatcggcaacgagtggctccccagcctgggcctcccccagtaccgcagctacttcatggagtgccttgtagacgccaggatgctggaccacttgaccaagaaagaccttcgagggcagctgaaaatggtcgacagttttcacagaaacagtttccagtgtggaattatgtgcctgagaaggttaaattatgaccggaaagaactggaaagaaaaagagaagaaagtcagagtgaaataaaagacgtgcttgtttggagcaatgatcgagtgattcgctggatcctgtcaattggccttaaagaatatgcaaacaatcttatagagagtggtgttcacggagcacttctggccttagatgaaaccttcgacttcagtgcactggcactgctgttacagatcccgacgcagaacacacaggctcgtgctgtcttggaaagagaatttaacaaccttttggtcatggggactgatagaaggtttgatgaagatgatgataaaagctttaggagagcaccttcatggagaaaaaagtttagaccaaaggacattcgtggcttagctgctgggtcagcagagactctccctgcaaacttccgggtgacttcttctatgtcttccccctctatgcagccaaagaagatgcagatggacggcaatgtatcaggaacacagaggttggattctgctacagtcaggacttactcctgctaaagtctcctgttgtttacccacactacttctacagatgattatgcagcatttgaatccaacaaagactacattttggaatccagtggaatctttaatcttgttaatacttgttatatggaccctaagatattttattacagagtttttaattagtgaaaaattcatgaataccatagagaaaatattttagaatttaatgtttcttatatttatgtaaacttatgactcttcatttatatagttacttactttttcatgtatatccaggctataaatatcctttcaaatcatgttcttatacctaattttagtctttcaaatgaatgtactgtaatgcttgtatgtataaatcctatgaatagagggcttttgtaaattatgcatttattgtaattatcattaattttttaatgataaaccatgacaaaggattttacgtttataaaattatgacagaagccatgtgcattatcctttacggacgcagcctagctctacagcaatcatcctgaaataagcatacctaatttcaagcaattgttgtattttcatgactgaccttaactgtactttttctagcaagagatgctttattctgcagcatgaacagatttaaaatggctggtgttaaatatcagctcctaataagatgtggactgaaaacactatcacaacactatgagaagcccctagcactggttaacgctttcctagcctagtctctggatttggggagcttgtcttcagtggctgagactgtgagctgggagcagttctctcagctggagagactcgggatggggtaacctggggaccagtctagcccctgcaccctcttccctgcctctgctccttgggagcgggtggagagacacccatgtggctccccttagggccagcaccaagcaccacgctctcatcctgcaagtcggcgcacacagtggatgaaggcaggagacccagaaagcagtgcagtgcagctctaataaaggccttatttttcttatgtaaatcatctttttacatttgtttgtaaacatgtttaaagaacgaacctagtgggacatttttagactttgatgctctagccattttggattgtgtaagttgcagatgtggcttttactttttaaatggcatattaacaagccagcaaagtgtgtcagaccatggcgtggtatttattgtgcagcagatccagagacagaggcagcctgtcttttcagttggtttctgcttttaatttacttgtacaattcattgttactgttctgtttttctattaatcttttgtcaacttcctgattatgtaacaaagtatgtacagtctacttttgaactatttttatcacagtattatttattgctttctttcaataaagtactgaagcattttccactgcc

SEQ ID NO: 342631 - DNA, 333 bp, Artificial Sequence
  derived and/or modified sequence
atggcccccaccctgcagcaggcctacagaagaagatggtggatggcctgcaccgccgtgctggagaacctgttcttcagcgccgtgctgctgggctggggcagcctgctgatcatcctgaagaacgagggcttctacagcagcacctgccccgccgagagcagcaccaacaccacccaggacgagcagagaagatggcccggctgcgaccagcaggacgagatgctgaacctgggcttcaccatcggcagcttcgtgctgagcgccaccaccctgcccctgggcatcctgatggacagattcggccccagacccgtgagactggtgggctag

SEQ ID NO: 342632 - DNA, 333 bp, Artificial Sequence
  derived and/or modified sequence
atggccccaacattacaacaggcctaccggcgccgatggtggatggcgtgtaccgctgtgttagagaacctctttttctctgcggtgttgctgggctggggtagcctattgataatactgaaaaatgaggggttctattcctccacctgtccagcagagtccagcactaacacaacacaggatgagcagaggcgttggcctggttgtgaccagcaggacgaaatgttgaacttgggcttcacaataggtagctttgtgctatctgcgactaccctacccttaggaatccttatggaccgctttgggccccgccctgtgaggctggttggttag

SEQ ID NO: 342633 - DNA, 333 bp, Artificial Sequence
  derived and/or modified sequence
atggcccccaccctgcagcaggcctacagaagacgctggtggatggcctgcacagctgtgctggagaacctcttcttctctgctgtgctgctgggctggggcagcctgctgatcatcctgaagaatgaaggcttctacagcagcacctgcccagctgagagcagcaccaacaccacccaggatgagcagaggcgctggccaggctgtgaccagcaggatgagatgctgaacctgggcttcaccatcggcagctttgtgctgagcgccaccaccctgcccctgggcatcctgatggacagatttggccccaggcctgtgcggctggtgggctag

SEQ ID NO: 342634 - DNA, 333 bp, Artificial Sequence
  derived and/or modified sequence
atggcccccaccctgcagcaggcctaccggcggcggtggtggatggcctgcacggcagtgttagaaaacctgtttttcagtgctgtgctcttgggatggggttctctcctgataatcctgaaaaatgagggtttttacagtagtacttgcccagctgaatcatcaactaacactacgcaagacgagcagaggaggtggccaggctgtgatcaacaggacgaaatgctgaacctgggtttcacgattggcagcttcgttctttccgcgacaactctgccactaggcattctgatggaccgttttggccctcggcccgttcgcctggttggctag

SEQ ID NO: 342635 - DNA, 333 bp, Artificial Sequence
  derived and/or modified sequence
atggccccaacattgcagcaagcctaccgaaggcgttggtggatggcctgtaccgctgtgctggaaaacttgttcttttccgccgtgctgcttgggtggggctctctcttaattattcttaaaaatgagggcttttacagctcaacttgtccagccgagtcctctactaataccactcaggacgagcagaggcgttggccgggatgcgatcagcaggatgagatgctgaacctgggtttcacaattggatcctttgtgctaagtgctacaactctgcctctgggaattctgatggatcgtttcggtccacgacccgtgcgcctggtgggttag

SEQ ID NO: 342636 - DNA, 690 bp, Artificial Sequence
  derived and/or modified sequence
gcttcgcagacctctggcgcccggcgggttcccagttcccccgcttcttccgaggagacagcggaggcgaggccaccgggctgtcaggctgaagctccgtggccgccgggtcctgcacgcagagaagaccccagcgccggcgcggctcagggctgggcccacgggactccggacgcgccgcgaaagcgttgcgctcccggaggcgtccgcagctgctggctgctcatttgccggtgaccggagagctgcgcgtttgccagagttccagcggacctcctggagcgcttgaacccaaagccccgtttcacagatgagaataccgagtccccctggaagaagtgactggctcggggccagcatggcccccacgctgcaacaggcgtaccggaggcgctggtggatggcctgcacggctgtgctggagaacctcttcttctctgctgtactcctgggctggggctccctgttgatcattctgaagaacgagggcttctattccagcacgtgcccagctgagagcagcaccaacaccacccaggatgagcagcgcaggtggccaggctgtgaccagcaggacgagatgctcaacctgggcttcaccattggttccttcgtgctcagcgccaccaccctgccactggggatcctcatggaccgctttggcccccgacccgtgcggctggttggcag

SEQ ID NO: 342637 - protein, 418 aa, Artificial Sequence
  derived and/or modified sequence
MRSLLLLSAFCLLEAALAAEVKKPAAAAAPGTAEKLSPKAATLAERSAGLAFSLYQAMAKDQAVENILVSPVVVASSLGLVSLGGKATTASQAKAVLSAEQLRDEEVHAGLGELLRSLSNSTARNVTWKLGSRLYGPSSVSFADDFVRSSKQHYNCEHSKINFRDKRSALQSINEWAAQTTDGKLPEVTKDVERTDGALLVNAMFFKPHWDEKFHHKMVDNRGFMVTRSYTVGVMMMHRTGLYNYYDDEKEKLQIVEMPLAHKLSSLIILMPHHVEPLERLEKLLTKEQLKIWMGKMQKKAVAISLPKGVVEVTHDLQKHLAGLGLTEAIDKNKADLSRMSGKKDLYLASVFHATAFELDTDGNPFDQDIYGREELRSPKLFYADHPFIFLVRDTQSGSLLFIGRLVRPKGDKMRDEL

SEQ ID NO: 342638 - protein, 397 aa, Artificial Sequence
  derived and/or modified sequence
MRSLLLLSAFCLLEAALAAEVKKPAAAAAPGTAEKLSPKAATLAERSAGLAFSLYQAMAKDQAVENILVSPVVVASSLGLVSLGGKATTASQAKAVLSAEQLRNVTWKLGSRLYGPSSVSFADDFVRSSKQHYNCEHSKINFRDKRSALQSINEWAAQTTDGKLPEVTKDVERTDGALLVNAMFFKPHWDEKFHHKMVDNRGFMVTRSYTVGVMMMHRTGLYNYYDDEKEKLQIVEMPLAHKLSSLIILMPHHVEPLERLEKLLTKEQLKIWMGKMQKKAVAISLPKGVVEVTHDLQKHLAGLGLTEAIDKNKADLSRMSGKKDLYLASVFHATAFELDTDGNPFDQDIYGREELRSPKLFYADHPFIFLVRDTQSGSLLFIGRLVRPKGDKMRDEL

SEQ ID NO: 342639 - protein, 247 aa, Artificial Sequence
  derived and/or modified sequence
MRSLLLLSAFCLLEAALAAEVKKPAAAAAPGTAEKLSPKAATLAERSAGLAFSLYQAMAKDQAVENILVSPVVVASSLGLVSLGGKATTASQAKAVLSAEQLRDEEVHAGLGELLRSLSNSTARNVTWKLGSRLYGPSSVSFADDFVRSSKQHYNCEHSKINFRDKRSALQSINEWAAQTTDGKLPEVTKDVERTDGALLVNAMFFKPHWDEKFHHKMVDNRGFMVTRSYTVGVMMMHRTGLYNYYD

SEQ ID NO: 342640 - protein, 249 aa, Artificial Sequence
  derived and/or modified sequence
MRSLLLLSAFCLLEAALAAEVKKPAAAAAPGTAEKLSPKAATLAERSAGLAFSLYQAMAKDQAVENILVSPVVVASSLGLVSLGGKATTASQAKAVLSAEQLRDEEVHAGLGELLRSLSNSTARNVTWKLGSRLYGPSSVSFADDFVRSSKQHYNCEHSKINFRDKRSALQSINEWAAQTTDGKLPEVTKDVERTDGALLVNAMFFKPHWDEKFHHKMVDNRGFMVTRSYTVGVMMMHRTGLYNYYDDE

SEQ ID NO: 342641 - protein, 203 aa, Artificial Sequence
  derived and/or modified sequence
MRSLLLLSAFCLLEAALAAEVKKPAAAAAPGTAEKLSPKAATLAERSAGLAFSLYQAMAKDQAVENILVSPVVVASSLGLVSLGGKATTASQAKAVLSAEQLRDEEVHAGLGELLRSLSNSTARNVTWKLGSRLYGPSSVSFADDFVRSSKQHYNCEHSKINFRDKRSALQSINEWAAQTTDGKLPEVTKDVERTDGALLVNA

SEQ ID NO: 342642 - protein, 163 aa, Artificial Sequence
  derived and/or modified sequence
MRSLLLLSAFCLLEAALAAEVKKPAAAAAPGTAEKLSPKAATLAERSAGLAFSLYQAMAKDQAVENILVSPVVVASSLGLVSLGGKATTASQAKAVLSAEQLRDEEVHAGLGELLRSLSNSTARNVTWKLGSRLYGPSSVSFADDFVRSSKQHYNCEHSKINF

SEQ ID NO: 342643 - protein, 167 aa, Artificial Sequence
  derived and/or modified sequence
MRSLLLLSAFCLLEAALAAEVKKPAAAAAPGTAEKLSPKAATLAERSAGLAFSLYQAMAKDQAVENILVSPVVVASSLGLVSLGGKATTASQAKAVLSAEQLRDEEVHAGLGELLRSLSNSTARNVTWKLGSRLYGPSSVSFADDFVRSSKQHYNCEHSKINFRDKR

SEQ ID NO: 342644 - protein, 324 aa, Artificial Sequence
  derived and/or modified sequence
MRSLLLLSAFCLLEAALAAEVKKPAAAAAPGTAEKLSPKAATLAERSAGLAFSLYQAMAKDQAVENILVSPVVVASSLGLVSLGGKATTASQAKAVLSAEQLRDEEVHAGLGELLRSLSNSTARNVTWKLGSRLYGPSSVSFADDFVRSSKQHYNCEHSKINFRDKRSALQSINEWAAQTTDGKLPEVTKDVERTDGALLVNAMFFKPHWDEKFHHKMVDNRGFMVTRSYTVGVMMMHRTGLYNYYDDEKEKLQIVEMPLAHKLSSLIILMPHHVEPLERLEKLLTKEQLKIWMGKMQKKAVAISLPKGVVEVTHDLQVRGGPA

SEQ ID NO: 342645 - protein, 295 aa, Artificial Sequence
  derived and/or modified sequence
MRSLLLLSAFCLLEAALAAEVKKPAAAAAPGTAEKLSPKAATLAERSAGLAFSLYQAMAKDQAVENILVSPVVVASSLGLVSLGGKATTASQAKAVLSAEQLRDEEVHAGLGELLRSLSNSTARNVTWKLGSRLYGPSSVSFADDFVRSSKQHYNCEHSKINFRDKRSALQSINEWAAQTTDGKLPEVTKDVERTDGALLVNAMFFKPHWDEKFHHKMVDNRGFMVTRSYTVGVMMMHRTGLYNYYDDEKEKLQIVEMPLAHKLSSLIILMPHHVEPLERLEKLLTKEQLKIWMG

SEQ ID NO: 342646 - protein, 150 aa, Artificial Sequence
  derived and/or modified sequence
MRSLLLLSAFCLLEAALAAEVKKPAAAAAPGTAEKLSPKAATLAERSAGLAFSLYQAMAKDQAVENILVSPVVVASSLGLVSLGGKATTASQAKAVLSAEQLRDEEVHAGLGELLRSLSNSTARNVTWKLGSRLYGPSSVSFADDFVRSS

SEQ ID NO: 342647 - DNA, 1257 bp, Artificial Sequence
  derived and/or modified sequence
atgaggtccctcctgctcctctctgcgttttgtctgttggaggctgccttagccgcagaagtcaagaagcctgccgctgctgctgcgcctgggaccgcagaaaaactatcccccaaggcagcgactcttgctgagcggtcagcaggcctggctttcagtctgtaccaggcaatggccaaggatcaagccgtagaaaacatcctagtctccccggttgtcgtcgcaagctccctcggccttgtgtctctgggtggcaaggctaccactgccagccaagctaaggcagtgctttctgccgagcagttgagagatgaggaagtacacgcgggacttggtgagctgttgcgttctctgtcaaattcgactgctcggaacgtgacatggaagctggggtctcggttgtacggaccgagctccgtttcctttgcggatgacttcgttagaagctctaagcagcactacaactgcgaacatagcaagattaattttcgagataagagatccgccctccagtcaatcaatgaatgggctgcacagaccaccgacggaaagcttcccgaggtgacaaaagacgtggagcggaccgatggagctctgctcgtcaatgctatgtttttcaaaccacactgggacgagaaattccatcataaaatggtggataatagagggttcatggttacgaggagctacacagttggagttatgatgatgcatagaacgggactatacaactattacgacgatgaaaaggagaaactacagatcgtagagatgcctctggcccataagctttccagcctgattattttgatgcctcatcacgtcgaacccctggaaagactggaaaagcttctgacaaaggaacagctaaaaatttggatgggaaagatgcaaaaaaaggccgtggccattagcttgccaaaaggggtggttgaggtcacacacgacctccagaagcacctcgctgggttaggactcacagaagcaatcgataagaataaggctgacctctctcgtatgtcaggcaagaaggacctgtacttggcatcggtgttccacgcaacagctttcgagctggatacagacggcaatcccttcgaccaggatatttatggaagagaggagctgaggagtccaaaactgttttatgccgatcacccttttatattcctggtccgggatacccagtccgggtctctgttgtttatcgggaggctggtgaggccaaaaggagacaagatgcgcgacgaactgtag

SEQ ID NO: 342648 - DNA, 1194 bp, Artificial Sequence
  derived and/or modified sequence
atgcgcagtcttctgttgctctccgccttttgtctccttgaagcggcacttgccgcagaagtgaaaaagcctgctgcagctgccgctcccggaacagcagagaagctctccccaaaggcagccacactagcagagcgatctgcagggctcgctttcagtctgtaccaggctatggcaaaggaccaggcagtagaaaatatcctggtctctccggttgtagtggcctcatccctgggtcttgtgagcctggggggtaaagcgacaacggccagccaggctaaggccgtgctgagcgctgaacagctccggaatgtgacctggaagttaggtagccgactttatggaccctcatcggtgtccttcgccgacgatttcgtacgctctagtaagcaacactacaattgcgaacatagtaaaataaattttagagataagagatctgccctgcaatctatcaacgaatgggcggctcagacgaccgatggaaagctgccagaagtgaccaaggatgtggaacgtactgatggtgctttgcttgtgaacgctatgttctttaagccccattgggatgagaagtttcaccataaaatggtggataaccgaggtttcatggtgacacggtcctatactgttggcgttatgatgatgcataggactggcttgtataattattacgacgatgaaaaagaaaaacttcagatcgtcgagatgcccctcgcccacaaactttcaagcttgattattttaatgccccaccacgtcgagcctctggagcgtctggaaaagttgcttactaaagagcaattaaagatctggatggggaaaatgcagaagaaagcagtggcaattagtctgcccaagggagtagtggaagtcactcacgatctgcaaaagcatttggcgggacttggactcaccgaggccattgacaaaaataaggctgacttgagccggatgagtggcaaaaaggatctctatctggcctccgttttccatgcgaccgcattcgaactggatacagacgggaatccctttgaccaggatatttatgggcgtgaggaattacgctccccaaaactattttacgctgaccacccctttatctttttggtaagagacacccaatcagggtccctactgttcattggccgtctcgtccgtcccaaaggtgataaaatgagggatgaattgtag

SEQ ID NO: 342649 - DNA, 1257 bp, Artificial Sequence
  derived and/or modified sequence
atgcggagtttgctgctgctctcagctttttgtttactggaagctgcacttgctgcagaggtaaagaaacccgcagccgctgccgctccagggaccgccgagaagctgagccctaaggccgctactctcgccgaaagaagcgcgggtctagcattttcattgtatcaagcgatggccaaggaccaggcagtggagaacatactggtgtcgccagtcgtggtagcatcctccctaggactcgtcagtctcggaggaaaagcaaccaccgcttcgcaagcgaaagcagtgctgagtgccgagcagttgagggatgaagaggtgcacgctggactgggcgagctcctacgcagcctgtccaactccaccgcccgaaacgtaacctggaaactaggctcccgcctgtatggaccaagttccgtgagctttgctgacgacttcgtaaggtcctccaagcagcactacaactgcgagcactcaaagattaattttcgtgataagcgctccgctctgcagtctattaatgaatgggcggctcaaactacggacggtaaactgccagaggtgactaaggacgttgagaggacggacggggcactgctggtcaatgcgatgttcttcaagccccactgggacgagaaattccatcacaaaatggtggataaccggggtttcatggtgacccggtcatatacagtcggtgtaatgatgatgcatagaacagggctgtacaattactatgatgacgaaaaggaaaagttgcagattgtggagatgcctctcgcgcacaagctgtcttctctgataatactcatgccacatcacgtggaacccctagagcggttggaaaagttattgacgaaggagcagctcaagatctggatggggaagatgcaaaaaaaggctgtggcaatttctctgcccaagggtgtggtagaggtgactcacgacctccagaagcacctggctgggctcggtctgaccgaagccatagacaaaaacaaggccgatctgtcacgaatgtctggcaagaaggacctgtacttagcttctgtcttccatgctactgctttcgaactggacaccgatggaaatccttttgatcaagacatctacgggagagaagagttgcggtcacccaagctcttctacgctgatcacccctttattttcctggtgagagatacgcagtccggatcgcttttatttatcgggagattggtgcgccctaagggagataagatgcgagatgagctgtag

SEQ ID NO: 342650 - DNA, 744 bp, Artificial Sequence
  derived and/or modified sequence
atgagatccctgctcctcctctctgctttctgtctgctggaggccgcacttgccgctgaggtgaaaaaacctgcggcagcagcagcacccggaactgccgaaaaactttctcccaaggctgcaactcttgccgaaagatcggcaggcctcgccttttctctgtatcaggctatggctaaggatcaagccgtggagaacattctcgtttcaccagttgttgtcgcgtcctccctcggcttagttagcctgggaggtaaagcaacaacggcgagccaggccaaagctgttctcagcgccgagcagttacgcgatgaggaggtgcacgcaggcctcggcgagcttttaaggagtttatctaactctacagctcgcaacgtgacatggaaactgggatctaggctctacgggccatctagcgtgtctttcgctgatgatttcgtacgtagctctaaacagcactataactgtgagcactccaaaattaactttagagataagagatctgcccttcaatcgataaacgaatgggccgctcagacgaccgacggcaagctgcctgaggtaacgaaggacgtggagcggacggacggggctctgctggtgaacgccatgtttttcaagccacattgggatgaaaaatttcaccacaagatggttgacaatcgcggtttcatggttactcgatcgtataccgtcggagtgatgatgatgcacaggaccgggttgtataactattatgactag

SEQ ID NO: 342651 - DNA, 750 bp, Artificial Sequence
  derived and/or modified sequence
atgagaagtctgctgctgctgtccgctttctgcctgctcgaggccgcacttgccgcagaagttaaaaagcccgctgccgcagccgctcctgggactgccgagaaactgtccccaaaggccgctacattagcagaaagaagcgccggtctagccttctctctctatcaggcgatggcaaaggaccaggcagtggagaacatactcgtgtccccagttgtggtggcatcttcccttggccttgtcagtttgggaggaaaagcgactactgccagccaggccaaggcagtgctctcagcagaacagctgagagatgaggaggtccacgctggcctcggagagttgctgcggagtctaagcaactcaaccgcacgcaatgttacctggaaactcggatcgcggctttatgggccttcctcagtgtcttttgccgacgacttcgtgagaagcagtaaacagcattataactgtgaacactcaaaaattaatttccgagataaacgctcagccctgcagagcattaatgaatgggccgctcagacaaccgatggcaaacttccagaggtgacaaaggacgtcgagaggactgatggggctctgctcgtgaacgccatgttcttcaagccacactgggacgagaaattccaccacaaaatggtggacaacagaggcttcatggtcacccgtagctatacagtcggtgtgatgatgatgcaccgcacaggattgtataactactacgacgatgaatag

SEQ ID NO: 342652 - DNA, 612 bp, Artificial Sequence
  derived and/or modified sequence
atgcgcagcctgctcttgctgtctgccttttgtttgctggaggccgctctcgcggctgaagtcaagaaacctgcggctgcagctgcgcctggcacagcagagaaactgtcaccgaaggcagctaccttggccgagcgtagcgcgggactggcctttagcttgtatcaagctatggccaaagatcaggccgtggagaacattttagtaagtccagtcgtggtggcttcctctctggggctggtctcccttggcggaaaagcaactaccgccagtcaggcaaaggctgtcttatccgccgagcaactccgagatgaagaagtccacgcaggactgggggagctcctgcgcagcctatctaatagcacagccaggaacgtaacttggaaactggggagtaggctgtatgggccttccagcgtcagcttcgcagacgatttcgtccggtcttctaaacagcactacaactgtgaacatagcaagattaattttcgggacaagagatctgcgttgcagtcaattaacgaatgggcagcccagactacagacggaaagctgcctgaggtaaccaaggacgttgagagaaccgatggggctctcctggtgaatgcctag

SEQ ID NO: 342653 - DNA, 492 bp, Artificial Sequence
  derived and/or modified sequence
atgcgctcactgcttctgctcagcgctttttgcctcctagaagccgcacttgctgccgaagtaaagaagccagctgcagcagcagcacccggaactgccgagaagctgtctccaaaggccgcaacactggccgagaggtccgccggactagctttttccctttaccaagctatggccaaagatcaagctgttgagaacatactggtgagtcccgtcgtggtcgcttcttcactcgggctcgtaagtttgggcggaaaggccactaccgcatcccaggctaaggcagtactgagtgcagagcagctcagagatgaagaggtgcatgcagggcttggagaacttctgcgtagtctgagcaactccactgcacgcaacgtgacttggaaactcggatcccgcttgtacgggccttcgagcgtttcattcgctgacgatttcgttcgcagctctaaacagcactataactgtgaacatagcaagatcaatttttag

SEQ ID NO: 342654 - DNA, 504 bp, Artificial Sequence
  derived and/or modified sequence
atgcgaagcctgcttctcttgtccgcattctgcctgcttgaagccgcattggccgctgaagtcaaaaagcctgccgctgcagctgcacctggaaccgccgagaagctttccccgaaggcagcgacccttgctgagagatccgccggtctggcttttagtctgtaccaggcaatggcaaaggaccaagccgttgagaatattctggtgtccccagttgtggtggcctccagtctggggctggtgagccttggtgggaaggctacaacagcctcacaggccaaagctgttctgagtgctgagcagttgagagacgaagaagttcatgctggcctgggcgagctcctgcgcagcctgtccaattctactgcccgtaacgtgacttggaaattaggcagtcggctctatggcccatccagcgtgagcttcgccgacgacttcgtgcgttcctcgaagcagcactacaattgtgaacactccaagattaatttccgggacaaaagatag

SEQ ID NO: 342655 - DNA, 975 bp, Artificial Sequence
  derived and/or modified sequence
atgaggtctctgctgctgctctctgcattttgcctgctagaggcggctcttgccgctgaagtcaaaaaaccggcagcagctgctgccccagggactgcggaaaagttgagcccgaaggccgctaccttggcggaacgaagcgcaggcctggccttttccctctaccaagccatggctaaggaccaggccgtagagaatatcctggtgtccccggtggttgtggcatcttcactggggctggtgtcgcttggaggcaaggccacaactgccagtcaggctaaggctgtgcttagcgcagagcagctccgggacgaggaggtgcacgctgggcttggcgagctcttgcgatccttgagcaactcaaccgctcgaaacgtgacatggaaactggggtcacggctctatggcccaagttcagtgagcttcgctgatgatttcgtgagatccagcaagcagcactacaattgcgaacatagcaagataaatttccgggacaagaggtcggctctgcagtcaatcaacgaatgggctgcccagacaacagatggcaaactgcccgaagtaaccaaggacgtcgagaggacagatggtgccttgttagtgaatgcaatgttttttaaaccccactgggacgagaaatttcatcacaagatggtcgacaaccggggatttatggtaaccaggtcttacacagtcggagtaatgatgatgcaccggacaggcctctacaactactacgatgacgagaaggagaagctccaaattgtcgaaatgcccctggcgcataagctcagtagcctgattatcttgatgccacaccacgtggagcctctggagagactggagaagctgctcactaaggagcaactgaaaatctggatgggcaaaatgcagaagaaagctgttgccatttcactcccaaagggggtggtagaagtgacacacgatctccaggtgcggggagggcctgcttag

SEQ ID NO: 342656 - DNA, 888 bp, Artificial Sequence
  derived and/or modified sequence
atgcggagtctcctgttgctatcagccttttgccttctcgaggccgctctggccgcagaggtgaagaaaccagctgcagctgcagcaccgggtacggccgaaaagctgtctcccaaagctgccactctggccgagaggagtgcgggactggcattctccttatatcaagccatggcaaaggaccaggccgttgaaaacatcctggtgagtccagtggtggtggccagctctctgggactggtctctctgggcggtaaggctacgaccgcaagccaggctaaggcagtgctctcagctgaacaactgcgggacgaggaggtgcacgcaggcctgggcgagcttcttagatcactgtctaactctacagctcgtaatgttacatggaagctgggctcccgcttatacggaccttcaagtgtgtccttcgccgatgattttgtgagatcaagcaagcagcactacaactgcgagcactcaaagataaatttccgagacaaacggagtgcactgcagtcgattaacgaatgggccgctcagacaacagatgggaagcttcctgaagttaccaaggatgtcgaacggaccgacggtgccctcctcgtgaacgcaatgttttttaagccccactgggacgaaaaatttcaccataaaatggtggacaatcgtggcttcatggtaacccgaagttataccgtcggggtcatgatgatgcatagaaccgggttgtataactactacgacgacgaaaaggaaaagttacagatcgtagagatgcctctggcccataagctgtcatcccttattatccttatgcctcatcatgtggagccactggaaaggctggagaaacttctgaccaaggagcaattgaagatttggatgggttag

SEQ ID NO: 342657 - DNA, 453 bp, Artificial Sequence
  derived and/or modified sequence
atgcgatccctgcttctcctttcagcattctgtctgctggaggccgctctggcagctgaggtgaaaaaacccgctgcagcagcggctcccggtaccgccgagaagttgtcaccaaaggcagctacgctcgcagaaaggagcgccggtctagccttttctctctaccaggcgatggctaaagaccaagccgtggaaaatatcctcgtgagtcctgtggtggtggctagctcactgggactggtttcgctagggggaaaggctactactgctagccaggcaaaggccgttctatcagccgagcagctgagagatgaagaggtccatgccggactgggcgagctgctgagatctctgagcaacagtacagccagaaatgttacctggaagcttggctcgcggctctatggtccttcatctgtgtcgtttgctgacgacttcgtccgatctagctag

SEQ ID NO: 342658 - DNA, 1257 bp, Artificial Sequence
  derived and/or modified sequence
atgagatccctgctcctcctgagcgccttctgcttacttgaggccgcactggccgctgaggtcaaaaagcctgctgccgctgccgcacccggtacagcggagaagctttccccgaaagcggcaacactggctgagaggtccgcaggtttagcattctcactgtatcaggctatggcaaaggaccaggctgtggagaatatactggtaagcccagtggtggtcgcctcttccttgggtttagtgtcattgggtggcaaggccacaactgcctctcaggcaaaggcagtgttaagcgccgagcagcttagggacgaggaagtccacgccggattaggcgaactgctccgcagtttgagcaattcaactgcgagaaacgtcacgtggaagctcgggagccgattgtacggaccctctagtgtgagtttcgccgatgatttcgtcagatcctcaaagcagcactacaactgtgagcactccaaaataaattttagagacaagcggtcggcgctccagtctattaacgagtgggcggcacagaccaccgacgggaagctccccgaggtcaccaaggatgtggagagaacggatggtgcactattggtgaatgcgatgttctttaaaccacattgggacgaaaagttccaccacaagatggtcgataatcgcggatttatggttacacgctcttacacagtgggggtgatgatgatgcatcgcacaggcctttacaattactatgatgatgagaaggagaaactacaaatcgttgaaatgcccctggctcacaaactgtcatcattgatcattctaatgccccatcacgtggaacccctggagcgcttagagaagctgctcacaaaagaacagctgaaaatttggatgggaaagatgcaaaaaaaagctgtggcgattagtctcccaaaaggtgtcgtcgaagttacgcatgatttgcagaagcacctcgctgggttgggcctgaccgaagcgattgataagaacaaggcagaccttagcaggatgagcggcaagaaagatctctacctcgcctcggtgtttcacgcaaccgcttttgagttggatacagatggtaatccgttcgaccaggacatatacgggagggaggagttgcggtcgcccaagcttttctacgccgaccacccatttatctttctcgtgagagacacgcagagtgggagtctcctgttcatcgggcgactcgtccgccctaaaggagataagatgcgagatgagctgtag

SEQ ID NO: 342659 - DNA, 1324 bp, Artificial Sequence
  derived and/or modified sequence
taagagtagaatcgtgtcgcggctcgagagcgagagtcacgtcccggcgctagcccagcccgacccaggcccaccgtggtgcacgcaaaccacttcctggccatgcgctccctcctgcttctcagcgccttctgcctcctggaggcggccctggccgccgaggtgaagaaacctgcagccgcagcagctcctggcactgcggagaagttgagccccaaggcggccacgcttgccgagcgcagcgccggcctggccttcagcttgtaccaggccatggccaaggaccaggcagtggagaacatcctggtgtcacccgtggtggtggcctcgtcgctagggctcgtgtcgctgggcggcaaggcgaccacggcgtcgcaggccaaggcagtgctgagcgccgagcagctgcgcaacgtgacctggaagctgggcagccgactgtacggacccagctcagtgagcttcgctgatgacttcgtgcgcagcagcaagcagcactacaactgcgagcactccaagatcaacttccgcgacaagcgcagcgcgctgcagtccatcaacgagtgggccgcgcagaccaccgacggcaagctgcccgaggtcaccaaggacgtggagcgcacggacggcgccctgctagtcaacgccatgttcttcaagccacactgggatgagaaattccaccacaagatggtggacaaccgtggcttcatggtgactcggtcctataccgtgggtgtcatgatgatgcaccggacaggcctctacaactactacgacgacgagaaggaaaagctgcaaatcgtggagatgcccctggcccacaagctctccagcctcatcatcctcatgccccatcacgtggagcctctcgagcgccttgaaaagctgctaaccaaagagcagctgaagatctggatggggaagatgcagaagaaggctgttgccatctccttgcccaagggtgtggtggaggtgacccatgacctgcagaaacacctggctgggctgggcctgactgaggccattgacaagaacaaggccgacttgtcacgcatgtcaggcaagaaggacctgtacctggccagcgtgttccacgccaccgcctttgagttggacacagatggcaacccctttgaccaggacatctacgggcgcgaggagctgcgcagccccaagctgttctacgccgaccaccccttcatcttcctagtgcgggacacccaaagcggctccctgctattcattgggcgcctggtccggcctaagggtgacaagatgcgagacgagttatagggcctcagggtgcacacaggatggcagg

SEQ ID NO: 342660 - DNA, 1257 bp, Artificial Sequence
  derived and/or modified sequence
atgagaagcctcctgctactctcagctttttgcttgctggaggcagcactggccgcagaagtaaagaaaccagcggctgccgcagcgcccggcacagccgagaagctgagccccaaagcggctacattggcagagagatcggctggactagccttcagcctctatcaggctatggcaaaggaccaagcagtcgagaatatactggtttctcccgtcgtagtggcatccagtctcggactggttagtttaggaggtaaagcaaccacagcaagccaagcaaaggcggttttatcagcagagcaactacgggatgaagaggtgcacgcaggactgggggagctgttgcgttcattatctaactccacagccaggaatgtgacatggaagctaggctcaagactttatggaccttcctcggtctcctttgccgacgatttcgtccggtcaagcaagcagcactacaattgtgaacactcaaagatcaactttagggataagaggtcagcactgcagagcatcaacgagtgggccgcccagacaaccgacggcaaactcccagaagtcactaaagacgtggaaagaacagacggcgctttactggtgaatgccatgtttttcaagccccattgggacgagaagtttcaccataagatggtggacaaccgaggtttcatggtgaccagatcctacactgttggcgttatgatgatgcacagaactggtttgtacaactattatgatgatgaaaaggaaaaacttcagatcgttgagatgccgctcgctcacaagctctcatcactgatcattttaatgccccatcacgtggaacctctggagcggttagagaagttgctgactaaggagcagcttaagatttggatgggtaagatgcagaagaaagccgtggctattagcctacctaaaggggtcgtcgaagtcacgcacgacctgcagaagcatctggccggactgggcttgacggaagcaatcgataagaataaagctgatctaagccgcatgtctggaaaaaaggacttgtaccttgcgagcgtcttccatgcaaccgccttcgaactcgatactgatggaaatccatttgatcaggacatttacggaagggaggaattgcgaagccctaagctattctacgctgatcacccatttatttttctagtgcgggacactcaaagtgggtccctgttgttcatcggacggttagtgagaccaaaaggagacaagatgcgcgatgaattgtag

SEQ ID NO: 342661 - DNA, 1194 bp, Artificial Sequence
  derived and/or modified sequence
atgaggtccttgttattactttcagctttctgcttgttggaggctgcactggcagccgaggttaagaagccagcagcagcggctgcaccaggcaccgccgaaaagttgagtccaaaggcagcaaccctggcagagagatcggctgggctagccttcagtctatatcaggccatggccaaagatcaagccgtcgagaacatactggttagccccgtggtggttgcctctagcctgggcctggtttcacttggcggaaaagcaacaactgcatcacaggcgaaagcagtactgagcgcagagcagctccgcaatgtgacgtggaagttgggcagcagactctacggtccatcctcggtatcttttgcagacgattttgtgcgatctagcaagcaacactacaactgtgagcactctaagataaattttcgcgataagagatctgctctgcaatcaattaacgagtgggctgcacagactaccgacggcaagttgccagaagttacaaaagatgttgagagaacagatggggcgttactggtgaacgccatgttcttcaagcctcactgggacgagaaattccatcacaagatggttgacaaccgcggtttcatggtgacaaggagctataccgtgggtgtgatgatgatgcaccggacagggctctataactactacgacgacgaaaaagaaaagttgcaaatcgtcgagatgccgctcgcccataagctatccagtttaattatcctgatgccacatcatgtcgaacccctggaacggctggagaaattacttactaaggaacaattgaaaatatggatggggaagatgcaaaagaaagccgtggcaatctcacttcccaagggtgtggttgaagtgacccacgatcttcagaagcatctcgccggccttggcctgacagaagcgatagataagaataaggccgatctatctaggatgagtgggaaaaaggatttatatctggcttctgtctttcacgccaccgctttcgaactggacactgacggcaaccccttcgatcaagacatatatggcagagaagaattacgttcgcctaaactgttctatgcagaccacccgtttatctttttagtgcgggatacacagagtgggagcctactattcatcgggaggctggtgcgcccaaagggggataagatgcgtgacgaactgtag

SEQ ID NO: 342662 - DNA, 1257 bp, Artificial Sequence
  derived and/or modified sequence
atgcggtcattgctgttgctgagcgcattctgcttactggaggccgccctggccgccgaagtgaaaaaacctgctgccgccgcggcccccggcaccgccgaaaaactgtctccgaaggccgctacgctggcagaaagaagcgccggtcttgcatttagcctctaccaagcaatggccaaggaccaggctgtggagaatatccttgtgtctcccgtggttgtcgcttcatcgctgggactggtctcccttgggggcaaagcaaccacagcatcccaagcaaaagctgtgttgtccgcagaacaactgcgcgatgaggaggtgcacgccggacttggagagctactccggagcttgtctaatagcacagccagaaatgtgacttggaaactaggctctaggttgtacggaccttctagtgtatccttcgctgacgattttgtgaggagttcaaagcagcattataactgtgagcattccaagatcaattttcgcgacaagcggtctgctttacagtccataaacgaatgggcagctcagaccacggacggcaaactcccggaggtcacaaaagacgtggaaaggaccgatggagccctgctggtcaatgctatgttcttcaaaccccactgggatgagaagtttcatcacaaaatggtggacaaccgcggcttcatggtgacccggtcttatactgtcggcgtgatgatgatgcacaggacaggactttataattattatgatgacgaaaaagagaaactgcagattgttgagatgcccctcgctcataagctgagctcactgatcattcttatgccgcaccatgtagaacctctggaaagactggagaaactgcttaccaaggaacaacttaagatttggatgggaaaaatgcaaaaaaaagccgtcgctatttcactccccaaaggtgtcgttgaagtgacgcatgacctacaaaaacacttagcgggactgggtctgacagaggcgattgacaagaataaagctgacttatctcgaatgtctggaaagaaagatctgtacctggcatccgtgttccacgccactgcctttgagctggacactgacggcaacccatttgaccaggatatctatggcagagaagagcttcgaagccctaagcttttttacgccgaccatccttttatatttctggtgcgggatactcagtctgggtccttactgtttattggccgcttggtgcgcccaaaaggtgataaaatgagagacgaactatag

SEQ ID NO: 342663 - DNA, 744 bp, Artificial Sequence
  derived and/or modified sequence
atgcggtctctgcttcttctgtctgccttctgtctgctggaggcagctctggctgcggaagtaaagaaacctgccgctgcagcagcccctgggaccgccgaaaaattgagccccaaggctgcgacactggcagaaaggagcgccggcttagcttttagtctttatcaggcaatggcaaaagatcaggccgtagaaaatatcttggtgagcccagtcgtcgtggcgtcctccttgggcctggttagcttaggcggaaaagcaacaacagcctcgcaagcaaaggccgttctctctgccgaacagcttagagatgaagaagttcacgccggtctcggcgaactacttaggtcactctctaacagtacggcccggaatgtgacatggaaattagggagtagattgtacggccccagtagcgtctctttcgcagacgacttcgttcggtccagtaagcagcattacaattgtgaacattcaaagatcaactttcgtgataagagaagcgccctacagtccatcaatgagtgggcggcgcagaccactgacggaaaactgccagaagtcacaaaagatgtggagcgtactgacggcgcactgctagtgaacgccatgttctttaaaccacactgggatgaaaagtttcaccacaaaatggtcgataaccgcgggttcatggttacacgtagctacacagtcggagtcatgatgatgcaccgtaccgggctctacaactattatgactag

SEQ ID NO: 342664 - DNA, 750 bp, Artificial Sequence
  derived and/or modified sequence
atgcgaagcctgctgttacttagtgctttctgtttgctggaagctgccctcgcggccgaagtgaaaaagcctgctgccgcagccgcgcccggaactgccgagaaactctcacccaaggccgccactttagctgaacgcagcgccggattggcattctcactctatcaggccatggccaaggatcaagctgttgagaacattctggtgtctcctgtcgttgttgccagctcccttgggctcgtttctctcggaggtaaggcgacaactgcatctcaagcaaaagcagtgctctcagcggagcaacttcgcgacgaggaagtgcacgcagggcttggtgagcttttacggagcctcagcaatagcactgctcggaacgtaacgtggaagctcggcagtcggttatacggaccatctagtgtttcgtttgccgatgattttgtgaggagttccaagcagcactataattgtgaacacagtaagattaattttcgagacaaaaggagtgcccttcagtctattaatgaatgggccgcacagaccacggatgggaaactgcctgaagtcacgaaggatgtcgagagaacagatggagctttgctcgtcaatgccatgttcttcaagccacattgggatgaaaagtttcaccacaaaatggtagataatcgcggcttcatggtgacaagatcctacacagtgggtgtgatgatgatgcataggaccggcctgtacaactactatgacgacgaatag

SEQ ID NO: 342665 - DNA, 612 bp, Artificial Sequence
  derived and/or modified sequence
atgcgtagcctgctactgttgtccgccttctgcctcttggaagccgcccttgccgccgaggtgaagaaacccgcagccgcagcagccccagggaccgctgagaaactttcacctaaagcagctactctggcggagaggagcgctggtctagcattctctctctatcaggctatggctaaagatcaggccgtggagaacattttggtgtctcccgtggtagtggcctcatcgctcgggttagtatctctaggcggaaaagctactacagcttcacaggcaaaggcagtgctgagcgccgagcaactgagagatgaggaggtccacgcgggcttaggggagctccttcgctccttaagtaactcaactgcacggaatgttacatggaaacttgggtctagattgtacggtcccagttcagtttcattcgctgatgatttcgtacgatcctcaaagcaacattacaattgcgaacacagcaaaatcaactttcgcgacaagcggagcgcactccagagcattaacgagtgggcggcccaaacaaccgacggtaaacttccagaggtgactaaggatgtggagagaactgacggagctttgctggtgaacgcctag

SEQ ID NO: 342666 - DNA, 492 bp, Artificial Sequence
  derived and/or modified sequence
atgaggtcccttctgctcctgtctgcattttgtttgctggaggccgcccttgctgcagaagtgaaaaaacctgccgcagctgcagcgccaggcaccgccgaaaagctaagccctaaggcagcaacattggctgagcgatcagccgggttggctttctctctctatcaggctatggccaaagaccaggccgttgagaacatactcgtatctccagtggtggtagctagtagtcttggacttgtgtctctgggaggtaaggctactaccgcctctcaggctaaggccgtattatcagccgagcaactccgtgacgaagaggtccacgcaggtctgggagaactcttgcgatctctgtcaaattcaactgctcggaacgtcacttggaagctgggaagtcggttgtatggaccttcttctgtgtcattcgctgatgactttgtgcgcagttccaagcagcactataattgcgagcattctaaaatcaacttttag

SEQ ID NO: 342667 - DNA, 504 bp, Artificial Sequence
  derived and/or modified sequence
atgagatcccttctcctactctccgccttctgtctgctggaagctgcacttgccgccgaagtcaaaaagcctgctgccgcagctgcgccagggaccgccgaaaaactgagtcccaaagccgcgaccctggcagaacggtcggccggccttgccttttctctctaccaagcaatggcaaaggatcaagctgtcgagaatattctggtgagcccagtcgtcgtcgcttcatccctgggcctggtgtctctgggaggtaaggctacaaccgcgtctcaggcaaaagcagtcctatcagctgagcagctgcgggacgaagaagtacacgccgggttgggcgagctactacgatctctgagcaactccaccgccagaaacgtgacttggaaactcggctcacgcctgtacggcccgtcctctgtgagcttcgccgacgattttgttagatcgagcaagcaacattacaactgtgagcacagtaagatcaattttcgggacaaacgttag

SEQ ID NO: 342668 - DNA, 975 bp, Artificial Sequence
  derived and/or modified sequence
atgaggtcattgctgctgttgagcgcattttgcctccttgaagctgccctcgccgctgaggttaagaagcctgccgcagccgcagcacctgggacagctgagaaactgtccccaaaagccgcaaccctcgcagagcgaagcgccggacttgctttctctctgtatcaggccatggccaaggaccaagcagtggagaacatcctggtcagtccagtggtggtggcttcatctctgggcctagtctcactgggagggaaggccacgactgccagccaagccaaggccgtcctgtccgctgagcaattacgcgatgaagaggttcacgctggcctgggcgagctcctgcgttcattaagcaacagtaccgcgcgcaatgtgacctggaaattgggatccagactctacggccctagctctgtgtccttcgccgatgactttgttaggtcctccaagcagcactataactgtgagcattctaaaatcaacttcagagacaagcgctccgccctgcaatcaattaacgagtgggctgctcagacaaccgacgggaagctgccagaggtcaccaaagatgtggagaggacagatggcgccttgctggttaatgctatgttctttaaaccgcactgggatgaaaaatttcatcacaaaatggtggacaataggggatttatggttacacgttcctacactgtgggggtgatgatgatgcatcgaacaggcttgtacaattattacgacgatgaaaaagagaaacttcagattgtggaaatgccgctggcccacaagctttcctctctcataattctcatgccacaccatgtggaaccactcgagcgtttagaaaaactgcttactaaggaacagttaaaaatttggatgggaaaaatgcagaagaaggctgtcgccatttccctccctaagggcgttgtagaggttacccatgatctccaggtgagaggtgggcccgcttag

SEQ ID NO: 342669 - DNA, 888 bp, Artificial Sequence
  derived and/or modified sequence
atgcggtcattgctactattgtctgctttttgcctgctggaagctgcgctggcagccgaagtgaagaagcctgccgctgccgcagcccctggcactgcggagaaactttcccctaaggctgcgacactcgcggagcgctccgcaggccttgctttctcattataccaagctatggccaaagatcaagccgttgaaaatatcctggtctcccctgttgtggtggcctcgagcctgggattagtctccctcggaggaaaggccacaaccgccagtcaagcgaaggctgtcctgtcagccgaacagcttagagacgaagaggtgcacgcgggactcggggaactgctccggagcttgagtaatagtacagcccgaaacgtcacttggaaactgggctcaagactctacggccctagctccgtctcattcgccgacgactttgtcaggtccagcaagcaacattacaactgtgaacattccaaaatcaactttcgcgataagagatcagccctacaaagtattaatgaatgggccgcccagacaacagatggtaaattgccggaggtgacgaaggacgtggagaggacggacggagccctgctggtcaatgccatgttctttaagccccactgggacgaaaaattccatcacaaaatggtcgacaatcgcggattcatggttacaaggtcttacaccgtgggcgtgatgatgatgcatagaaccggcctctacaattattatgacgacgaaaaagaaaaactgcagatcgttgaaatgcctctagctcacaagctctcttctctgattattcttatgcctcaccatgtggagccattggaacgcctcgagaagctgctaaccaaagaacagctgaagatatggatggggtag

SEQ ID NO: 342670 - DNA, 453 bp, Artificial Sequence
  derived and/or modified sequence
atgaggagtctgctcctattgtccgctttttgcctgctcgaggcggccctggcagctgaagtcaaaaagcccgccgcagccgccgcccctggcacagccgagaagctgtcccctaaggctgccactctggcagagcgtagcgccggtctggcattcagtttatatcaagcaatggccaaagaccaggccgtcgaaaacatcctcgtaagtcccgttgtggtggcctcttccttaggactggtctccctcggtggtaaagcaacaaccgcttcacaggctaaagcagtccttagcgccgagcagctgcgcgatgaggaagtgcacgcaggcctcggagagctcctaaggtccctctctaattctactgcccgtaatgtgacgtggaaactgggctctcgattatacggcccttcttctgtatcattcgctgatgacttcgtcagaagtagttag

SEQ ID NO: 342671 - DNA, 1257 bp, Artificial Sequence
  derived and/or modified sequence
atgcgcagcttacttctgctctctgccttctgcctgctggaagccgcactggctgcagaagtgaaaaagccagcagctgccgcagcccccggcacggctgaaaaactgagtccgaaagcagcaaccctagctgaaaggtctgccgggctggcttttagcctgtatcaggccatggctaaggaccaggcagtggagaatatcctggtctcaccagttgttgtggcatcgtcacttggcttagtgtcactcgggggaaaagccaccaccgcaagtcaagctaaggctgttcttagcgctgaacagctgcgcgacgaagaggtgcatgcagggttaggcgaactcctgcggtctttgtctaatagcacagcccgaaacgtgacctggaagctgggctctcgtctctatgggccatctagtgtgtcattcgcagacgacttcgttcggagctccaagcagcactacaactgcgaacacagtaaaatcaattttcgggataagagatccgcattacagtcgatcaacgagtgggccgcacaaacaacagacgggaagctcccagaggtgacgaaggacgttgagaggaccgatggagccctgctagtgaatgctatgttttttaagccacactgggacgagaaatttcaccataagatggtggataacaggggatttatggtgacccgctcctatactgtgggcgtaatgatgatgcaccggaccggactatacaattactatgacgatgaaaaggaaaagttacagatcgttgagatgccgctcgcacataaattaagctcccttattatcttgatgccccatcacgtggagccccttgaaagattggaaaaacttctgacaaaagaacagctgaagatatggatgggtaaaatgcaaaagaaagctgtcgccatttccctgcctaagggcgtagtcgaggtgacacatgatctccagaagcacttggcgggtttaggattgaccgaagctattgacaagaataaagccgacctcagccgcatgagcggtaagaaggatctgtatctcgcctctgtatttcacgccacagcgttcgagctagacactgacggcaatccctttgaccaagacatttatggacgcgaggaattgcgtagtcctaaactcttttacgccgatcatcctttcatcttcctagtaagagacactcagtcgggcagtctcctttttattggtagactcgtccgaccgaaaggagataaaatgcgagacgagctgtag

SEQ ID NO: 342672 - DNA, 1257 bp, Artificial Sequence
  derived and/or modified sequence
atgaggagtctactgcttctttccgccttctgcctcctggaagccgccctggccgctgaggtgaaaaaacctgccgccgccgccgcacctggtacagccgaaaaactgtcccccaaagcagccactctggccgaacggagtgccggactggctttttcgctctaccaagcaatggcaaaagaccaggccgtggagaatatccttgtttctccggtagttgtcgcaagctcactgggattggtctccctcgggggaaaagcaaccaccgcttcgcaggccaaggccgtgttgtccgctgagcaactacgggatgaagaggtgcacgcaggactgggggagctgttgcgttcattatctaactccacagccaggaatgtgacatggaagctaggctcaagactttatggaccttcctcggtctcctttgccgacgatttcgtccggtcaagcaagcagcactacaattgtgaacactcaaagatcaactttagggataagaggtcagcactgcagagcatcaacgagtgggccgcccagacaaccgacggcaaactcccagaagtcactaaagacgtggaaagaacagacggcgctttactggtcaacgccatgttttttaaaccacattgggacgaaaagttccaccacaaaatggtggacaaccgcggattcatggtaactcgcagttatacagttggtgtgatgatgatgcaccggactggcctctacaactattacgatgacgagaaggagaagttgcagatcgtagagatgccactggcccataaattaagtagccttatcatcctgatgccccaccatgtagaacccctcgaaaggctggaaaaacttctgaccaaggaacagttaaagatctggatgggtaaaatgcagaagaaggctgttgccattagcctgcccaaaggtgtcgttgaggttactcatgatctgcagaagcatctcgccggtctgggactcaccgaagcgatcgacaagaataaagcagatctctcaaggatgtcaggtaagaaggatttgtatctggcatcagtttttcatgccaccgcattcgagctcgatactgacggcaatccctttgatcaagatatctacggccgcgaagaactgcgttccccgaaattattttatgccgaccacccatttatttttttggtacgggatacccaatcaggatccctccttttcataggccgattagttagacctaaaggcgacaaaatgagggacgagctgtag

SEQ ID NO: 342673 - DNA, 1194 bp, Artificial Sequence
  derived and/or modified sequence
atgagatcattattgttgctttcagctttctgcctgcttgaggctgccttagccgcggaagtcaagaaacccgccgccgcagctgctccaggaactgccgaaaagttaagtcctaaggccgccacattggccgagcgttcagctggcctcgccttttccttatatcaggcaatggccaaagaccaggccgtagaaaatattctggtatcacccgtagtggttgcttcttcattgggcttggtctcactgggaggtaaagctactactgcttcccaggcaaaggctgtgctgtccgcagagcagctccgtaatgttacatggaaattaggatcaaggctctacggcccttcctctgtgtcattcgcggatgacttcgttcgaagctccaagcaacactacaactgcgaacacagcaaaatcaacttcagagataagcgatccgctcttcagagtataaacgaatgggccgctcagactactgacgggaaactccctgaagtaactaaggatgtcgagcggacagacggcgcgctgctggtaaacgccatgtttttcaagccccactgggatgagaagtttcaccacaagatggtcgataatcggggatttatggtgacaagaagttacaccgtgggcgtaatgatgatgcatcgcacaggcttatacaattactacgacgatgaaaaagaaaaactgcaaattgtcgaaatgccgttagcccacaagcttagctcacttatcattctgatgcctcaccacgtagaacccctggaaaggttggaaaaactattaacaaaggagcagctgaaaatatggatgggtaaaatgcagaagaaggccgtggctatctcactgcctaaaggcgtagtggaggtgacacatgacttacagaagcacctcgccgggttaggactcactgaagcaatcgataagaataaggctgacctgagcagaatgtctgggaagaaggatctgtatctggctagcgtgtttcatgcaaccgccttcgagcttgatactgacggtaatcctttcgaccaggatatctatggccgggaagaactgcgatcacccaaattgttctatgctgaccaccctttcatttttcttgttagagatacccagagcggcagtttgctcttcatcggacggctggtgcgcccaaaaggagataagatgcgcgatgaactgtag

SEQ ID NO: 342674 - DNA, 1257 bp, Artificial Sequence
  derived and/or modified sequence
atgcgatcactccttcttctgtcagccttttgcctcctggaggcggctctcgccgctgaagtcaagaagcccgcagccgccgcagctcccggcaccgctgaaaaactctctcccaaggccgccaccctcgccgaaagatccgctgggcttgcattttccctttaccaggctatggccaaggatcaggcagtggaaaatatcctggtctcaccagttgtggttgccagttccctaggcttggtgtccctaggcggcaaagccacaactgccagccaagccaaagcagtgttatccgctgagcagcttagagacgaagaggtgcatgcagggttgggggagctcctgcggagcctgagcaactcgactgccagaaacgtcacctggaaattgggtagcagattatacggaccttctagcgtgagttttgccgacgactttgttcggagttctaagcaacactacaattgcgagcacagcaagatcaactttagagataaacgtagcgcattgcaaagcatcaacgaatgggccgcccagacaaccgatggtaagttgcccgaagtcactaaggatgtggagagaacagatggggccttactggtgaatgctatgtttttcaaaccacactgggatgagaagtttcaccacaagatggtggacaatagagggtttatggtcactagaagttatacagttggggtaatgatgatgcaccggactggactttacaattattatgatgacgaaaaggagaagcttcaaatagtcgaaatgccacttgcgcacaaactgagcagcttaatcattctgatgccgcaccacgtcgaacctttggaacggctcgaaaagttattgaccaaggaacagctcaaaatctggatgggcaaaatgcagaaaaaagccgtggctatcagtctgcccaaaggtgttgtggaagtgacacacgacctgcaaaagcacctggcgggattaggtcttacagaagcgattgacaagaacaaagccgacctgtcacggatgtctggcaagaaagatctataccttgcctcagtgttccacgccaccgcattcgagctagacacagatggcaacccattcgatcaggacatttacggacgagaggagctaagatcccccaaattattctatgccgatcacccttttatttttctggtgagagatacacaatcaggaagcctgctgtttataggcagattagtgcgacctaaaggagataaaatgagagacgaactgtag

SEQ ID NO: 342675 - DNA, 744 bp, Artificial Sequence
  derived and/or modified sequence
atgcgttctctgcttttgttatcagccttctgcttactcgaagcagctctggcggctgaagtgaagaaacccgccgccgccgcagcgccaggaacggccgaaaagctgtcgccaaaagcagctaccctggcagaaaggagtgccggactggcattctccctttaccaagccatggctaaagatcaggcagtagagaatattttggtaagcccagttgtagtcgcctcatcccttggactagtttccctgggcggaaaagctacgacagcatctcaggcaaaagccgtgctcagtgcagagcagctcagggatgaggaagtgcatgccgggctgggggagctgctaaggagcttgtcaaactctactgccagaaatgtcacctggaaattgggatcccgcctttacggcccatcttccgtatcattcgccgatgatttcgtccgatcctccaaacagcattataactgtgaacatagtaaaataaactttagagataaacgctctgccctgcagtctatcaacgagtgggctgcacagaccaccgacggaaaattgcctgaagtgactaaggacgtcgagagaaccgatggcgctctgctcgtgaacgccatgttttttaagccgcactgggacgaaaagttccatcacaaaatggtggataacaggggatttatggtaacaagaagctatactgtgggggtgatgatgatgcataggactggattgtacaattattatgattag

SEQ ID NO: 342676 - DNA, 750 bp, Artificial Sequence
  derived and/or modified sequence
atgcgaagcctgctgttacttagtgctttctgtttgctggaagctgccctcgcggccgaagtgaaaaagcctgctgccgcagccgcgcccggaactgccgagaaactctcacccaaggccgccactttagctgaacgcagcgccggattggcattctcactctatcaggccatggccaaggatcaagctgttgagaacattctggtgtctcctgtcgttgttgccagctcccttgggctcgtttctctcggaggtaaggcgacaactgcatctcaagcaaaagcagtgctctcagcggagcaacttcgggatgaagaggtgcatgccggtctcggggagttactgagatccctgtcgaatagtaccgcacgaaacgtgacctggaaattaggaagtaggctttacgggcccagttcagtatcatttgccgatgacttcgtccggtcgagtaaacagcattacaattgcgagcacagtaagataaattttcgagataagcggagtgctctgcagagcattaacgagtgggccgctcaaaccaccgatggcaaactgccagaagtgactaaagacgtagaaagaactgatggagctcttctggtgaacgccatgttctttaagccacattgggacgaaaaattccaccacaagatggtagataaccggggatttatggtgaccaggagttacactgtaggagtgatgatgatgcataggacgggattgtataactactacgacgatgaatag

SEQ ID NO: 342677 - DNA, 612 bp, Artificial Sequence
  derived and/or modified sequence
atgcggtccctgcttttactatctgccttttgtttattagaagcagccttggctgcagaagtgaaaaagcccgcagccgctgccgcacctggcacggccgaaaagttaagcccgaaggctgcaaccctggcggaacgctcagccggtttggcattctccctctatcaggctatggcaaaggaccaggctgttgaaaatattctggtctcccccgtagtggtcgcctccagtctcggattggtgtctctgggcgggaaggcaacaacagcatcccaggccaaagccgtcctctctgcagagcagcttcgtgatgaggaagtgcacgctggactgggagaactgctgcgaagtctatccaattccaccgcaagaaacgtaacctggaaactgggaagccgcctgtacggacctagctctgtatcatttgccgacgactttgtacgaagtagcaagcagcattataactgtgaacattctaagatcaattttcgagataaaaggtccgccttacagtccattaacgagtgggcagcacagaccactgacggaaaactgcctgaggttactaaggatgtcgagcgtaccgatggggcactgctggtgaacgcctag

SEQ ID NO: 342678 - DNA, 492 bp, Artificial Sequence
  derived and/or modified sequence
atgaggtcgttgcttctgctctctgctttctgcctcctggaagctgctttagccgctgaggtgaagaaaccggcagcagcagcagcacccggcacagccgaaaaactgtccccaaaggccgctacgctcgctgaaaggagcgctgggctcgccttctctctttaccaagccatggccaaggaccaagccgttgaaaatatcctggtatcccctgtcgttgtcgcctcaagcctcggactcgtatctctgggcggaaaggcaacaactgcctctcaggccaaagccgtcctgtctgcggagcagctgagagacgaagaggtgcatgccggattaggggaacttttaaggtctctgagtaattccaccgcccgcaacgtcacctggaaacttggtagccggctgtatggacctagcagcgtttcatttgcagatgatttcgtgcgatcaagcaagcagcattataattgtgagcactccaagattaacttctag

SEQ ID NO: 342679 - DNA, 504 bp, Artificial Sequence
  derived and/or modified sequence
atgagatcccttctcctactctccgccttctgtctgctggaagctgcacttgccgccgaagtcaaaaagcctgctgccgcagctgcgccagggaccgccgaaaaactgagtcccaaagccgcgaccctggcagaacggtcggccggccttgccttttctctctaccaagcaatggcaaaggatcaagctgtcgagaatattctggtgagcccagtcgtcgtcgcttcatccctgggcctggtgtctctgggaggtaaggctacaaccgcgtctcaggcaaaagcagtcctatcagctgagcagctgagagatgaggaagtccatgccggactgggggaactcttgagatcattgtctaactctaccgcccgaaatgtgacctggaaactgggcagcagactttatggacccagctcagtgtctttcgccgatgactttgtcaggtcttccaaacagcattataattgcgaacatagtaagatcaactttagagacaagcgatag

SEQ ID NO: 342680 - DNA, 975 bp, Artificial Sequence
  derived and/or modified sequence
atgagatctctgctactgctctctgccttttgcctgctcgaagccgccctggccgctgaagtgaaaaaacccgcggccgctgcagcaccgggcaccgccgagaagctttcacccaaggcagcaactctcgccgaacgcagcgctggccttgccttttctctgtaccaagccatggccaaagaccaggctgtcgagaacattctcgtgtctccagttgtcgtggcatcctcactgggtctcgtgagtctcggcggcaaagctactacagctagccaagccaaagccgtactctctgctgaacagctgcgagatgaagaggtccacgccgggctgggggaactccttagatccctctccaattctacggcccgtaatgttacatggaaattaggatcgcgtctgtatggaccgtctagcgtgtcctttgccgatgacttcgtacgctcatctaaacagcactataactgtgagcatagtaaaatcaattttagggataaaagatctgcattgcaaagcattaatgaatgggccgcccaaactaccgacggcaagctccccgaagtgaccaaagacgttgagaggactgacggagccttgctggtgaatgcaatgttttttaaacctcattgggacgagaaatttcaccacaaaatggttgacaaccggggattcatggtaacacgctcatacacagtgggggtcatgatgatgcatagaaccggattatacaactactacgatgacgagaaggagaagttgcaaatagttgaaatgccattagcacataaactatcatctctaatcattctgatgcctcaccacgtggagcccttagagcgtctcgagaaacttttgaccaaggagcagcttaagatttggatgggcaaaatgcagaaaaaggccgtggcgatctcgttgcccaaaggagtggtggaggttacccatgatctgcaagtgagaggcggaccagcgtag

SEQ ID NO: 342681 - DNA, 888 bp, Artificial Sequence
  derived and/or modified sequence
atgcgctctctgcttctattgtcagccttctgcctccttgaagccgccttggctgccgaagtcaaaaagcctgctgcagcggccgcccccgggactgccgagaaactatctccaaaggccgctactctggccgaacggtcagctgggctggcattttcactctatcaagcaatggctaaagaccaggccgtagagaacattctggtgtcccctgtggtggtggcatcgtcactgggcctagttagtctgggtggcaaagctacgacagcatcccaggctaaagccgtgttatcggccgaacagcttcgcgacgaggaagtgcacgccggactgggagagctccttcgctccttatccaactctaccgctagaaatgtaacatggaagctgggctctcggctgtacggtccatccagtgtgtctttcgccgacgactttgtgagatcctccaaacagcactacaattgcgaacactccaaaatcaatttccgcgataagagatctgcccttcaatcaattaacgagtgggccgcccagaccaccgacggaaaactgcctgaagtgacgaaggatgttgagaggaccgatggcgcccttctcgttaatgcaatgttctttaagcctcattgggacgaaaagtttcatcacaaaatggtcgataatcgggggtttatggtcacgcgatcttacaccgtcggtgtgatgatgatgcaccgcaccgggctgtacaactattacgacgacgaaaaagaaaagctgcaaattgtggagatgccattggcacacaagctgtcctcccttatcattctaatgccacatcatgtagagccgcttgagagactggagaaattgctaactaaggaacagttgaaaatatggatggggtag

SEQ ID NO: 342682 - DNA, 453 bp, Artificial Sequence
  derived and/or modified sequence
atgaggagtctgctcctattgtccgctttttgcctgctcgaggcggccctggcagctgaagtcaaaaagcccgccgcagccgccgcccctggcacagccgagaagctgtcccctaaggctgccactctggcagagcgtagcgccggtctggcattcagtttatatcaagcaatggccaaagaccaggccgtcgaaaacatcctcgtaagtcccgttgtggtggcctcttccttaggactggtctccctcggtggtaaagcaacaaccgcttcacaggctaaagcagtccttagcgccgagcaattacgagatgaagaggtacatgccggtcttggagagttactgagaagtttatctaattcaaccgctagaaacgtcacctggaagctggggtcccgtctttacggtccgtcaagcgtatcatttgccgacgacttcgtgaggtcgagctag

SEQ ID NO: 342683 - DNA, 1257 bp, Artificial Sequence
  derived and/or modified sequence
atgagatcactcttgctgcttagtgcattttgtttgctggaggctgctttggccgccgaagttaaaaaaccagccgcagccgctgctcctggcacagcagaaaagctttctcctaaagcggcaaccctggccgagagatcagccggtctcgccttctccctgtaccaagccatggcaaaggatcaggctgtggaaaacattcttgtatctccagtcgttgttgcatcctccctgggactggtttctcttggcgggaaggcaactacagcctctcaagctaaagctgtgctcagtgccgaacagctgagagacgaagaggtgcatgcggggctcggtgaactcttacggtcgctttcaaactccacagctcggaatgtcacttggaaactgggctctcggttgtatggtccatcttccgtatccttcgctgatgatttcgtgaggtcatcaaagcagcactataattgcgaacattccaagatcaacttccgcgataagagatccgcactgcaatcaattaatgagtgggccgcccagaccaccgatggcaagctgcccgaagtaaccaaagacgtggaacgaaccgatggagccctcttagtgaatgctatgttttttaagccacactgggacgagaaatttcaccataagatggtggataacaggggatttatggtgacccgctcctatactgtgggcgtaatgatgatgcaccggaccggactatacaattactatgacgatgaaaaggaaaagttacagatcgttgagatgccgctcgcacataaattaagctcccttattatcttgatgccccatcacgtggagccccttgaaagattggaaaaacttctgacaaaagaacagctgaagatatggatgggtaaaatgcaaaagaaagctgtggctatcagtctccccaaaggggtggttgaagtgactcatgatttacagaagcacctggctggattgggactgacagaagctatagataaaaacaaggcggatcttagccgaatgtcaggcaagaaggatctctatttagcatcagtgttccacgcgaccgcatttgagctcgacacagacgggaacccatttgaccaggatatatacggccgagaagaattaagatcacccaagctgttttatgccgaccacccatttatatttctcgttcgcgacacccagagtggctctctgctgttcataggtagattggttagacccaagggagataagatgcgggacgagttatag

SEQ ID NO: 342684 - DNA, 3391 bp, Artificial Sequence
  derived and/or modified sequence
aatctgggggtgcgcgagggagtaagaggggcgaggggaccctgcgaagcgttgggtgccgagccagagcctacaaattggagtcctcggcactttgggggccgctggagggtttggaatcgagagcccagggctagccagtgatggtgccagctgagggctagggcggagatcggagccgggttgggagtccgtgcactcggaggactgggaaaaagtgcagggacccctaaaaggtggtggtggcagatacgagactaggtgctgtgtaaagggggctgggggcagagagcagagcctctgcggaaagaaacagaggaggaaggagatgggtctggtgcctcttcccgcaagggtagggaggataggccggcctcgcagttccaggtcacttccgttctggggttgaggctcaggggcagcggtgattggtggcccagcctcctcacaggcttgctgagggaatttgagcttccggtggtgggaaaggaggtgaaatcgtctcgactcctggggtccgtgtgctctggtagaagtgggcgacagtggctcaatttctgatcagcagcttgcagcctagatgatggcagccaaaggaaagacttggccagcgaggctccctaccactccgaaaaaagagagtgggggtcagcagggtctgctctgctctggggattaaggggctgactagaaggatttgagtctttccttctgtccactgccacagggttcttggagtaactgcagggtttaaactgcagggtctaacttccagaggctggggttccctgccccccagcttagagacattcctgaggtggctgaagagcaggaaggagaatgaatgcacttccagactggcccagagtctcagcccctcctcttccttgtttcccgctggtccctctgggctgtacggcccggatggaggcctgaggaaaatgagggggctttggttctccggaattccggccggggccacaccctcctgtcttcagatggttcatgtacccatccccccttcccgtcctctcctttgtctcctctgtcaccgggactcccagcagagattttttttttgtactggctgtgtaacaggacaccgcatgcagccctcaggaggggctctgtgcttctgtgaggaaggacccctgtgctgggaaggcagacccctgtttatcccgagggacctggggtgaccccctgccctggccttgtttctcccattttacagtgaggtggtcgatctccaaggtccctgtagattggggactggttgtgccctctgcgccaggggcctcctcaccatctctcctttgccggctcccgccctcttcactcttctgttttctttcagaatgaaaaaggcaggcattgacctccctctgaggcagtttccaggcccaccgtggtgcacgcaaaccacttcctggccatgcgctccctcctgcttctcagcgccttctgcctcctggaggcggccctggccgccgaggtgaagaaacctgcagccgcagcagctcctggcactgcggagaagttgagccccaaggcggccacgcttgccgagcgcagcgccggcctggccttcagcttgtaccaggccatggccaaggaccaggcagtggagaacatcctggtgtcacccgtggtggtggcctcgtcgctagggctcgtgtcgctgggcggcaaggcgaccacggcgtcgcaggccaaggcagtgctgagcgccgagcagctgcgcgacgaggaggtgcacgccggcctgggcgagctgctgcgctcactcagcaactccacggcgcgcaacgtgacctggaagctgggcagccgactgtacggacccagctcagtgagcttcgctgatgacttcgtgcgcagcagcaagcagcactacaactgcgagcactccaagatcaacttccgcgacaagcgcagcgcgctgcagtccatcaacgagtgggccgcgcagaccaccgacggcaagctgcccgaggtcaccaaggacgtggagcgcacggacggcgccctgctagtcaacgccatgttcttcaagccacactgggatgagaaattccaccacaagatggtggacaaccgtggcttcatggtgactcggtcctataccgtgggtgtcatgatgatgcaccggacaggcctctacaactactacgacgacgagaaggaaaagctgcaaatcgtggagatgcccctggcccacaagctctccagcctcatcatcctcatgccccatcacgtggagcctctcgagcgccttgaaaagctgctaaccaaagagcagctgaagatctggatggggaagatgcagaagaaggctgttgccatctccttgcccaagggtgtggtggaggtgacccatgacctgcagaaacacctggctgggctgggcctgactgaggccattgacaagaacaaggccgacttgtcacgcatgtcaggcaagaaggacctgtacctggccagcgtgttccacgccaccgcctttgagttggacacagatggcaacccctttgaccaggacatctacgggcgcgaggagctgcgcagccccaagctgttctacgccgaccaccccttcatcttcctagtgcgggacacccaaagcggctccctgctattcattgggcgcctggtccggcctaagggtgacaagatgcgagacgagttatagggcctcagggtgcacacaggatggcaggaggcatccaaaggctcctgagacacatgggtgctattggggttgggggggaggtgaggtaccagccttggatactccatggggtgggggtggaaaaacagaccggggttcccgtgtgcctgagcggaccttcccagctagaattcactccacttggacatgggccccagataccatgatgctgagcccggaaactccacatcctgtgggacctgggccatagtcattctgcctgccctgaaagtcccagatcaagcctgcctcaatcagtattcatatttatagccaggtaccttctcacctgtgagaccaaattgagctaggggggtcagccagccctcttctgacactaaaacacctcagctgcctccccagctctatcccaacctctcccaactataaaactaggtgctgcagcccctgggaccaggcacccccagaatgacctggccgcagtgaggcggattgagaaggagctcccaggaggggcttctgggcagactctggtcaagaagcatcgtgtctggcgttgtggggatgaactttttgttttgtttcttccttttttagttcttcaaagatagggagggaagggggaacatgagcctttgttgctatcaatccaagaacttatttgtacattttttttttcaataaaacttttccaatgac

SEQ ID NO: 342685 - DNA, 974 bp, Artificial Sequence
  derived and/or modified sequence
gaaatcgtctcgactcctggggtccgtgtgctctggtagaagtgggcgacagtggctcaatttctgatcagcagcttgcagcctagatgatggcagccaaaggaaagacttggccagcgaggctccctaccactccgaaaaaagagagtggggaatgaaaaaggcaggcattgacctccctctgaggcagtttccaggcccaccgtggtgcacgcaaaccacttcctggccatgcgctccctcctgcttctcagcgccttctgcctcctggaggcggccctggccgccgaggtgaagaaacctgcagccgcagcagctcctggcactgcggagaagttgagccccaaggcggccacgcttgccgagcgcagcgccggcctggccttcagcttgtaccaggccatggccaaggaccaggcagtggagaacatcctggtgtcacccgtggtggtggcctcgtcgctagggctcgtgtcgctgggcggcaaggcgaccacggcgtcgcaggccaaggcagtgctgagcgccgagcagctgcgcgacgaggaggtgcacgccggcctgggcgagctgctgcgctcactcagcaactccacggcgcgcaacgtgacctggaagctgggcagccgactgtacggacccagctcagtgagcttcgctgatgacttcgtgcgcagcagcaagcagcactacaactgcgagcactccaagatcaacttccgcgacaagcgcagcgcgctgcagtccatcaacgagtgggccgcgcagaccaccgacggcaagctgcccgaggtcaccaaggacgtggagcgcacggacggcgccctgctagtcaacgccatgttcttcaagccacactgggatgagaaattccaccacaagatggtggacaaccgtggcttcatggtgactcggtcctataccgtgggtgtcatgatgatgcaccggacaggcctctacaactactacgacga

SEQ ID NO: 342686 - DNA, 882 bp, Artificial Sequence
  derived and/or modified sequence
ggagcgggctaagagtagaatcgtgtcgcggctcgagagcgagagtcacgtcccggcgctagcccagcccgacccaggtgaggggcgggagacgcctgcgcccaccgtggtgcacgcaaaccacttcctggccatgcgctccctcctgcttctcagcgccttctgcctcctggaggcggccctggccgccgaggtgaagaaacctgcagccgcagcagctcctggcactgcggagaagttgagccccaaggcggccacgcttgccgagcgcagcgccggcctggccttcagcttgtaccaggccatggccaaggaccaggcagtggagaacatcctggtgtcacccgtggtggtggcctcgtcgctagggctcgtgtcgctgggcggcaaggcgaccacggcgtcgcaggccaaggcagtgctgagcgccgagcagctgcgcgacgaggaggtgcacgccggcctgggcgagctgctgcgctcactcagcaactccacggcgcgcaacgtgacctggaagctgggcagccgactgtacggacccagctcagtgagcttcgctgatgacttcgtgcgcagcagcaagcagcactacaactgcgagcactccaagatcaacttccgcgacaagcgcagcgcgctgcagtccatcaacgagtgggccgcgcagaccaccgacggcaagctgcccgaggtcaccaaggacgtggagcgcacggacggcgccctgctagtcaacgccatgttcttcaagccacactgggatgagaaattccaccacaagatggtggacaaccgtggcttcatggtgactcggtcctataccgtgggtgtcatgatgatgcaccggacaggcctctacaactactacgacgacgagaa

SEQ ID NO: 342687 - DNA, 773 bp, Artificial Sequence
  derived and/or modified sequence
cgggactcccagcagagattttttttttgtactggctgtgtaacaggacaccgcatgcagccctcaggaggggctctgtgcttctaatgaaaaaggcaggcattgacctccctctgaggcagtttccaggcccaccgtggtgcacgcaaaccacttcctggccatgcgctccctcctgcttctcagcgccttctgcctcctggaggcggccctggccgccgaggtgaagaaacctgcagccgcagcagctcctggcactgcggagaagttgagccccaaggcggccacgcttgccgagcgcagcgccggcctggccttcagcttgtaccaggccatggccaaggaccaggcagtggagaacatcctggtgtcacccgtggtggtggcctcgtcgctagggctcgtgtcgctgggcggcaaggcgaccacggcgtcgcaggccaaggcagtgctgagcgccgagcagctgcgcgacgaggaggtgcacgccggcctgggcgagctgctgcgctcactcagcaactccacggcgcgcaacgtgacctggaagctgggcagccgactgtacggacccagctcagtgagcttcgctgatgacttcgtgcgcagcagcaagcagcactacaactgcgagcactccaagatcaacttccgcgacaagcgcagcgcgctgcagtccatcaacgagtgggccgcgcagaccaccgacggcaagctgcccgaggtcaccaaggacgtggagcgcacggacggcgccctgctagtcaacgcca

SEQ ID NO: 342688 - DNA, 587 bp, Artificial Sequence
  derived and/or modified sequence
tgagggaatttgagcttccggtggtgggaaaggaggtgaaatcgtctcgactcctggggcccaccgtggtgcacgcaaaccacttcctggccatgcgctccctcctgcttctcagcgccttctgcctcctggaggcggccctggccgccgaggtgaagaaacctgcagccgcagcagctcctggcactgcggagaagttgagccccaaggcggccacgcttgccgagcgcagcgccggcctggccttcagcttgtaccaggccatggccaaggaccaggcagtggagaacatcctggtgtcacccgtggtggtggcctcgtcgctagggctcgtgtcgctgggcggcaaggcgaccacggcgtcgcaggccaaggcagtgctgagcgccgagcagctgcgcgacgaggaggtgcacgccggcctgggcgagctgctgcgctcactcagcaactccacggcgcgcaacgtgacctggaagctgggcagccgactgtacggacccagctcagtgagcttcgctgatgacttcgtgcgcagcagcaagcagcactacaactgcgagcactccaagatcaacttccgcgac

SEQ ID NO: 342689 - DNA, 660 bp, Artificial Sequence
  derived and/or modified sequence
aagagtagaatcgtgtcgcggctcgagagcgagagtcacgtcccggcgctagcccagcccgacccaggtgaggggcgggagacgcctgcgtgcgtgcggcccgggggagcgccgagcaatctgggggcccaccgtggtgcacgcaaaccacttcctggccatgcgctccctcctgcttctcagcgccttctgcctcctggaggcggccctggccgccgaggtgaagaaacctgcagccgcagcagctcctggcactgcggagaagttgagccccaaggcggccacgcttgccgagcgcagcgccggcctggccttcagcttgtaccaggccatggccaaggaccaggcagtggagaacatcctggtgtcacccgtggtggtggcctcgtcgctagggctcgtgtcgctgggcggcaaggcgaccacggcgtcgcaggccaaggcagtgctgagcgccgagcagctgcgcgacgaggaggtgcacgccggcctgggcgagctgctgcgctcactcagcaactccacggcgcgcaacgtgacctggaagctgggcagccgactgtacggacccagctcagtgagcttcgctgatgacttcgtgcgcagcagcaagcagcactacaactgcgagcactccaagatcaacttccgcgacaagcg

SEQ ID NO: 342690 - DNA, 1358 bp, Artificial Sequence
  derived and/or modified sequence
aagagtagaatcgtgtcgcggctcgagagcgagagtcacgtcccggcgctagcccagcccgacccagaatgaaaaaggcaggcattgacctccctctgaggcagtttccaggcccaccgtggtgcacgcaaaccacttcctggccatgcgctccctcctgcttctcagcgccttctgcctcctggaggcggccctggccgccgaggtgaagaaacctgcagccgcagcagctcctggcactgcggagaagttgagccccaaggcggccacgcttgccgagcgcagcgccggcctggccttcagcttgtaccaggccatggccaaggaccaggcagtggagaacatcctggtgtcacccgtggtggtggcctcgtcgctagggctcgtgtcgctgggcggcaaggcgaccacggcgtcgcaggccaaggcagtgctgagcgccgagcagctgcgcgacgaggaggtgcacgccggcctgggcgagctgctgcgctcactcagcaactccacggcgcgcaacgtgacctggaagctgggcagccgactgtacggacccagctcagtgagcttcgctgatgacttcgtgcgcagcagcaagcagcactacaactgcgagcactccaagatcaacttccgcgacaagcgcagcgcgctgcagtccatcaacgagtgggccgcgcagaccaccgacggcaagctgcccgaggtcaccaaggacgtggagcgcacggacggcgccctgctagtcaacgccatgttcttcaagccacactgggatgagaaattccaccacaagatggtggacaaccgtggcttcatggtgactcggtcctataccgtgggtgtcatgatgatgcaccggacaggcctctacaactactacgacgacgagaaggaaaagctgcaaatcgtggagatgcccctggcccacaagctctccagcctcatcatcctcatgccccatcacgtggagcctctcgagcgccttgaaaagctgctaaccaaagagcagctgaagatctggatggggaagatgcagaagaaggctgttgccatctccttgcccaagggtgtggtggaggtgacccatgacctgcaggtaaggggtggcccagcctaggggcctgcaggccttggagccagggggaggtgcttgggggacccactcaccaattcagcaggtctgtcccaagaccccctggatgtccaggcagtgctgggctctgtgatgggggaagctggggcaggaggtgtgggccatgcccttgggaagatgatgataataccagcagctaaatataacggaacattcctgtatgctaggcgttcttctaagcactttatatgtattattatta

SEQ ID NO: 342691 - DNA, 998 bp, Artificial Sequence
  derived and/or modified sequence
gtgcggcccgggggagcgccgagcaatctggggaatgaaaaaggcaggcattgacctccctctgaggcagtttccaggcccaccgtggtgcacgcaaaccacttcctggccatgcgctccctcctgcttctcagcgccttctgcctcctggaggcggccctggccgccgaggtgaagaaacctgcagccgcagcagctcctggcactgcggagaagttgagccccaaggcggccacgcttgccgagcgcagcgccggcctggccttcagcttgtaccaggccatggccaaggaccaggcagtggagaacatcctggtgtcacccgtggtggtggcctcgtcgctagggctcgtgtcgctgggcggcaaggcgaccacggcgtcgcaggccaaggcagtgctgagcgccgagcagctgcgcgacgaggaggtgcacgccggcctgggcgagctgctgcgctcactcagcaactccacggcgcgcaacgtgacctggaagctgggcagccgactgtacggacccagctcagtgagcttcgctgatgacttcgtgcgcagcagcaagcagcactacaactgcgagcactccaagatcaacttccgcgacaagcgcagcgcgctgcagtccatcaacgagtgggccgcgcagaccaccgacggcaagctgcccgaggtcaccaaggacgtggagcgcacggacggcgccctgctagtcaacgccatgttcttcaagccacactgggatgagaaattccaccacaagatggtggacaaccgtggcttcatggtgactcggtcctataccgtgggtgtcatgatgatgcaccggacaggcctctacaactactacgacgacgagaaggaaaagctgcaaatcgtggagatgcccctggcccacaagctctccagcctcatcatcctcatgccccatcacgtggagcctctcgagcgccttgaaaagctgctaaccaaagagcagctgaagatctggatggggaa

SEQ ID NO: 342692 - DNA, 582 bp, Artificial Sequence
  derived and/or modified sequence
aatttgagcttccggtggtgggaaaggaggtgaaatcgtctcgactcctgggaatgaaaaaggcaggcattgacctccctctgaggcagtttccaggcccaccgtggtgcacgcaaaccacttcctggccatgcgctccctcctgcttctcagcgccttctgcctcctggaggcggccctggccgccgaggtgaagaaacctgcagccgcagcagctcctggcactgcggagaagttgagccccaaggcggccacgcttgccgagcgcagcgccggcctggccttcagcttgtaccaggccatggccaaggaccaggcagtggagaacatcctggtgtcacccgtggtggtggcctcgtcgctagggctcgtgtcgctgggcggcaaggcgaccacggcgtcgcaggccaaggcagtgctgagcgccgagcagctgcgcgacgaggaggtgcacgccggcctgggcgagctgctgcgctcactcagcaactccacggcgcgcaacgtgacctggaagctgggcagccgactgtacggacccagctcagtgagcttcgctgatgacttcgtgcgcagcagcaa

SEQ ID NO: 342693 - DNA, 2299 bp, Artificial Sequence
  derived and/or modified sequence
agtaggacccaggggccgggaggcgccggcagagggaggggccgggggccggggaggttttgagggaggtctttggctttttttggcggagctggggcgccctccggaagcgtttccaactttccagaagtttctcgggacgggcaggagggggtggggactgccatatatagatcccgggagcaggggagcgggctaagagtagaatcgtgtcgcggctcgagagcgagagtcacgtcccggcgctagcccagcccgacccagaatgaaaaaggcaggcattgacctccctctgaggcagtttccaggcccaccgtggtgcacgcaaaccacttcctggccatgcgctccctcctgcttctcagcgccttctgcctcctggaggcggccctggccgccgaggtgaagaaacctgcagccgcagcagctcctggcactgcggagaagttgagccccaaggcggccacgcttgccgagcgcagcgccggcctggccttcagcttgtaccaggccatggccaaggaccaggcagtggagaacatcctggtgtcacccgtggtggtggcctcgtcgctagggctcgtgtcgctgggcggcaaggcgaccacggcgtcgcaggccaaggcagtgctgagcgccgagcagctgcgcgacgaggaggtgcacgccggcctgggcgagctgctgcgctcactcagcaactccacggcgcgcaacgtgacctggaagctgggcagccgactgtacggacccagctcagtgagcttcgctgatgacttcgtgcgcagcagcaagcagcactacaactgcgagcactccaagatcaacttccgcgacaagcgcagcgcgctgcagtccatcaacgagtgggccgcgcagaccaccgacggcaagctgcccgaggtcaccaaggacgtggagcgcacggacggcgccctgctagtcaacgccatgttcttcaagccacactgggatgagaaattccaccacaagatggtggacaaccgtggcttcatggtgactcggtcctataccgtgggtgtcatgatgatgcaccggacaggcctctacaactactacgacgacgagaaggaaaagctgcaaatcgtggagatgcccctggcccacaagctctccagcctcatcatcctcatgccccatcacgtggagcctctcgagcgccttgaaaagctgctaaccaaagagcagctgaagatctggatggggaagatgcagaagaaggctgttgccatctccttgcccaagggtgtggtggaggtgacccatgacctgcagaaacacctggctgggctgggcctgactgaggccattgacaagaacaaggccgacttgtcacgcatgtcaggcaagaaggacctgtacctggccagcgtgttccacgccaccgcctttgagttggacacagatggcaacccctttgaccaggacatctacgggcgcgaggagctgcgcagccccaagctgttctacgccgaccaccccttcatcttcctagtgcgggacacccaaagcggctccctgctattcattgggcgcctggtccggcctaagggtgacaagatgcgagacgagttatagggcctcagggtgcacacaggatggcaggaggcatccaaaggctcctgagacacatgggtgctattggggttgggggggaggtgaggtaccagccttggatactccatggggtgggggtggaaaaacagaccggggttcccgtgtgcctgagcggaccttcccagctagaattcactccacttggacatgggccccagataccatgatgctgagcccggaaactccacatcctgtgggacctgggccatagtcattctgcctgccctgaaagtcccagatcaagcctgcctcaatcagtattcatatttatagccaggtaccttctcacctgtgagaccaaattgagctaggggggtcagccagccctcttctgacactaaaacacctcagctgcctccccagctctatcccaacctctcccaactataaaactaggtgctgcagcccctgggaccaggcacccccagaatgacctggccgcagtgaggcggattgagaaggagctcccaggaggggcttctgggcagactctggtcaagaagcatcgtgtctggcgttgtggggatgaactttttgttttgtttcttccttttttagttcttcaaagatagggagggaagggggaacatgagcctttgttgctatcaatccaagaacttatttgtacattttttttttcaataaaacttttccaatgaca

SEQ ID NO: 342694 - DNA, 1257 bp, Artificial Sequence
  derived and/or modified sequence
atgagaagcctgctgctgctgagcgccttctgcctgctggaggccgccctggccgccgaggtgaagaagcccgccgccgccgccgcccccggcaccgccgagaagctgagccccaaggccgccaccctggccgagagaagcgccggcctggccttcagcctgtaccaggccatggccaaggaccaggccgtggagaacatcctggtgagccccgtggtggtggccagcagcctgggcctggtgagcctgggcggcaaggccaccaccgccagccaggccaaggccgtgctgagcgccgagcagctgagagacgaggaggtgcacgccggcctgggcgagctgctgagaagcctgagcaacagcaccgccagaaacgtgacctggaagctgggcagcagactgtacggccccagcagcgtgagcttcgccgacgacttcgtgagaagcagcaagcagcactacaactgcgagcacagcaagatcaacttcagagacaagagaagcgccctgcagagcatcaacgagtgggccgcccagaccaccgacggcaagctgcccgaggtgaccaaggacgtggagagaaccgacggcgccctgctggtgaacgccatgttcttcaagccccactgggacgagaagttccaccacaagatggtggacaacagaggcttcatggtgaccagaagctacaccgtgggcgtgatgatgatgcacagaaccggcctgtacaactactacgacgacgagaaggagaagctgcagatcgtggagatgcccctggcccacaagctgagcagcctgatcatcctgatgccccaccacgtggagcccctggagagactggagaagctgctgaccaaggagcagctgaagatctggatgggcaagatgcagaagaaggccgtggccatcagcctgcccaagggcgtggtggaggtgacccacgacctgcagaagcacctggccggcctgggcctgaccgaggccatcgacaagaacaaggccgacctgagcagaatgagcggcaagaaggacctgtacctggccagcgtgttccacgccaccgccttcgagctggacaccgacggcaaccccttcgaccaggacatctacggcagagaggagctgagaagccccaagctgttctacgccgaccaccccttcatcttcctggtgagagacacccagagcggcagcctgctgttcatcggcagactggtgagacccaagggcgacaagatgagagacgagctgtag

SEQ ID NO: 342695 - DNA, 1194 bp, Artificial Sequence
  derived and/or modified sequence
atgagaagcctgctgctgctgagcgccttctgcctgctggaggccgccctggccgccgaggtgaagaagcccgccgccgccgccgcccccggcaccgccgagaagctgagccccaaggccgccaccctggccgagagaagcgccggcctggccttcagcctgtaccaggccatggccaaggaccaggccgtggagaacatcctggtgagccccgtggtggtggccagcagcctgggcctggtgagcctgggcggcaaggccaccaccgccagccaggccaaggccgtgctgagcgccgagcagctgagaaacgtgacctggaagctgggcagcagactgtacggccccagcagcgtgagcttcgccgacgacttcgtgagaagcagcaagcagcactacaactgcgagcacagcaagatcaacttcagagacaagagaagcgccctgcagagcatcaacgagtgggccgcccagaccaccgacggcaagctgcccgaggtgaccaaggacgtggagagaaccgacggcgccctgctggtgaacgccatgttcttcaagccccactgggacgagaagttccaccacaagatggtggacaacagaggcttcatggtgaccagaagctacaccgtgggcgtgatgatgatgcacagaaccggcctgtacaactactacgacgacgagaaggagaagctgcagatcgtggagatgcccctggcccacaagctgagcagcctgatcatcctgatgccccaccacgtggagcccctggagagactggagaagctgctgaccaaggagcagctgaagatctggatgggcaagatgcagaagaaggccgtggccatcagcctgcccaagggcgtggtggaggtgacccacgacctgcagaagcacctggccggcctgggcctgaccgaggccatcgacaagaacaaggccgacctgagcagaatgagcggcaagaaggacctgtacctggccagcgtgttccacgccaccgccttcgagctggacaccgacggcaaccccttcgaccaggacatctacggcagagaggagctgagaagccccaagctgttctacgccgaccaccccttcatcttcctggtgagagacacccagagcggcagcctgctgttcatcggcagactggtgagacccaagggcgacaagatgagagacgagctgtag

SEQ ID NO: 342696 - DNA, 744 bp, Artificial Sequence
  derived and/or modified sequence
atgagaagcctgctgctgctgagcgccttctgcctgctggaggccgccctggccgccgaggtgaagaagcccgccgccgccgccgcccccggcaccgccgagaagctgagccccaaggccgccaccctggccgagagaagcgccggcctggccttcagcctgtaccaggccatggccaaggaccaggccgtggagaacatcctggtgagccccgtggtggtggccagcagcctgggcctggtgagcctgggcggcaaggccaccaccgccagccaggccaaggccgtgctgagcgccgagcagctgagagacgaggaggtgcacgccggcctgggcgagctgctgagaagcctgagcaacagcaccgccagaaacgtgacctggaagctgggcagcagactgtacggccccagcagcgtgagcttcgccgacgacttcgtgagaagcagcaagcagcactacaactgcgagcacagcaagatcaacttcagagacaagagaagcgccctgcagagcatcaacgagtgggccgcccagaccaccgacggcaagctgcccgaggtgaccaaggacgtggagagaaccgacggcgccctgctggtgaacgccatgttcttcaagccccactgggacgagaagttccaccacaagatggtggacaacagaggcttcatggtgaccagaagctacaccgtgggcgtgatgatgatgcacagaaccggcctgtacaactactacgactag

SEQ ID NO: 342697 - DNA, 750 bp, Artificial Sequence
  derived and/or modified sequence
atgagaagcctgctgctgctgagcgccttctgcctgctggaggccgccctggccgccgaggtgaagaagcccgccgccgccgccgcccccggcaccgccgagaagctgagccccaaggccgccaccctggccgagagaagcgccggcctggccttcagcctgtaccaggccatggccaaggaccaggccgtggagaacatcctggtgagccccgtggtggtggccagcagcctgggcctggtgagcctgggcggcaaggccaccaccgccagccaggccaaggccgtgctgagcgccgagcagctgagagacgaggaggtgcacgccggcctgggcgagctgctgagaagcctgagcaacagcaccgccagaaacgtgacctggaagctgggcagcagactgtacggccccagcagcgtgagcttcgccgacgacttcgtgagaagcagcaagcagcactacaactgcgagcacagcaagatcaacttcagagacaagagaagcgccctgcagagcatcaacgagtgggccgcccagaccaccgacggcaagctgcccgaggtgaccaaggacgtggagagaaccgacggcgccctgctggtgaacgccatgttcttcaagccccactgggacgagaagttccaccacaagatggtggacaacagaggcttcatggtgaccagaagctacaccgtgggcgtgatgatgatgcacagaaccggcctgtacaactactacgacgacgagtag

SEQ ID NO: 342698 - DNA, 612 bp, Artificial Sequence
  derived and/or modified sequence
atgagaagcctgctgctgctgagcgccttctgcctgctggaggccgccctggccgccgaggtgaagaagcccgccgccgccgccgcccccggcaccgccgagaagctgagccccaaggccgccaccctggccgagagaagcgccggcctggccttcagcctgtaccaggccatggccaaggaccaggccgtggagaacatcctggtgagccccgtggtggtggccagcagcctgggcctggtgagcctgggcggcaaggccaccaccgccagccaggccaaggccgtgctgagcgccgagcagctgagagacgaggaggtgcacgccggcctgggcgagctgctgagaagcctgagcaacagcaccgccagaaacgtgacctggaagctgggcagcagactgtacggccccagcagcgtgagcttcgccgacgacttcgtgagaagcagcaagcagcactacaactgcgagcacagcaagatcaacttcagagacaagagaagcgccctgcagagcatcaacgagtgggccgcccagaccaccgacggcaagctgcccgaggtgaccaaggacgtggagagaaccgacggcgccctgctggtgaacgcctag

SEQ ID NO: 342699 - DNA, 492 bp, Artificial Sequence
  derived and/or modified sequence
atgagaagcctgctgctgctgagcgccttctgcctgctggaggccgccctggccgccgaggtgaagaagcccgccgccgccgccgcccccggcaccgccgagaagctgagccccaaggccgccaccctggccgagagaagcgccggcctggccttcagcctgtaccaggccatggccaaggaccaggccgtggagaacatcctggtgagccccgtggtggtggccagcagcctgggcctggtgagcctgggcggcaaggccaccaccgccagccaggccaaggccgtgctgagcgccgagcagctgagagacgaggaggtgcacgccggcctgggcgagctgctgagaagcctgagcaacagcaccgccagaaacgtgacctggaagctgggcagcagactgtacggccccagcagcgtgagcttcgccgacgacttcgtgagaagcagcaagcagcactacaactgcgagcacagcaagatcaacttctag

SEQ ID NO: 342700 - DNA, 504 bp, Artificial Sequence
  derived and/or modified sequence
atgagaagcctgctgctgctgagcgccttctgcctgctggaggccgccctggccgccgaggtgaagaagcccgccgccgccgccgcccccggcaccgccgagaagctgagccccaaggccgccaccctggccgagagaagcgccggcctggccttcagcctgtaccaggccatggccaaggaccaggccgtggagaacatcctggtgagccccgtggtggtggccagcagcctgggcctggtgagcctgggcggcaaggccaccaccgccagccaggccaaggccgtgctgagcgccgagcagctgagagacgaggaggtgcacgccggcctgggcgagctgctgagaagcctgagcaacagcaccgccagaaacgtgacctggaagctgggcagcagactgtacggccccagcagcgtgagcttcgccgacgacttcgtgagaagcagcaagcagcactacaactgcgagcacagcaagatcaacttcagagacaagagatag

SEQ ID NO: 342701 - DNA, 975 bp, Artificial Sequence
  derived and/or modified sequence
atgagaagcctgctgctgctgagcgccttctgcctgctggaggccgccctggccgccgaggtgaagaagcccgccgccgccgccgcccccggcaccgccgagaagctgagccccaaggccgccaccctggccgagagaagcgccggcctggccttcagcctgtaccaggccatggccaaggaccaggccgtggagaacatcctggtgagccccgtggtggtggccagcagcctgggcctggtgagcctgggcggcaaggccaccaccgccagccaggccaaggccgtgctgagcgccgagcagctgagagacgaggaggtgcacgccggcctgggcgagctgctgagaagcctgagcaacagcaccgccagaaacgtgacctggaagctgggcagcagactgtacggccccagcagcgtgagcttcgccgacgacttcgtgagaagcagcaagcagcactacaactgcgagcacagcaagatcaacttcagagacaagagaagcgccctgcagagcatcaacgagtgggccgcccagaccaccgacggcaagctgcccgaggtgaccaaggacgtggagagaaccgacggcgccctgctggtgaacgccatgttcttcaagccccactgggacgagaagttccaccacaagatggtggacaacagaggcttcatggtgaccagaagctacaccgtgggcgtgatgatgatgcacagaaccggcctgtacaactactacgacgacgagaaggagaagctgcagatcgtggagatgcccctggcccacaagctgagcagcctgatcatcctgatgccccaccacgtggagcccctggagagactggagaagctgctgaccaaggagcagctgaagatctggatgggcaagatgcagaagaaggccgtggccatcagcctgcccaagggcgtggtggaggtgacccacgacctgcaggtgagaggcggccccgcctag

SEQ ID NO: 342702 - DNA, 888 bp, Artificial Sequence
  derived and/or modified sequence
atgagaagcctgctgctgctgagcgccttctgcctgctggaggccgccctggccgccgaggtgaagaagcccgccgccgccgccgcccccggcaccgccgagaagctgagccccaaggccgccaccctggccgagagaagcgccggcctggccttcagcctgtaccaggccatggccaaggaccaggccgtggagaacatcctggtgagccccgtggtggtggccagcagcctgggcctggtgagcctgggcggcaaggccaccaccgccagccaggccaaggccgtgctgagcgccgagcagctgagagacgaggaggtgcacgccggcctgggcgagctgctgagaagcctgagcaacagcaccgccagaaacgtgacctggaagctgggcagcagactgtacggccccagcagcgtgagcttcgccgacgacttcgtgagaagcagcaagcagcactacaactgcgagcacagcaagatcaacttcagagacaagagaagcgccctgcagagcatcaacgagtgggccgcccagaccaccgacggcaagctgcccgaggtgaccaaggacgtggagagaaccgacggcgccctgctggtgaacgccatgttcttcaagccccactgggacgagaagttccaccacaagatggtggacaacagaggcttcatggtgaccagaagctacaccgtgggcgtgatgatgatgcacagaaccggcctgtacaactactacgacgacgagaaggagaagctgcagatcgtggagatgcccctggcccacaagctgagcagcctgatcatcctgatgccccaccacgtggagcccctggagagactggagaagctgctgaccaaggagcagctgaagatctggatgggctag

SEQ ID NO: 342703 - DNA, 453 bp, Artificial Sequence
  derived and/or modified sequence
atgagaagcctgctgctgctgagcgccttctgcctgctggaggccgccctggccgccgaggtgaagaagcccgccgccgccgccgcccccggcaccgccgagaagctgagccccaaggccgccaccctggccgagagaagcgccggcctggccttcagcctgtaccaggccatggccaaggaccaggccgtggagaacatcctggtgagccccgtggtggtggccagcagcctgggcctggtgagcctgggcggcaaggccaccaccgccagccaggccaaggccgtgctgagcgccgagcagctgagagacgaggaggtgcacgccggcctgggcgagctgctgagaagcctgagcaacagcaccgccagaaacgtgacctggaagctgggcagcagactgtacggccccagcagcgtgagcttcgccgacgacttcgtgagaagcagctag

SEQ ID NO: 342704 - DNA, 1257 bp, Artificial Sequence
  derived and/or modified sequence
atgcgaagcctccttctgctgtctgctttctgtctgttggaagcagcactcgccgctgaggtcaaaaagccagcagctgcagcagctcccggaaccgccgagaaactcagtccaaaggccgcaacactggccgagcggtctgcgggtttagccttttcgctgtatcaggccatggccaaagaccaggcagtggagaacatcttggtatcaccagtagtggtggcctctagcctcggcctcgtgtcactgggtggcaaagctacgacggctagccaggctaaggcggtgctgagtgccgaacagctccgcgatgaggaagtgcatgccggcttgggcgagttgctcaggagcctgagtaacagcaccgcgagaaatgttacttggaaactcggaagcagactgtacggcccctccagcgtgtcattcgccgacgactttgtaaggtcctccaaacaacactataactgcgagcattcaaagattaatttcagagacaagcgctcagctctgcaaagcataaatgagtgggctgcgcagacaaccgacggaaagctgcccgaagtgaccaaggatgtcgagcgcactgacggagcactgctggttaacgccatgttctttaagccacactgggacgaaaagttccatcataaaatggtggataatcggggcttcatggtgactaggtcttacacagtgggggttatgatgatgcatcggaccggtctctacaattactatgacgacgaaaaagagaagcttcagatcgttgaaatgcccctggcccataagctgagcagcctgatcatactgatgcctcaccatgtggagccccttgagcggcttgaaaaactcttgaccaaagaacagcttaagatctggatggggaaaatgcaaaagaaggccgtggccattagtttaccaaagggcgtcgtagaggttacccatgatcttcagaagcatctggcaggattgggcttaacagaggctattgacaaaaataaagctgacctctccagaatgtcaggcaagaaggatctgtatctagccagcgtgttccatgctaccgcctttgagctggatactgatggaaatccatttgatcaggatatttatgggagagaggagctcagaagcccaaagctattttatgccgatcaccctttcattttcctcgtcagagacactcaatctggcagcctgttattcataggccggcttgtccgcccaaaaggtgacaagatgcgggacgagctgtag

SEQ ID NO: 342705 - DNA, 1194 bp, Artificial Sequence
  derived and/or modified sequence
atgcgatcccttctgctgctttctgccttttgtttgttagaagctgcccttgccgctgaggtcaagaagcctgctgccgctgccgctccgggcacggccgagaagctgtccccaaaggccgctactctggccgaaaggagtgccggccttgcattttccctgtaccaggcgatggccaaggatcaggctgttgaaaacatcctcgtctccccggtggtggtggcttcaagcctcgggctagtgagtctgggaggtaaagccacgactgcctctcaggctaaggcggttctgtccgcagagcagctgcgtaacgtgacatggaaattaggctcccgcctctacgggccatcctcggttagttttgccgatgacttcgtgcgcagttcaaaacaacattacaattgtgaacatagcaagatcaatttccgtgataagcgaagtgccctgcagagtatcaacgagtgggccgctcagacaacagatggaaagttgccggaagtgacaaaggacgttgaaaggactgatggagcacttttggtgaacgccatgttttttaagccccattgggacgaaaagtttcatcataaaatggtagataacagaggctttatggtgactaggagctatacagtgggagtgatgatgatgcaccgaacaggactttacaattactacgatgacgagaaggaaaagctgcaaatcgtcgagatgcctcttgcacacaagctaagctctcttatcatcttgatgccacatcacgttgagccattagagaggctcgagaagctcctgactaaggagcaactgaaaatttggatgggtaagatgcagaagaaagctgttgctatctccctcccaaagggcgtcgtggaagtgactcatgatctacagaaacacttagctggactaggcctgacagaggccatcgacaagaataaagccgatctgtcccgaatgtcgggcaaaaaggatctttatctggcaagcgtctttcacgctactgcttttgagctggatactgatgggaatccattcgaccaggacatatatggccgggaggagctgcggagtcctaagctgttttacgccgatcaccccttcatcttcctagtacgcgatacacagtcaggcagcctgctgttcattggaagactggtgcgaccaaagggagacaaaatgagagatgaactgtag

SEQ ID NO: 342706 - DNA, 2225 bp, Artificial Sequence
  derived and/or modified sequence
agagggaggggccgggggccggggaggttttgagggaggtctttggctttttttggcggagctggggcgccctccggaagcgtttccaactttccagaagtttctcgggacgggcaggagggggtggggactgccatatatagatcccgggagcaggggagcgggctaagagtagaatcgtgtcgcggctcgagagcgagagtcacgtcccggcgctagcccagcccgacccaggcccaccgtggtgcacgcaaaccacttcctggccatgcgctccctcctgcttctcagcgccttctgcctcctggaggcggccctggccgccgaggtgaagaaacctgcagccgcagcagctcctggcactgcggagaagttgagccccaaggcggccacgcttgccgagcgcagcgccggcctggccttcagcttgtaccaggccatggccaaggaccaggcagtggagaacatcctggtgtcacccgtggtggtggcctcgtcgctagggctcgtgtcgctgggcggcaaggcgaccacggcgtcgcaggccaaggcagtgctgagcgccgagcagctgcgcgacgaggaggtgcacgccggcctgggcgagctgctgcgctcactcagcaactccacggcgcgcaacgtgacctggaagctgggcagccgactgtacggacccagctcagtgagcttcgctgatgacttcgtgcgcagcagcaagcagcactacaactgcgagcactccaagatcaacttccgcgacaagcgcagcgcgctgcagtccatcaacgagtgggccgcgcagaccaccgacggcaagctgcccgaggtcaccaaggacgtggagcgcacggacggcgccctgctagtcaacgccatgttcttcaagccacactgggatgagaaattccaccacaagatggtggacaaccgtggcttcatggtgactcggtcctataccgtgggtgtcatgatgatgcaccggacaggcctctacaactactacgacgacgagaaggaaaagctgcaaatcgtggagatgcccctggcccacaagctctccagcctcatcatcctcatgccccatcacgtggagcctctcgagcgccttgaaaagctgctaaccaaagagcagctgaagatctggatggggaagatgcagaagaaggctgttgccatctccttgcccaagggtgtggtggaggtgacccatgacctgcagaaacacctggctgggctgggcctgactgaggccattgacaagaacaaggccgacttgtcacgcatgtcaggcaagaaggacctgtacctggccagcgtgttccacgccaccgcctttgagttggacacagatggcaacccctttgaccaggacatctacgggcgcgaggagctgcgcagccccaagctgttctacgccgaccaccccttcatcttcctagtgcgggacacccaaagcggctccctgctattcattgggcgcctggtccggcctaagggtgacaagatgcgagacgagttatagggcctcagggtgcacacaggatggcaggaggcatccaaaggctcctgagacacatgggtgctattggggttgggggggaggtgaggtaccagccttggatactccatggggtgggggtggaaaaacagaccggggttcccgtgtgcctgagcggaccttcccagctagaattcactccacttggacatgggccccagataccatgatgctgagcccggaaactccacatcctgtgggacctgggccatagtcattctgcctgccctgaaagtcccagatcaagcctgcctcaatcagtattcatatttatagccaggtaccttctcacctgtgagaccaaattgagctaggggggtcagccagccctcttctgacactaaaacacctcagctgcctccccagctctatcccaacctctcccaactataaaactaggtgctgcagcccctgggaccaggcacccccagaatgacctggccgcagtgaggcggattgagaaggagctcccaggaggggcttctgggcagactctggtcaagaagcatcgtgtctggcgttgtggggatgaactttttgttttgtttcttccttttttagttcttcaaagatagggagggaagggggaacatgagcctttgttgctatcaatccaagaacttatttgtacattttttttttcaataaaacttttccaatgaca

SEQ ID NO: 342707 - DNA, 1257 bp, Artificial Sequence
  derived and/or modified sequence
atgagaagtctcctcctgttgagcgctttctgcctcttagaagctgccctcgctgccgaggtcaagaaacctgccgccgccgctgcccccggaaccgccgagaagctgagccccaaagctgccacgctggctgaaagatcagcaggactcgcattcagcctgtaccaggcgatggccaaagaccaggcagttgagaatattttagtgtctcccgtggtagtggcatccagtttagggctagtgtcgctgggcgggaaggccactacagcttctcaggccaaagctgtgctgagcgccgaacagcttagagacgaagaggtgcacgccggtctgggtgagttactgcggtctttaagtaatagcacggccaggaacgtgacatggaagttgggcagtcgcctgtatggtccttcttctgtgagcttcgcagacgactttgtgaggtccagcaaacagcactataactgtgaacactcaaaaattaactttagggacaaaagatctgcccttcagtctattaacgagtgggccgcccaaacgacagatggcaaactccctgaggttactaaagacgtggagcgtaccgatggggctctgctggtcaatgcaatgttcttcaagccccactgggacgagaagtttcatcataaaatggtggacaatcggggttttatggtaacccggagttacactgtgggagtaatgatgatgcaccggacgggtttatataactattacgatgatgagaaggaaaagctccagattgtggagatgccgctcgcccataaactcagttccttaattatcctgatgcctcatcacgtggagccgttagagagactggagaaactgttgaccaaggagcagctcaaaatctggatgggcaagatgcaaaaaaaagccgtcgcaattagcctgccaaagggcgttgtcgaggtgactcacgacctccagaagcatttggctggcctgggcttgactgaagcaattgataagaacaaggccgacctcagccggatgtcaggcaagaaggacctttacctagcttcagtcttccacgcaaccgcgtttgaattggatacagatggcaacccttttgaccaggacatctacggccgcgaggaactccggtccccgaagttgttctacgccgatcatccctttatcttcctggtgagagatacccagtccggtagcctgctgtttatcggcaggcttgtcagacccaagggcgataagatgcgcgacgagctttag

SEQ ID NO: 342708 - DNA, 744 bp, Artificial Sequence
  derived and/or modified sequence
atgagatcgttgctgctcctatctgcgttctgtttactggaagctgccttggccgctgaagtaaaaaagccagctgcagctgcagcacctgggactgccgagaaattgtcacctaaagccgccacgttggccgaacgctccgccgggcttgccttttcactgtatcaggcaatggccaaagaccaggctgtggagaacattctggtcagccctgttgttgttgcatcaagtcttggcctggtcagcctcggtggaaaggcaactactgcaagccaggctaaagccgtattgtctgctgagcagcttcgcgacgaggaggtccatgctggactgggggagctgctccgctctttaagcaacagcaccgcccgcaacgtcacttggaagcttgggtcccgcctgtatggaccttcaagcgtctcgttcgcggacgacttcgtgagatctagtaaacagcactataactgtgaacactccaagatcaacttcagggacaaacggtccgcattgcagagcattaatgagtgggccgctcaaacaaccgatgggaagctccctgaagtcaccaaagacgttgagagaaccgacggcgccctgctagtcaatgcaatgttctttaaacctcactgggacgagaagttccatcacaaaatggtcgataaccggggtttcatggtgacgcgatcatacacagtcggcgtgatgatgatgcataggaccgggctgtacaattattacgactag

SEQ ID NO: 342709 - DNA, 750 bp, Artificial Sequence
  derived and/or modified sequence
atgcgctcactgctactactgagtgcattttgtctgctcgaggccgctctggccgcggaagtcaagaaacctgcagccgctgcagccccagggacagccgaaaaattgagtccaaaggccgcaactctggcagaaaggtctgctggcctcgccttttcactttatcaggccatggctaaggaccaagccgtcgagaacattctggtctcgcccgtggtcgtcgcgtcatctctcgggctcgtctcccttggagggaaggctacaaccgcgtcccaggcgaaggctgttctcagtgccgagcagttacgcgacgaggaagtccatgctggacttggcgagctgctcagatccttgtcaaactctacagcaagaaacgtgacgtggaagttggggagcagactatacgggccgtcctccgtgtcattcgctgatgatttcgtgcgatcttcaaaacagcactataactgcgaacattccaagattaattttcgggacaaacgttccgccctgcagtcaataaacgagtgggccgctcagacaaccgacggcaaactgcccgaggttacaaaggatgtagaacggacagatggagcccttctggtgaatgctatgttctttaagccacattgggacgaaaaattccatcacaagatggtggacaataggggattcatggtaacgcgatcatatacagtgggagtcatgatgatgcataggaccggcctatataattactacgacgacgagtag

SEQ ID NO: 342710 - DNA, 612 bp, Artificial Sequence
  derived and/or modified sequence
atgagatccctgcttctgctatcagccttttgcttgctggaggcagctttggccgctgaggtaaaaaagcctgcagcagcagcggcacctggtacagcagaaaagctgagccctaaggctgccacactggcggaaagatcagccggattagctttttctctgtatcaagcaatggctaaagaccaagcagtggaaaacatcctggtctccccagtggttgtagcgtctagcttaggcctggtcagcttaggcggcaaagcaacaacagcctcccaggctaaagctgtcttgtctgccgagcagctccgggatgaagaagtccacgctgggctcggggaattgctcagatctctcagcaactcaacggcaagaaacgtgacctggaagctgggcagccggctgtacggtccctcatccgtgtctttcgccgacgatttcgtgagatctagcaagcagcattacaattgtgaacacagcaagattaatttccgcgataaacgttcagcactgcaatctatcaatgaatgggcagctcaaacaacagacggcaaacttcctgaggtgacaaaagatgtcgaaagaactgacggagctctgctggtgaatgcctag

SEQ ID NO: 342711 - DNA, 492 bp, Artificial Sequence
  derived and/or modified sequence
atgcggtctctccttctcctgagcgcgttttgcctgctcgaggccgccctggctgcggaggtgaagaagccagcagcagccgcagctcccggtaccgcagagaagctctcccccaaagcagcaaccttggccgagcgctccgcgggactggccttttcactgtaccaggccatggctaaggaccaagcagtagagaatattctcgtgtcgccagtggtagtcgctagttccttgggtctggtgtctctcggcgggaaggcaaccactgctagccaagctaaggctgttttgagcgcggagcaactccgcgatgaggaagttcacgcagggttgggggagctgctacgttcccttagcaatagcactgctcgcaacgttacctggaagctgggaagtcggttatacgggccaagcagtgtctctttcgcggatgatttcgttaggtccagcaaacaacattataattgcgaacactccaaaattaacttttag

SEQ ID NO: 342712 - DNA, 504 bp, Artificial Sequence
  derived and/or modified sequence
atgaggtccctcctgcttctgtccgctttttgtcttttggaggctgcattggcggcggaagtgaagaagccggccgcggccgccgccccagggactgctgagaaactttctcctaaagctgctacgctggcggaacggtcagcggggcttgccttcagtctgtatcaggccatggcgaaggaccaggccgtggagaacatcctcgtaagcccggtcgttgttgcttcctccctaggcttggtgtcactgggaggcaaggctaccactgcttctcaggctaaggccgtactgtccgccgagcagttaagagatgaggaggttcacgctgggcttggagaactattgcggtctctgtcaaacagtaccgcacggaacgtcacttggaaattagggagccggctgtatggaccatctagtgtatcttttgccgacgatttcgttaggagctctaaacagcattacaattgtgaacactccaaaatcaactttagggacaaaagatag

SEQ ID NO: 342713 - DNA, 975 bp, Artificial Sequence
  derived and/or modified sequence
atgagaagcctcctactactctccgccttctgtctcctggaggccgcgttagctgccgaagtcaaaaagcctgcggccgcagcagcccctgggaccgccgaaaagctgagtcccaaggctgctaccctcgctgaaaggagcgcaggcttggctttttcactctaccaggctatggccaaagaccaggccgtcgagaacattctggtaagcccagtagtggtcgcttcttcgctcggtctcgtctctctggggggaaaggctactaccgcatcccaggccaaagcagtactctctgcagagcagcttcgtgatgaagaggtgcacgccggactcggcgagctcctgcggagcctcagcaactcaactgcccgaaacgttacctggaagttaggaagcaggctctacgggccaagttcagtatccttcgcagacgatttcgtgcggtccagtaaacagcactacaattgcgaacacagcaaaatcaacttccgcgacaagcgatcggcgctgcagagcattaacgagtgggccgctcagacaaccgatggaaagctgccagaagtgactaaagatgtcgaacggaccgacggagctttgctggttaatgccatgttttttaagccacactgggatgagaaattccaccacaagatggtggataatcgaggcttcatggtgacacgaagttacactgtgggcgtgatgatgatgcacagaaccggcttatataactactacgacgacgagaaagaaaagctacagatcgtagaaatgccccttgcacacaaactgtccagcctcatcatcctgatgcctcatcacgttgagcctctggaacgacttgaaaaactcctcacaaaagagcaacttaagatatggatgggcaagatgcagaaaaaggccgttgccattagccttcccaagggggtggtggaggtgacacacgatctgcaggtgcggggggggcctgcgtag

SEQ ID NO: 342714 - DNA, 888 bp, Artificial Sequence
  derived and/or modified sequence
atgcggtcactcctgctgctatctgccttctgtttactggaagcagcattagccgccgaggtaaagaagccagcagctgcggccgcccccgggactgccgagaagctgtcaccaaaagccgcaaccctggctgagcggagtgcggggctggcgttctctctttatcaagccatggccaaggaccaggcagttgagaacatcctcgtgtccccagtggtggtggctagtagcttgggcttagtatccctcggggggaaagccacaacagcgagtcaagccaaagctgtactgagcgcagaacagctccgggatgaggaggtccacgctggtttaggcgagttgctgcgctccttgtcgaattcaaccgcccggaacgttacctggaagttaggttctaggctctatggaccatctagcgtgtcgtttgctgacgacttcgtaaggagttctaaacaacactataattgcgagcatagcaagataaattttcgtgacaaacgttccgcgctgcaatctatcaacgaatgggctgcccagaccactgatggaaagctgccagaggtgaccaaagatgtagaacgaaccgatggtgcgctgctggtcaatgctatgttttttaagccacactgggatgagaagttccatcataaaatggtggataatagggggttcatggtgactcggtcttatacggtaggcgtcatgatgatgcacaggactggcttatacaattactacgatgacgagaaagaaaagctgcaaatagtggaaatgccgctggctcataaactaagcagtttaataattcttatgccccatcacgttgagcctttagaaagactggaaaagctcctgactaaagaacagttaaagatctggatgggctag

SEQ ID NO: 342715 - DNA, 453 bp, Artificial Sequence
  derived and/or modified sequence
atgcgtagtttgctactcctatctgcattctgcctgctagaggcggccctggccgcagaagtaaagaaacccgctgcagctgcagctcccggcacagccgaaaaactgtctcccaaagctgccacactcgcggaaaggtccgccgggttggccttctcgctgtaccaagccatggccaaggaccaggccgtggagaacattttggtgtccccagtggttgtggccagcagcctggggctggtctcccttgggggaaaggcaacgaccgcctcacaggccaaggccgtcctgagtgcagagcaactgagggacgaggaggtgcacgctgggctcggggagttacttagatctctctctaattccaccgcgaggaatgtgacgtggaaattaggttcccggctgtacgggccaagttccgtttcttttgcagacgacttcgtccgcagcagctag

SEQ ID NO: 342716 - DNA, 1257 bp, Artificial Sequence
  derived and/or modified sequence
atgcgaagcttgctcttgctgagtgctttctgtcttctggaggccgcactcgccgcagaggtcaagaagcctgctgctgctgccgctccaggaacggccgagaaactgagccctaaagcagctaccctggccgagcgctcagccggcctggcattcagtctctaccaagctatggccaaggatcaggcggtggagaacatactcgtgtctccagtggtggtggcaagtagcctaggtctagtgtcccttggcggcaaagccaccactgcaagccaggcaaaggccgttctctcagccgagcagctcagagacgaggaagtgcacgcaggcctgggggaactgcttcgaagcttgtcgaacagtaccgccaggaacgtgacgtggaagctgggctccagactttacggcccgtcaagcgtgagcttcgctgacgatttcgtgcggtcctcaaagcaacactataactgcgagcactcaaaaataaactttagggataaacgatcggccttacagtcgattaacgagtgggccgcacagacaactgacggaaagctgcctgaggtgaccaaggacgttgaaagaactgatggagccctgcttgttaatgctatgttcttcaagccccactgggacgagaaatttcaccacaagatggtggataatcggggctttatggttacacgctcctatactgtgggagttatgatgatgcatcgtactggactgtacaattactacgacgatgaaaaagaaaagctgcagattgtggagatgcctcttgcgcataaacttagcagcctgattatcctcatgccgcatcacgttgagccgttagagaggttagagaaactccttactaaggagcagttgaaaatttggatgggaaagatgcaaaagaaggccgttgcaatttccctccctaaaggcgtggtagaagttacccatgatctgcaaaaacacctagccggccttggtttgaccgaagccattgataagaataaggccgacctatcccgcatgagtggtaagaaggacctgtacctcgcttccgtgttccacgccaccgcttttgaactggacacggacggtaacccattcgaccaggacatttacggccgtgaagagcttagatcccctaaacttttctacgctgatcacccatttatattcttggtaagggacacacaatcaggcagcctgctgttcattggtagattggtaaggcccaaaggcgacaagatgagagacgaactatag

SEQ ID NO: 342717 - DNA, 1257 bp, Artificial Sequence
  derived and/or modified sequence
atgaggagcctgctgctgctgagcgccttctgcctgctggaggccgccctggccgctgaggtgaagaagccagctgctgctgctgcccctggaacagctgagaagctgagccccaaggccgccaccctggccgagaggtctgctggcctggccttcagcctgtaccaggccatggccaaggaccaggccgtggagaacatcctggtgtcccctgtggtggtggccagcagcctgggcctggtgtccctgggcggcaaggccaccacagccagccaggccaaggctgtgctgtctgctgagcagctgagagatgaggaggtgcatgctggcctgggggagctgctgcggagcctgagcaacagcacagccagaaatgtgacctggaagctgggcagccggctgtatggccccagctctgtgtcctttgctgatgactttgtgcgcagcagcaagcagcactacaactgtgagcacagcaagatcaacttccgggacaagaggtctgccctgcagagcatcaatgagtgggccgcccagaccacagatggcaagctgcctgaggtgaccaaggatgtggagaggacagatggagccctgctggtgaatgccatgttcttcaagccccactgggatgagaagttccaccacaagatggtggacaacagaggcttcatggtgaccaggagctacacagtgggcgtgatgatgatgcacaggacaggcctgtacaactactatgatgatgagaaggagaagctgcagatcgtggagatgcccctggcccacaagctgagcagcctcatcatcctgatgccccaccacgtggagcccctggagcggctggagaagctgctgaccaaggagcagctgaagatctggatgggcaagatgcagaagaaggctgtggccatcagcctgcccaagggcgtggtggaggtgacccatgacctgcagaagcacctggccggcctgggcctgacagaggccatcgacaagaacaaggctgacctgagcaggatgtctgggaagaaggacctgtacctggccagcgtcttccacgccacagcctttgagctggacacagatggcaacccctttgaccaggacatctacggccgggaggagctgcggagccccaagctgttctacgccgaccaccccttcatcttcctggtgcgggacacccagagcggcagcctgctcttcatcggccgcctggtgcggcccaagggggacaagatgagagatgagctgtag

SEQ ID NO: 342718 - DNA, 1194 bp, Artificial Sequence
  derived and/or modified sequence
atgaggagcctgctgctgctgagcgccttctgcctgctggaggccgccctggccgctgaggtgaagaagccagctgctgctgctgcccctggaacagctgagaagctgagccccaaggccgccaccctggccgagaggtctgctggcctggccttcagcctgtaccaggccatggccaaggaccaggccgtggagaacatcctggtgtcccctgtggtggtggccagcagcctgggcctggtgtccctgggcggcaaggccaccacagccagccaggccaaggctgtgctgtctgctgagcagctgagaaatgtgacctggaagctgggcagccggctgtatggccccagctctgtgtcctttgctgatgactttgtgcgcagcagcaagcagcactacaactgtgagcacagcaagatcaacttccgggacaagaggtctgccctgcagagcatcaatgagtgggccgcccagaccacagatggcaagctgcctgaggtgaccaaggatgtggagaggacagatggagccctgctggtgaatgccatgttcttcaagccccactgggatgagaagttccaccacaagatggtggacaacagaggcttcatggtgaccaggagctacacagtgggcgtgatgatgatgcacaggacaggcctgtacaactactatgatgatgagaaggagaagctgcagatcgtggagatgcccctggcccacaagctgagcagcctcatcatcctgatgccccaccacgtggagcccctggagcggctggagaagctgctgaccaaggagcagctgaagatctggatgggcaagatgcagaagaaggctgtggccatcagcctgcccaagggcgtggtggaggtgacccatgacctgcagaagcacctggccggcctgggcctgacagaggccatcgacaagaacaaggctgacctgagcaggatgtctgggaagaaggacctgtacctggcctctgtgttccacgccacagcctttgagctggacacagatggcaacccctttgaccaggacatctacggccgggaggagctgcggagccccaagctgttctatgctgaccaccccttcatcttcctggtgcgggacacccagagcggcagcctgctcttcatcggccgcctggtgcggcccaagggggacaagatgagagatgagctgtag

SEQ ID NO: 342719 - DNA, 744 bp, Artificial Sequence
  derived and/or modified sequence
atgaggagcctgctgctgctgagcgccttctgcctgctggaggccgccctggccgctgaggtgaagaagccagctgctgctgctgcccctggaacagctgagaagctgagccccaaggccgccaccctggccgagaggtctgctggcctggccttcagcctgtaccaggccatggccaaggaccaggccgtggagaacatcctggtgtcccctgtggtggtggccagcagcctgggcctggtgtccctgggcggcaaggccaccacagccagccaggccaaggctgtgctgtctgctgagcagctgagagatgaggaggtgcatgctggcctgggggagctgctgcggagcctgagcaacagcacagccagaaatgtgacctggaagctgggcagccggctgtatggccccagctctgtgtcctttgctgatgactttgtgcgcagcagcaagcagcactacaactgtgagcacagcaagatcaacttccgggacaagaggtctgccctgcagagcatcaatgagtgggccgcccagaccacagatggcaagctgcctgaggtgaccaaggatgtggagaggacagatggagccctgctggtgaatgccatgttcttcaagccccactgggatgagaagttccaccacaagatggtggacaacagaggcttcatggtgaccaggagctacacagtgggcgtgatgatgatgcacaggacaggcctgtacaactactatgactag

SEQ ID NO: 342720 - DNA, 750 bp, Artificial Sequence
  derived and/or modified sequence
atgaggagcctgctgctgctgagcgccttctgcctgctggaggccgccctggccgctgaggtgaagaagccagctgctgctgctgcccctggaacagctgagaagctgagccccaaggccgccaccctggccgagaggtctgctggcctggccttcagcctgtaccaggccatggccaaggaccaggccgtggagaacatcctggtgtcccctgtggtggtggccagcagcctgggcctggtgtccctgggcggcaaggccaccacagccagccaggccaaggctgtgctgtctgctgagcagctgagagatgaggaggtgcatgctggcctgggggagctgctgcggagcctgagcaacagcacagccagaaatgtgacctggaagctgggcagccggctgtatggccccagctctgtgtcctttgctgatgactttgtgcgcagcagcaagcagcactacaactgtgagcacagcaagatcaacttccgggacaagaggtctgccctgcagagcatcaatgagtgggccgcccagaccacagatggcaagctgcctgaggtgaccaaggatgtggagaggacagatggagccctgctggtgaatgccatgttcttcaagccccactgggatgagaagttccaccacaagatggtggacaacagaggcttcatggtgaccaggagctacacagtgggcgtgatgatgatgcacaggacaggcctgtacaactactatgatgatgaatag

SEQ ID NO: 342721 - DNA, 612 bp, Artificial Sequence
  derived and/or modified sequence
atgaggagcctgctgctgctgagcgccttctgcctgctggaggccgccctggccgctgaggtgaagaagccagctgctgctgctgcccctggaacagctgagaagctgagccccaaggccgccaccctggccgagaggtctgctggcctggccttcagcctgtaccaggccatggccaaggaccaggccgtggagaacatcctggtgtcccctgtggtggtggccagcagcctgggcctggtgtccctgggcggcaaggccaccacagccagccaggccaaggctgtgctgtctgctgagcagctgagagatgaggaggtgcatgctggcctgggggagctgctgcggagcctgagcaacagcacagccagaaatgtgacctggaagctgggcagccggctgtatggccccagctctgtgtcctttgctgatgactttgtgcgcagcagcaagcagcactacaactgtgagcacagcaagatcaacttccgggacaagaggtctgccctgcagagcatcaatgagtgggccgcccagaccacagatggcaagctgcctgaggtgaccaaggatgtggagaggacagatggagccctgctggtgaatgcctag

SEQ ID NO: 342722 - DNA, 492 bp, Artificial Sequence
  derived and/or modified sequence
atgaggagcctgctgctgctgagcgccttctgcctgctggaggccgccctggccgctgaggtgaagaagccagctgctgctgctgcccctggaacagctgagaagctgagccccaaggccgccaccctggccgagaggtctgctggcctggccttcagcctgtaccaggccatggccaaggaccaggccgtggagaacatcctggtgtcccctgtggtggtggccagcagcctgggcctggtgtccctgggcggcaaggccaccacagccagccaggccaaggctgtgctgtctgctgagcagctgagagatgaggaggtgcatgctggcctgggggagctgctgcggagcctgagcaacagcacagccagaaatgtgacctggaagctgggcagccggctgtatggccccagctctgtgtcctttgctgatgactttgtgcgcagcagcaagcagcactacaactgtgagcacagcaagatcaacttctag

SEQ ID NO: 342723 - DNA, 504 bp, Artificial Sequence
  derived and/or modified sequence
atgaggagcctgctgctgctgagcgccttctgcctgctggaggccgccctggccgctgaggtgaagaagccagctgctgctgctgcccctggaacagctgagaagctgagccccaaggccgccaccctggccgagaggtctgctggcctggccttcagcctgtaccaggccatggccaaggaccaggccgtggagaacatcctggtgtcccctgtggtggtggccagcagcctgggcctggtgtccctgggcggcaaggccaccacagccagccaggccaaggctgtgctgtctgctgagcagctgagagatgaggaggtgcatgctggcctgggggagctgctgcggagcctgagcaacagcacagccagaaatgtgacctggaagctgggcagccggctgtatggccccagctctgtgtcctttgctgatgactttgtgcgcagcagcaagcagcactacaactgtgagcacagcaagatcaacttccgggacaagaggtag

SEQ ID NO: 342724 - DNA, 975 bp, Artificial Sequence
  derived and/or modified sequence
atgaggagcctgctgctgctgagcgccttctgcctgctggaggccgccctggccgctgaggtgaagaagccagctgctgctgctgcccctggaacagctgagaagctgagccccaaggccgccaccctggccgagaggtctgctggcctggccttcagcctgtaccaggccatggccaaggaccaggccgtggagaacatcctggtgtcccctgtggtggtggccagcagcctgggcctggtgtccctgggcggcaaggccaccacagccagccaggccaaggctgtgctgtctgctgagcagctgagagatgaggaggtgcatgctggcctgggggagctgctgcggagcctgagcaacagcacagccagaaatgtgacctggaagctgggcagccggctgtatggccccagctctgtgtcctttgctgatgactttgtgcgcagcagcaagcagcactacaactgtgagcacagcaagatcaacttccgggacaagaggtctgccctgcagagcatcaatgagtgggccgcccagaccacagatggcaagctgcctgaggtgaccaaggatgtggagaggacagatggagccctgctggtgaatgccatgttcttcaagccccactgggatgagaagttccaccacaagatggtggacaacagaggcttcatggtgaccaggagctacacagtgggcgtgatgatgatgcacaggacaggcctgtacaactactatgatgatgagaaggagaagctgcagatcgtggagatgcccctggcccacaagctgagcagcctcatcatcctgatgccccaccacgtggagcccctggagcggctggagaagctgctgaccaaggagcagctgaagatctggatgggcaagatgcagaagaaggctgtggccatcagcctgcccaagggcgtggtggaggtgacccatgacctgcaggtgcggggcggccctgcctag

SEQ ID NO: 342725 - DNA, 888 bp, Artificial Sequence
  derived and/or modified sequence
atgaggagcctgctgctgctgagcgccttctgcctgctggaggccgccctggccgctgaggtgaagaagccagctgctgctgctgcccctggaacagctgagaagctgagccccaaggccgccaccctggccgagaggtctgctggcctggccttcagcctgtaccaggccatggccaaggaccaggccgtggagaacatcctggtgtcccctgtggtggtggccagcagcctgggcctggtgtccctgggcggcaaggccaccacagccagccaggccaaggctgtgctgtctgctgagcagctgagagatgaggaggtgcatgctggcctgggggagctgctgcggagcctgagcaacagcacagccagaaatgtgacctggaagctgggcagccggctgtatggccccagctctgtgtcctttgctgatgactttgtgcgcagcagcaagcagcactacaactgtgagcacagcaagatcaacttccgggacaagaggtctgccctgcagagcatcaatgagtgggccgcccagaccacagatggcaagctgcctgaggtgaccaaggatgtggagaggacagatggagccctgctggtgaatgccatgttcttcaagccccactgggatgagaagttccaccacaagatggtggacaacagaggcttcatggtgaccaggagctacacagtgggcgtgatgatgatgcacaggacaggcctgtacaactactatgatgatgagaaggagaagctgcagatcgtggagatgcccctggcccacaagctgagcagcctcatcatcctgatgccccaccacgtggagcccctggagcggctggagaagctgctgaccaaggagcagctgaagatctggatgggctag

SEQ ID NO: 342726 - DNA, 453 bp, Artificial Sequence
  derived and/or modified sequence
atgaggagcctgctgctgctgagcgccttctgcctgctggaggccgccctggccgctgaggtgaagaagccagctgctgctgctgcccctggaacagctgagaagctgagccccaaggccgccaccctggccgagaggtctgctggcctggccttcagcctgtaccaggccatggccaaggaccaggccgtggagaacatcctggtgtcccctgtggtggtggccagcagcctgggcctggtgtccctgggcggcaaggccaccacagccagccaggccaaggctgtgctgtctgctgagcagctgagagatgaggaggtgcatgctggcctgggggagctgctgcggagcctgagcaacagcacagccagaaatgtgacctggaagctgggcagccggctgtatggccccagctctgtgtcctttgctgatgactttgtgcgcagcagctag

SEQ ID NO: 342727 - DNA, 1257 bp, Artificial Sequence
  derived and/or modified sequence
atgcggagcctgctgctgctgagcgccttctgcctgctggaggccgccctggcagccgaagtcaaaaagcccgcagctgccgcggcccccgggaccgccgaaaagcttagtccaaaggctgctacactcgccgagcggagcgctgggctcgccttctccctctatcaggctatggctaaagaccaggctgtcgagaatatcctcgtaagtcccgtggtcgtcgcttcctcactaggtctggtttctttggggggcaaggccactacggcgtctcaggctaaagccgtgctctccgctgaacaactgcgcgacgaggaagtccacgccggcctcggcgagctgttgcgaagtctgtcgaatagcactgccaggaacgtgacatggaaacttggctcacgactgtatggaccctcctctgtgtcttttgcagacgattttgtgcggagctctaaacagcactacaattgtgagcactctaaaataaatttcagggacaagcggtcagccctgcagtccattaacgagtgggcagctcagacaaccgacgggaaactcccagaggtgacaaaggatgtggaacgcacagacggcgccctgctggtgaacgctatgttctttaaaccgcactgggatgagaagttccatcacaagatggtcgataataggggatttatggtgaccagaagctatactgttggtgtgatgatgatgcatagaaccggactgtacaattactatgacgacgagaaggagaaactgcagatcgtggaaatgcctctcgcccacaagctctcttcgctaataatcctcatgcctcaccacgttgaacctctggaacggctggaaaagctgttgactaaggagcaattaaaaatctggatggggaagatgcagaagaaagctgtcgccatctctttgcccaaaggcgtggtcgaggtgacccacgacctacaaaagcatctcgcaggattgggcctgacggaggccattgacaaaaacaaggctgatctcagccgcatgtcaggcaaaaaggacttgtacctagcttctgtgtttcatgcaactgcattcgagctcgataccgacggaaaccctttcgatcaggacatctacggacgtgaagagctccgttctccgaaactgttttatgccgatcacccattcatctttttggttagggacactcaatcaggttctttgctgtttattggcagactggtgagaccaaagggggataagatgagagatgaactgtag

SEQ ID NO: 342728 - DNA, 1194 bp, Artificial Sequence
  derived and/or modified sequence
atgcggagcctgctgctgctgagcgccttctgcctgctggaggccgccctggctgccgaggtcaagaagccagcagccgccgcagcccctgggacagcggagaagctgtctcctaaagccgcgaccctagccgagcggtctgccgggttggcttttagtttatatcaggcaatggcaaaagatcaggccgtcgagaacatcctggtatctcccgtggttgtagcgtcgtcactggggctcgtgagcctgggaggaaaggccactacagcctcacaggctaaggcggtcctatctgccgagcagctccgcaacgtgacatggaagcttggcagccgtctgtacggtccctcctcagtttcttttgccgatgacttcgtccgcagctcaaaacagcattacaactgcgaacactccaagataaattttcgagacaagaggtctgccttgcaaagtataaacgaatgggcggcccagactacagatgggaaactgcccgaagtcaccaaggatgtggaaaggacagacggggctctgttagtaaacgctatgttcttcaaacctcactgggatgaaaagttccaccataaaatggtagacaatcgaggtttcatggtcactcgcagttacactgttggcgttatgatgatgcacagaaccggcctgtacaactattatgacgacgaaaaggagaaactacagatcgttgagatgcccctggctcataaactctcctctcttatcattctgatgcctcatcatgtggaaccgctggagcggctagagaagttgcttacaaaggagcaactaaaaatctggatgggcaaaatgcaaaagaaggctgtagccatcagtctgccaaaaggcgtggtcgaggtaacccatgacttacagaaacaccttgccggactagggctgacagaggctatcgataagaacaaggctgacctatccagaatgtcagggaaaaaggacttgtatctagcgagtgtattccatgctactgccttcgagctggataccgacggaaacccgttcgaccaggacatctatggccgtgaagaactccggagtcctaaactcttttatgcggatcacccattcatttttctggtgcgcgatacacagagcggctccctgctgtttatcggcaggctcgtgcggccaaagggcgacaaaatgcgcgacgagctctag

SEQ ID NO: 342729 - DNA, 1257 bp, Artificial Sequence
  derived and/or modified sequence
atgcggagcctgctgctgctgagcgccttctgcctgctggaggccgccctggccgccgaggttaaaaaacccgcagccgctgcagcaccgggcaccgctgagaagttgtcaccaaaagctgcgactttggcagaacgaagcgcaggactggcatttagcctctaccaggccatggccaaagatcaggctgtggaaaacatcttggtgtctcccgtcgtcgtcgcctcatctctcggtctggtatctctgggaggtaaagctactaccgcttcccaagctaaggccgtgctatcagctgaacagcttagagatgaggaggtccacgccggtctgggagaactgctgaggtccctctccaattccactgcccgcaacgtgacctggaaactgggtagccgattatacgggccctcttcggttagttttgccgatgatttcgtaaggagctctaaacagcactataactgcgagcatagtaagattaattttcgggacaagaggagcgctcttcagtctatcaatgagtgggcagcccagacaacagacgggaagctgcccgaagtgactaaagatgtggaacggactgacggggcccttctggtaaacgcgatgttctttaagccccattgggatgaaaaatttcaccacaaaatggtggataacagaggattcatggtgaccaggtcttatactgttggggtgatgatgatgcatagaaccgggctctataactactacgacgacgaaaaagaaaagctgcagattgtggaaatgccattggcccacaagctttcatccctgataatcctgatgccccatcatgtggaaccactggagagactggaaaaacttttgacaaaggaacaactgaagatctggatgggcaaaatgcaaaaaaaagcggtggctatctccctgccaaagggtgtggtagaggtgacccacgatctgcagaagcatctggccggactgggcctcaccgaagctatcgacaagaacaaggcagaccttagccgcatgagcgggaaaaaagatttgtacctggccagtgtgtttcatgccaccgcttttgaactcgatacggatgggaatccctttgatcaggatatctacggccgagaggagctccggagccctaagcttttctatgccgatcacccctttatctttttggtacgagacacccagtctggttccctgctgtttattggaaggctggtgcgtccgaaaggagacaaaatgagggacgagctgtag

SEQ ID NO: 342730 - DNA, 744 bp, Artificial Sequence
  derived and/or modified sequence
atgcggagcctgctgctgctgagcgccttctgcctgctggaggccgccctagccgcggaggtgaaaaaacctgctgccgctgcagcgcccggtactgcggagaaactgagccccaaggctgccactctggccgagcgatccgcaggcctggcctttagcctgtaccaagcaatggccaaagatcaggcagttgagaacatccttgtatcgcctgtcgttgtggcctccagtctgggcctggtgagcctcggggggaaggctactaccgccagccaggctaaagctgtgctttctgcagagcaactgcgggacgaagaagttcacgctgggctgggtgagttattacgatctctgagtaattccactgctaggaatgtgacctggaaacttggctcacggctttatgggccgtcctctgtgtcatttgcagatgatttcgtgcgtagctctaagcagcactacaactgcgaacactccaagatcaattttcgcgacaagaggtctgccctccagagcattaacgaatgggccgcccaaaccacagatggtaaactacccgaggtgaccaaggatgttgagcggaccgacggcgccttgctagtcaatgctatgttcttcaagcctcactgggacgagaaattccaccacaaaatggtggacaatcggggcttcatggtgacgcggtcgtatacggtgggcgtgatgatgatgcatcgaactggtttgtacaactattatgattag

SEQ ID NO: 342731 - DNA, 750 bp, Artificial Sequence
  derived and/or modified sequence
atgcggagcctgctgctgctgagcgccttctgcctgctggaggccgccctcgctgccgaggtaaagaaacctgccgccgccgccgcgccagggacagctgagaagctgtcacctaaagctgcaacactggccgagcgctccgccggactcgccttctctctctaccaagccatggcaaaagaccaggcagttgagaatattctcgtgagcccagtagttgtcgcctctagcctgggactggtctctctgggggggaaagcgacaaccgctagtcaagccaaagccgtcctttctgctgagcagctacgggacgaggaagtccatgccggcctcggtgagctcttgagaagtctctccaactccaccgcacgtaacgtgacttggaaactgggtagtcggctctacgggccaagctctgtaagctttgcagatgatttcgtgcgatctagcaaacagcattacaactgtgagcactctaagatcaattttcgagataaacgttcagcgctccagagtattaacgagtgggcggctcagactacagatggaaaattgcccgaggtcaccaaggacgtggaaagaaccgacggggctcttttagtgaatgctatgttctttaagccacattgggacgagaaattccaccacaaaatggtggacaaccgcgggttcatggtgaccaggtcttatacggtaggcgtcatgatgatgcatagaacaggactctacaattactacgatgacgagtag

SEQ ID NO: 342732 - DNA, 612 bp, Artificial Sequence
  derived and/or modified sequence
atgcggagcctgctgctgctgagcgccttctgcctgctggaggccgccctggctgccgaggtcaagaagccagccgctgccgcagcacccggaaccgctgaaaagctgagtcctaaggccgcaactcttgcggaacggtcggcaggcctggcattctccctgtaccaggcaatggccaaggaccaggctgtcgagaacatacttgtgtctccagtggtggtcgcttccagtcttggattagtgagccttggaggtaaggctaccacagcgtctcaggcgaaggccgttctctctgcagagcagcttcgggatgaggaggtgcacgccggccttggtgaattacttcgctctcttagcaactcgacagccaggaatgtgacctggaagttgggaagtaggctctatggccccagcagtgtcagctttgccgatgattttgtccgcagcagcaaacaacattataattgcgagcactctaaaatcaacttccgggacaagaggtctgctttgcagagtattaatgagtgggctgctcagacaacggatgggaagttgcctgaggtgacgaaagacgttgagcgcacagacggggccctcctcgtgaacgcttag

SEQ ID NO: 342733 - DNA, 492 bp, Artificial Sequence
  derived and/or modified sequence
atgcggagcctgctgctgctgagcgccttctgcctgctggaggccgctctggccgcagaggtcaagaagccagccgccgctgccgcaccgggaaccgcagaaaaactgtcccctaaggctgcgaccctggctgagcgatctgcaggcctggccttttctctgtaccaagccatggccaaggatcaggccgtggagaatatcctggtaagtcccgtggtcgttgcctctagcttggggctggtaagcctggggggcaaagccacgacagcctcgcaggccaaagcagtgttgagcgccgagcagctccgggacgaagaggtgcatgcgggccttggcgagctgttgcggtctttatctaactctaccgcccgtaacgtgacctggaaattgggttctagattatacgggcccagttctgtgagctttgcagacgacttcgtgcgctccagcaaacaacattataactgcgagcattccaagataaatttttag

SEQ ID NO: 342734 - DNA, 504 bp, Artificial Sequence
  derived and/or modified sequence
atgcggagcctgctgctgctgagcgccttctgcctgctggaggccgcacttgcggccgaagtcaaaaaacctgccgccgcagctgccccaggtacagccgaaaaactcagccccaaagccgcgaccctggccgagcgaagtgcgggcctggccttctcattgtaccaggcaatggcaaaagaccaggcagtggaaaatatacttgtttccccggtagtagtagcttcatcactcggtctagtctctcttggtggcaaagccactacagccagccaggctaaagccgttctgtctgctgagcagcttagggatgaggaagtccacgccggacttggcgaattgctccgcagcctgagtaattctaccgcgcggaacgtcacctggaagctcggcagcagactgtacggcccttcctccgtttcttttgccgatgacttcgtgcgctcttccaaacagcattacaactgcgaacactccaaaattaacttccgggataagcgctag

SEQ ID NO: 342735 - DNA, 975 bp, Artificial Sequence
  derived and/or modified sequence
atgcggagcctgctgctgctgagcgccttctgcctgctggaggccgcccttgcagccgaggtgaagaaaccagctgctgctgctgctccgggcacagctgagaagctgagccctaaggccgccacactggccgaacgttctgcaggccttgctttcagcctctatcaggccatggcaaaggatcaggccgtagaaaatatcctcgtgtctccggtggttgtggcatcgagtctggggctcgtgtctttaggtggcaaggcaacaactgcctcccaggccaaagccgtgttatcagccgaacagctacgtgatgaagaagtgcacgctgggctaggggagctcctccggtccctgtccaacagtaccgcacggaacgtgacctggaagctggggtcccgcctgtacggtccaagctctgtgagctttgccgacgactttgtccggtcttcaaagcaacattataattgcgagcactccaagatcaacttcagagataagaggtcagccctgcaaagtataaatgaatgggctgcacagactacagacgggaaacttcctgaagtgaccaaggatgttgagcgcaccgatggcgcgttgttagtgaatgccatgttttttaagccccactgggacgagaaatttcatcataaaatggtggataaccgcgggtttatggtgacccgcagctataccgtgggagtgatgatgatgcacaggactgggctgtacaactattatgacgacgaaaaggaaaagctgcagattgttgaaatgccccttgctcataaactgtcctctctcatcattctgatgccgcatcacgtggagccactggaaaggttggagaaacttctgactaaagagcagctgaaaatctggatgggtaagatgcagaagaaggctgtggccatttctctccccaagggcgtggtggaagtaactcacgacctgcaagtccgcggggggcctgcttag

SEQ ID NO: 342736 - DNA, 888 bp, Artificial Sequence
  derived and/or modified sequence
atgcggagcctgctgctgctgagcgccttctgcctgctggaggccgctcttgcagcggaggtcaagaaaccagccgctgctgcggcccctggcacagcggaaaaactcagtccgaaagcagcgacactggcagagaggtccgccgggctggctttttccctgtaccaggcaatggcgaaagatcaagcagtagaaaacattctggtatcacctgtggtggtagcgtcatcactgggactggtaagtttgggcggcaaagcaactaccgcctcccaagccaaagctgtcctgtcagccgagcagctgcgggacgaggaagtgcacgccggtctcggcgaactgctaagaagcctgtctaactccaccgctaggaatgtaacgtggaagcttggatcgcgcctgtacggcccaagctctgttagctttgcagacgactttgtacggtcttccaaacagcattacaactgcgagcattccaaaattaattttcgggataagagatctgccttgcagtctattaacgaatgggccgctcaaactaccgacggaaagctcccggaagtaactaaggacgtggagcgaaccgacggggccctgcttgtaaacgcaatgttttttaaaccccactgggacgagaaatttcaccacaaaatggtggataatcggggattcatggtcactcgcagctacaccgtgggtgtcatgatgatgcaccgcactggtctgtacaattactacgacgacgagaaggaaaagctgcagatcgtggagatgccactggcccacaagctcagctctctgataattcttatgcctcaccatgtggaaccccttgaacggcttgaaaagttactcaccaaagaacagctcaagatctggatggggtag

SEQ ID NO: 342737 - DNA, 453 bp, Artificial Sequence
  derived and/or modified sequence
atgcggagcctgctgctgctgagcgccttctgcctgctggaggccgctctagccgcggaggtgaagaaaccagccgccgctgcagctcccgggacagccgaaaagttgtctcccaaggccgccaccctggcggaacgcagcgccggactggctttcagtctctaccaggctatggccaaggaccaagccgtcgaaaacatactcgtcagccccgtggtggtcgcaagctctctgggcctcgtgtcccttgggggcaaagctactactgcaagccaggccaaggctgtattatcagcggaacagctgagagacgaagaggttcatgctggcctgggcgagcttcttaggtctttgtccaatagcaccgcgagaaacgtgacctggaagcttgggtctaggctgtatggccccagtagtgtttcgttcgcagatgatttcgtgcggagttcatag

SEQ ID NO: 342738 - DNA, 1257 bp, Artificial Sequence
  derived and/or modified sequence
atgcggagcctgctgctgctgagcgccttctgcctgctggaggccgctttggctgcagaggtaaaaaaacccgctgctgccgctgcaccaggaactgcggaaaaactctctccaaaggcagcaacgctcgccgaacggtctgccggcctcgctttttcactgtatcaggctatggcgaaggatcaggcagttgagaatatccttgtcagtcctgtcgtggtggcatcttcgctagggctagtgagcctcggcggaaaagccacaaccgctagccaggctaaagcagtgctttccgcagaacaactgcgggacgaagaggtgcatgcaggtctgggcgagctgctgcggagcctttctaatagtactgccagaaatgtaacctggaaactgggatctcgcctctacggaccttccagtgtgtccttcgcagacgacttcgttagatctagtaaacagcactataattgcgaacacagtaagatcaactttcgcgacaagcgctccgcgctacagagtattaatgagtgggcggcccagaccacagatgggaagcttcctgaagtgaccaaggacgtcgaacgcaccgacggagctctgctggtcaacgcaatgttcttcaaaccacattgggatgagaagtttcaccacaaaatggtggataacagagggttcatggtcacgaggtcatacaccgtgggagtcatgatgatgcaccggaccggattgtacaactactatgacgacgagaaggagaaacttcaaattgtagaaatgccccttgcccacaagctctcatcgcttatcattctcatgcctcaccatgttgagccccttgaacgcctggagaagctactgactaaagaacagctgaagatatggatgggaaaaatgcagaaaaaggcggttgcaatatctctgcccaagggtgtggtcgaggtaactcatgacctccaaaagcatctggccggattgggtctgaccgaagccatcgataaaaataaggccgatctgagcaggatgagtggaaagaaagacctgtaccttgcatcagtctttcacgccactgctttcgagctggacacggacgggaaccccttcgatcaagatatttacggcagagaggagctccgatcccccaagcttttctatgctgatcaccctttcatattcctcgtcagggacacacaatctggttcgctcctctttataggtaggctcgttcgccccaagggcgacaagatgagggatgagctctag

SEQ ID NO: 342739 - RNA, 1257 nt, Artificial Sequence
  derived and/or modified sequence
augagaagccuccugcuacucucagcuuuuugcuugcuggaggcagcacuggccgcagaaguaaagaaaccagcggcugccgcagcgcccggcacagccgagaagcugagccccaaagcggcuacauuggcagagagaucggcuggacuagccuucagccucuaucaggcuauggcaaaggaccaagcagucgagaauauacugguuucucccgucguaguggcauccagucucggacugguuaguuuaggagguaaagcaaccacagcaagccaagcaaaggcgguuuuaucagcagagcaacuacgggaugaagaggugcacgcaggacugggggagcuguugcguucauuaucuaacuccacagccaggaaugugacauggaagcuaggcucaagacuuuauggaccuuccucggucuccuuugccgacgauuucguccggucaagcaagcagcacuacaauugugaacacucaaagaucaacuuuagggauaagaggucagcacugcagagcaucaacgagugggccgcccagacaaccgacggcaaacucccagaagucacuaaagacguggaaagaacagacggcgcuuuacuggugaaugccauguuuuucaagccccauugggacgagaaguuucaccauaagaugguggacaaccgagguuucauggugaccagauccuacacuguuggcguuaugaugaugcacagaacugguuuguacaacuauuaugaugaugaaaaggaaaaacuucagaucguugagaugccgcucgcucacaagcucucaucacugaucauuuuaaugccccaucacguggaaccucuggagcgguuagagaaguugcugacuaaggagcagcuuaagauuuggauggguaagaugcagaagaaagccguggcuauuagccuaccuaaaggggucgucgaagucacgcacgaccugcagaagcaucuggccggacugggcuugacggaagcaaucgauaagaauaaagcugaucuaagccgcaugucuggaaaaaaggacuuguaccuugcgagcgucuuccaugcaaccgccuucgaacucgauacugauggaaauccauuugaucaggacauuuacggaagggaggaauugcgaagcccuaagcuauucuacgcugaucacccauuuauuuuucuagugcgggacacucaaagugggucccuguuguucaucggacgguuagugagaccaaaaggagacaagaugcgcgaugaauuguag

SEQ ID NO: 342740 - RNA, 1194 nt, Artificial Sequence
  derived and/or modified sequence
augagguccuuguuauuacuuucagcuuucugcuuguuggaggcugcacuggcagccgagguuaagaagccagcagcagcggcugcaccaggcaccgccgaaaaguugaguccaaaggcagcaacccuggcagagagaucggcugggcuagccuucagucuauaucaggccauggccaaagaucaagccgucgagaacauacugguuagccccguggugguugccucuagccugggccugguuucacuuggcggaaaagcaacaacugcaucacaggcgaaagcaguacugagcgcagagcagcuccgcaaugugacguggaaguugggcagcagacucuacgguccauccucgguaucuuuugcagacgauuuugugcgaucuagcaagcaacacuacaacugugagcacucuaagauaaauuuucgcgauaagagaucugcucugcaaucaauuaacgagugggcugcacagacuaccgacggcaaguugccagaaguuacaaaagauguugagagaacagauggggcguuacuggugaacgccauguucuucaagccucacugggacgagaaauuccaucacaagaugguugacaaccgcgguuucauggugacaaggagcuauaccgugggugugaugaugaugcaccggacagggcucuauaacuacuacgacgacgaaaaagaaaaguugcaaaucgucgagaugccgcucgcccauaagcuauccaguuuaauuauccugaugccacaucaugucgaaccccuggaacggcuggagaaauuacuuacuaaggaacaauugaaaauauggauggggaagaugcaaaagaaagccguggcaaucucacuucccaagggugugguugaagugacccacgaucuucagaagcaucucgccggccuuggccugacagaagcgauagauaagaauaaggccgaucuaucuaggaugagugggaaaaaggauuuauaucuggcuucugucuuucacgccaccgcuuucgaacuggacacugacggcaaccccuucgaucaagacauauauggcagagaagaauuacguucgccuaaacuguucuaugcagaccacccguuuaucuuuuuagugcgggauacacagagugggagccuacuauucaucgggaggcuggugcgcccaaagggggauaagaugcgugacgaacuguag

SEQ ID NO: 342741 - RNA, 1257 nt, Artificial Sequence
  derived and/or modified sequence
augcggucauugcuguugcugagcgcauucugcuuacuggaggccgcccuggccgccgaagugaaaaaaccugcugccgccgcggcccccggcaccgccgaaaaacugucuccgaaggccgcuacgcuggcagaaagaagcgccggucuugcauuuagccucuaccaagcaauggccaaggaccaggcuguggagaauauccuugugucucccgugguugucgcuucaucgcugggacuggucucccuugggggcaaagcaaccacagcaucccaagcaaaagcuguguuguccgcagaacaacugcgcgaugaggaggugcacgccggacuuggagagcuacuccggagcuugucuaauagcacagccagaaaugugacuuggaaacuaggcucuagguuguacggaccuucuaguguauccuucgcugacgauuuugugaggaguucaaagcagcauuauaacugugagcauuccaagaucaauuuucgcgacaagcggucugcuuuacaguccauaaacgaaugggcagcucagaccacggacggcaaacucccggaggucacaaaagacguggaaaggaccgauggagcccugcuggucaaugcuauguucuucaaaccccacugggaugagaaguuucaucacaaaaugguggacaaccgcggcuucauggugacccggucuuauacugucggcgugaugaugaugcacaggacaggacuuuauaauuauuaugaugacgaaaaagagaaacugcagauuguugagaugccccucgcucauaagcugagcucacugaucauucuuaugccgcaccauguagaaccucuggaaagacuggagaaacugcuuaccaaggaacaacuuaagauuuggaugggaaaaaugcaaaaaaaagccgucgcuauuucacuccccaaaggugucguugaagugacgcaugaccuacaaaaacacuuagcgggacugggucugacagaggcgauugacaagaauaaagcugacuuaucucgaaugucuggaaagaaagaucuguaccuggcauccguguuccacgccacugccuuugagcuggacacugacggcaacccauuugaccaggauaucuauggcagagaagagcuucgaagcccuaagcuuuuuuacgccgaccauccuuuuauauuucuggugcgggauacucagucuggguccuuacuguuuauuggccgcuuggugcgcccaaaaggugauaaaaugagagacgaacuauag

SEQ ID NO: 342742 - RNA, 744 nt, Artificial Sequence
  derived and/or modified sequence
augcggucucugcuucuucugucugccuucugucugcuggaggcagcucuggcugcggaaguaaagaaaccugccgcugcagcagccccugggaccgccgaaaaauugagccccaaggcugcgacacuggcagaaaggagcgccggcuuagcuuuuagucuuuaucaggcaauggcaaaagaucaggccguagaaaauaucuuggugagcccagucgucguggcguccuccuugggccugguuagcuuaggcggaaaagcaacaacagccucgcaagcaaaggccguucucucugccgaacagcuuagagaugaagaaguucacgccggucucggcgaacuacuuaggucacucucuaacaguacggcccggaaugugacauggaaauuagggaguagauuguacggccccaguagcgucucuuucgcagacgacuucguucgguccaguaagcagcauuacaauugugaacauucaaagaucaacuuucgugauaagagaagcgcccuacaguccaucaaugagugggcggcgcagaccacugacggaaaacugccagaagucacaaaagauguggagcguacugacggcgcacugcuagugaacgccauguucuuuaaaccacacugggaugaaaaguuucaccacaaaauggucgauaaccgcggguucaugguuacacguagcuacacagucggagucaugaugaugcaccguaccgggcucuacaacuauuaugacuag

SEQ ID NO: 342743 - RNA, 750 nt, Artificial Sequence
  derived and/or modified sequence
augcgaagccugcuguuacuuagugcuuucuguuugcuggaagcugcccucgcggccgaagugaaaaagccugcugccgcagccgcgcccggaacugccgagaaacucucacccaaggccgccacuuuagcugaacgcagcgccggauuggcauucucacucuaucaggccauggccaaggaucaagcuguugagaacauucuggugucuccugucguuguugccagcucccuugggcucguuucucucggagguaaggcgacaacugcaucucaagcaaaagcagugcucucagcggagcaacuucgcgacgaggaagugcacgcagggcuuggugagcuuuuacggagccucagcaauagcacugcucggaacguaacguggaagcucggcagucgguuauacggaccaucuaguguuucguuugccgaugauuuugugaggaguuccaagcagcacuauaauugugaacacaguaagauuaauuuucgagacaaaaggagugcccuucagucuauuaaugaaugggccgcacagaccacggaugggaaacugccugaagucacgaaggaugucgagagaacagauggagcuuugcucgucaaugccauguucuucaagccacauugggaugaaaaguuucaccacaaaaugguagauaaucgcggcuucauggugacaagauccuacacagugggugugaugaugaugcauaggaccggccuguacaacuacuaugacgacgaauag

SEQ ID NO: 342744 - RNA, 612 nt, Artificial Sequence
  derived and/or modified sequence
augcguagccugcuacuguuguccgccuucugccucuuggaagccgcccuugccgccgaggugaagaaacccgcagccgcagcagccccagggaccgcugagaaacuuucaccuaaagcagcuacucuggcggagaggagcgcuggucuagcauucucucucuaucaggcuauggcuaaagaucaggccguggagaacauuuuggugucucccgugguaguggccucaucgcucggguuaguaucucuaggcggaaaagcuacuacagcuucacaggcaaaggcagugcugagcgccgagcaacugagagaugaggagguccacgcgggcuuaggggagcuccuucgcuccuuaaguaacucaacugcacggaauguuacauggaaacuugggucuagauuguacggucccaguucaguuucauucgcugaugauuucguacgauccucaaagcaacauuacaauugcgaacacagcaaaaucaacuuucgcgacaagcggagcgcacuccagagcauuaacgagugggcggcccaaacaaccgacgguaaacuuccagaggugacuaaggauguggagagaacugacggagcuuugcuggugaacgccuag

SEQ ID NO: 342745 - RNA, 492 nt, Artificial Sequence
  derived and/or modified sequence
augaggucccuucugcuccugucugcauuuuguuugcuggaggccgcccuugcugcagaagugaaaaaaccugccgcagcugcagcgccaggcaccgccgaaaagcuaagcccuaaggcagcaacauuggcugagcgaucagccggguuggcuuucucucucuaucaggcuauggccaaagaccaggccguugagaacauacucguaucuccaguggugguagcuaguagucuuggacuugugucucugggagguaaggcuacuaccgccucucaggcuaaggccguauuaucagccgagcaacuccgugacgaagagguccacgcaggucugggagaacucuugcgaucucugucaaauucaacugcucggaacgucacuuggaagcugggaagucgguuguauggaccuucuucugugucauucgcugaugacuuugugcgcaguuccaagcagcacuauaauugcgagcauucuaaaaucaacuuuuag

SEQ ID NO: 342746 - RNA, 504 nt, Artificial Sequence
  derived and/or modified sequence
augagaucccuucuccuacucuccgccuucugucugcuggaagcugcacuugccgccgaagucaaaaagccugcugccgcagcugcgccagggaccgccgaaaaacugagucccaaagccgcgacccuggcagaacggucggccggccuugccuuuucucucuaccaagcaauggcaaaggaucaagcugucgagaauauucuggugagcccagucgucgucgcuucaucccugggccuggugucucugggagguaaggcuacaaccgcgucucaggcaaaagcaguccuaucagcugagcagcugcgggacgaagaaguacacgccggguugggcgagcuacuacgaucucugagcaacuccaccgccagaaacgugacuuggaaacucggcucacgccuguacggcccguccucugugagcuucgccgacgauuuuguuagaucgagcaagcaacauuacaacugugagcacaguaagaucaauuuucgggacaaacguuag

SEQ ID NO: 342747 - RNA, 975 nt, Artificial Sequence
  derived and/or modified sequence
augaggucauugcugcuguugagcgcauuuugccuccuugaagcugcccucgccgcugagguuaagaagccugccgcagccgcagcaccugggacagcugagaaacuguccccaaaagccgcaacccucgcagagcgaagcgccggacuugcuuucucucuguaucaggccauggccaaggaccaagcaguggagaacauccuggucaguccaguggugguggcuucaucucugggccuagucucacugggagggaaggccacgacugccagccaagccaaggccguccuguccgcugagcaauuacgcgaugaagagguucacgcuggccugggcgagcuccugcguucauuaagcaacaguaccgcgcgcaaugugaccuggaaauugggauccagacucuacggcccuagcucuguguccuucgccgaugacuuuguuagguccuccaagcagcacuauaacugugagcauucuaaaaucaacuucagagacaagcgcuccgcccugcaaucaauuaacgagugggcugcucagacaaccgacgggaagcugccagaggucaccaaagauguggagaggacagauggcgccuugcugguuaaugcuauguucuuuaaaccgcacugggaugaaaaauuucaucacaaaaugguggacaauaggggauuuaugguuacacguuccuacacugugggggugaugaugaugcaucgaacaggcuuguacaauuauuacgacgaugaaaaagagaaacuucagauuguggaaaugccgcuggcccacaagcuuuccucucucauaauucucaugccacaccauguggaaccacucgagcguuuagaaaaacugcuuacuaaggaacaguuaaaaauuuggaugggaaaaaugcagaagaaggcugucgccauuucccucccuaagggcguuguagagguuacccaugaucuccaggugagaggugggcccgcuuag

SEQ ID NO: 342748 - RNA, 888 nt, Artificial Sequence
  derived and/or modified sequence
augcggucauugcuacuauugucugcuuuuugccugcuggaagcugcgcuggcagccgaagugaagaagccugccgcugccgcagccccuggcacugcggagaaacuuuccccuaaggcugcgacacucgcggagcgcuccgcaggccuugcuuucucauuauaccaagcuauggccaaagaucaagccguugaaaauauccuggucuccccuguugugguggccucgagccugggauuagucucccucggaggaaaggccacaaccgccagucaagcgaaggcuguccugucagccgaacagcuuagagacgaagaggugcacgcgggacucggggaacugcuccggagcuugaguaauaguacagcccgaaacgucacuuggaaacugggcucaagacucuacggcccuagcuccgucucauucgccgacgacuuugucagguccagcaagcaacauuacaacugugaacauuccaaaaucaacuuucgcgauaagagaucagcccuacaaaguauuaaugaaugggccgcccagacaacagaugguaaauugccggaggugacgaaggacguggagaggacggacggagcccugcuggucaaugccauguucuuuaagccccacugggacgaaaaauuccaucacaaaauggucgacaaucgcggauucaugguuacaaggucuuacaccgugggcgugaugaugaugcauagaaccggccucuacaauuauuaugacgacgaaaaagaaaaacugcagaucguugaaaugccucuagcucacaagcucucuucucugauuauucuuaugccucaccauguggagccauuggaacgccucgagaagcugcuaaccaaagaacagcugaagauauggaugggguag

SEQ ID NO: 342749 - RNA, 453 nt, Artificial Sequence
  derived and/or modified sequence
augaggagucugcuccuauuguccgcuuuuugccugcucgaggcggcccuggcagcugaagucaaaaagcccgccgcagccgccgccccuggcacagccgagaagcuguccccuaaggcugccacucuggcagagcguagcgccggucuggcauucaguuuauaucaagcaauggccaaagaccaggccgucgaaaacauccucguaagucccguugugguggccucuuccuuaggacuggucucccucggugguaaagcaacaaccgcuucacaggcuaaagcaguccuuagcgccgagcagcugcgcgaugaggaagugcacgcaggccucggagagcuccuaaggucccucucuaauucuacugcccguaaugugacguggaaacugggcucucgauuauacggcccuucuucuguaucauucgcugaugacuucgucagaaguaguuag

SEQ ID NO: 342750 - RNA, 1257 nt, Artificial Sequence
  derived and/or modified sequence
augcgcagcuuacuucugcucucugccuucugccugcuggaagccgcacuggcugcagaagugaaaaagccagcagcugccgcagcccccggcacggcugaaaaacugaguccgaaagcagcaacccuagcugaaaggucugccgggcuggcuuuuagccuguaucaggccauggcuaaggaccaggcaguggagaauauccuggucucaccaguuguuguggcaucgucacuuggcuuagugucacucgggggaaaagccaccaccgcaagucaagcuaaggcuguucuuagcgcugaacagcugcgcgacgaagaggugcaugcaggguuaggcgaacuccugcggucuuugucuaauagcacagcccgaaacgugaccuggaagcugggcucucgucucuaugggccaucuagugugucauucgcagacgacuucguucggagcuccaagcagcacuacaacugcgaacacaguaaaaucaauuuucgggauaagagauccgcauuacagucgaucaacgagugggccgcacaaacaacagacgggaagcucccagaggugacgaaggacguugagaggaccgauggagcccugcuagugaaugcuauguuuuuuaagccacacugggacgagaaauuucaccauaagaugguggauaacaggggauuuauggugacccgcuccuauacugugggcguaaugaugaugcaccggaccggacuauacaauuacuaugacgaugaaaaggaaaaguuacagaucguugagaugccgcucgcacauaaauuaagcucccuuauuaucuugaugccccaucacguggagccccuugaaagauuggaaaaacuucugacaaaagaacagcugaagauauggauggguaaaaugcaaaagaaagcugucgccauuucccugccuaagggcguagucgaggugacacaugaucuccagaagcacuuggcggguuuaggauugaccgaagcuauugacaagaauaaagccgaccucagccgcaugagcgguaagaaggaucuguaucucgccucuguauuucacgccacagcguucgagcuagacacugacggcaaucccuuugaccaagacauuuauggacgcgaggaauugcguaguccuaaacucuuuuacgccgaucauccuuucaucuuccuaguaagagacacucagucgggcagucuccuuuuuauugguagacucguccgaccgaaaggagauaaaaugcgagacgagcuguag

SEQ ID NO: 342751 - RNA, 1257 nt, Artificial Sequence
  derived and/or modified sequence
augaggagucuacugcuucuuuccgccuucugccuccuggaagccgcccuggccgcugaggugaaaaaaccugccgccgccgccgcaccugguacagccgaaaaacugucccccaaagcagccacucuggccgaacggagugccggacuggcuuuuucgcucuaccaagcaauggcaaaagaccaggccguggagaauauccuuguuucuccgguaguugucgcaagcucacugggauuggucucccucgggggaaaagcaaccaccgcuucgcaggccaaggccguguuguccgcugagcaacuacgggaugaagaggugcacgcaggacugggggagcuguugcguucauuaucuaacuccacagccaggaaugugacauggaagcuaggcucaagacuuuauggaccuuccucggucuccuuugccgacgauuucguccggucaagcaagcagcacuacaauugugaacacucaaagaucaacuuuagggauaagaggucagcacugcagagcaucaacgagugggccgcccagacaaccgacggcaaacucccagaagucacuaaagacguggaaagaacagacggcgcuuuacuggucaacgccauguuuuuuaaaccacauugggacgaaaaguuccaccacaaaaugguggacaaccgcggauucaugguaacucgcaguuauacaguuggugugaugaugaugcaccggacuggccucuacaacuauuacgaugacgagaaggagaaguugcagaucguagagaugccacuggcccauaaauuaaguagccuuaucauccugaugccccaccauguagaaccccucgaaaggcuggaaaaacuucugaccaaggaacaguuaaagaucuggauggguaaaaugcagaagaaggcuguugccauuagccugcccaaaggugucguugagguuacucaugaucugcagaagcaucucgccggucugggacucaccgaagcgaucgacaagaauaaagcagaucucucaaggaugucagguaagaaggauuuguaucuggcaucaguuuuucaugccaccgcauucgagcucgauacugacggcaaucccuuugaucaagauaucuacggccgcgaagaacugcguuccccgaaauuauuuuaugccgaccacccauuuauuuuuuugguacgggauacccaaucaggaucccuccuuuucauaggccgauuaguuagaccuaaaggcgacaaaaugagggacgagcuguag

SEQ ID NO: 342752 - RNA, 1194 nt, Artificial Sequence
  derived and/or modified sequence
augagaucauuauuguugcuuucagcuuucugccugcuugaggcugccuuagccgcggaagucaagaaacccgccgccgcagcugcuccaggaacugccgaaaaguuaaguccuaaggccgccacauuggccgagcguucagcuggccucgccuuuuccuuauaucaggcaauggccaaagaccaggccguagaaaauauucugguaucacccguagugguugcuucuucauugggcuuggucucacugggagguaaagcuacuacugcuucccaggcaaaggcugugcuguccgcagagcagcuccguaauguuacauggaaauuaggaucaaggcucuacggcccuuccucugugucauucgcggaugacuucguucgaagcuccaagcaacacuacaacugcgaacacagcaaaaucaacuucagagauaagcgauccgcucuucagaguauaaacgaaugggccgcucagacuacugacgggaaacucccugaaguaacuaaggaugucgagcggacagacggcgcgcugcugguaaacgccauguuuuucaagccccacugggaugagaaguuucaccacaagauggucgauaaucggggauuuauggugacaagaaguuacaccgugggcguaaugaugaugcaucgcacaggcuuauacaauuacuacgacgaugaaaaagaaaaacugcaaauugucgaaaugccguuagcccacaagcuuagcucacuuaucauucugaugccucaccacguagaaccccuggaaagguuggaaaaacuauuaacaaaggagcagcugaaaauauggauggguaaaaugcagaagaaggccguggcuaucucacugccuaaaggcguaguggaggugacacaugacuuacagaagcaccucgccggguuaggacucacugaagcaaucgauaagaauaaggcugaccugagcagaaugucugggaagaaggaucuguaucuggcuagcguguuucaugcaaccgccuucgagcuugauacugacgguaauccuuucgaccaggauaucuauggccgggaagaacugcgaucacccaaauuguucuaugcugaccacccuuucauuuuucuuguuagagauacccagagcggcaguuugcucuucaucggacggcuggugcgcccaaaaggagauaagaugcgcgaugaacuguag

SEQ ID NO: 342753 - RNA, 1257 nt, Artificial Sequence
  derived and/or modified sequence
augcgaucacuccuucuucugucagccuuuugccuccuggaggcggcucucgccgcugaagucaagaagcccgcagccgccgcagcucccggcaccgcugaaaaacucucucccaaggccgccacccucgccgaaagauccgcugggcuugcauuuucccuuuaccaggcuauggccaaggaucaggcaguggaaaauauccuggucucaccaguugugguugccaguucccuaggcuuggugucccuaggcggcaaagccacaacugccagccaagccaaagcaguguuauccgcugagcagcuuagagacgaagaggugcaugcaggguugggggagcuccugcggagccugagcaacucgacugccagaaacgucaccuggaaauuggguagcagauuauacggaccuucuagcgugaguuuugccgacgacuuuguucggaguucuaagcaacacuacaauugcgagcacagcaagaucaacuuuagagauaaacguagcgcauugcaaagcaucaacgaaugggccgcccagacaaccgaugguaaguugcccgaagucacuaaggauguggagagaacagauggggccuuacuggugaaugcuauguuuuucaaaccacacugggaugagaaguuucaccacaagaugguggacaauagaggguuuauggucacuagaaguuauacaguugggguaaugaugaugcaccggacuggacuuuacaauuauuaugaugacgaaaaggagaagcuucaaauagucgaaaugccacuugcgcacaaacugagcagcuuaaucauucugaugccgcaccacgucgaaccuuuggaacggcucgaaaaguuauugaccaaggaacagcucaaaaucuggaugggcaaaaugcagaaaaaagccguggcuaucagucugcccaaagguguuguggaagugacacacgaccugcaaaagcaccuggcgggauuaggucuuacagaagcgauugacaagaacaaagccgaccugucacggaugucuggcaagaaagaucuauaccuugccucaguguuccacgccaccgcauucgagcuagacacagauggcaacccauucgaucaggacauuuacggacgagaggagcuaagaucccccaaauuauucuaugccgaucacccuuuuauuuuucuggugagagauacacaaucaggaagccugcuguuuauaggcagauuagugcgaccuaaaggagauaaaaugagagacgaacuguag

SEQ ID NO: 342754 - RNA, 744 nt, Artificial Sequence
  derived and/or modified sequence
augcguucucugcuuuuguuaucagccuucugcuuacucgaagcagcucuggcggcugaagugaagaaacccgccgccgccgcagcgccaggaacggccgaaaagcugucgccaaaagcagcuacccuggcagaaaggagugccggacuggcauucucccuuuaccaagccauggcuaaagaucaggcaguagagaauauuuugguaagcccaguuguagucgccucaucccuuggacuaguuucccugggcggaaaagcuacgacagcaucucaggcaaaagccgugcucagugcagagcagcucagggaugaggaagugcaugccgggcugggggagcugcuaaggagcuugucaaacucuacugccagaaaugucaccuggaaauugggaucccgccuuuacggcccaucuuccguaucauucgccgaugauuucguccgauccuccaaacagcauuauaacugugaacauaguaaaauaaacuuuagagauaaacgcucugcccugcagucuaucaacgagugggcugcacagaccaccgacggaaaauugccugaagugacuaaggacgucgagagaaccgauggcgcucugcucgugaacgccauguuuuuuaagccgcacugggacgaaaaguuccaucacaaaaugguggauaacaggggauuuaugguaacaagaagcuauacugugggggugaugaugaugcauaggacuggauuguacaauuauuaugauuag

SEQ ID NO: 342755 - RNA, 750 nt, Artificial Sequence
  derived and/or modified sequence
augcgaagccugcuguuacuuagugcuuucuguuugcuggaagcugcccucgcggccgaagugaaaaagccugcugccgcagccgcgcccggaacugccgagaaacucucacccaaggccgccacuuuagcugaacgcagcgccggauuggcauucucacucuaucaggccauggccaaggaucaagcuguugagaacauucuggugucuccugucguuguugccagcucccuugggcucguuucucucggagguaaggcgacaacugcaucucaagcaaaagcagugcucucagcggagcaacuucgggaugaagaggugcaugccggucucggggaguuacugagaucccugucgaauaguaccgcacgaaacgugaccuggaaauuaggaaguaggcuuuacgggcccaguucaguaucauuugccgaugacuucguccggucgaguaaacagcauuacaauugcgagcacaguaagauaaauuuucgagauaagcggagugcucugcagagcauuaacgagugggccgcucaaaccaccgauggcaaacugccagaagugacuaaagacguagaaagaacugauggagcucuucuggugaacgccauguucuuuaagccacauugggacgaaaaauuccaccacaagaugguagauaaccggggauuuauggugaccaggaguuacacuguaggagugaugaugaugcauaggacgggauuguauaacuacuacgacgaugaauag

SEQ ID NO: 342756 - RNA, 612 nt, Artificial Sequence
  derived and/or modified sequence
augcggucccugcuuuuacuaucugccuuuuguuuauuagaagcagccuuggcugcagaagugaaaaagcccgcagccgcugccgcaccuggcacggccgaaaaguuaagcccgaaggcugcaacccuggcggaacgcucagccgguuuggcauucucccucuaucaggcuauggcaaaggaccaggcuguugaaaauauucuggucucccccguaguggucgccuccagucucggauuggugucucugggcgggaaggcaacaacagcaucccaggccaaagccguccucucugcagagcagcuucgugaugaggaagugcacgcuggacugggagaacugcugcgaagucuauccaauuccaccgcaagaaacguaaccuggaaacugggaagccgccuguacggaccuagcucuguaucauuugccgacgacuuuguacgaaguagcaagcagcauuauaacugugaacauucuaagaucaauuuucgagauaaaagguccgccuuacaguccauuaacgagugggcagcacagaccacugacggaaaacugccugagguuacuaaggaugucgagcguaccgauggggcacugcuggugaacgccuag

SEQ ID NO: 342757 - RNA, 492 nt, Artificial Sequence
  derived and/or modified sequence
augaggucguugcuucugcucucugcuuucugccuccuggaagcugcuuuagccgcugaggugaagaaaccggcagcagcagcagcacccggcacagccgaaaaacuguccccaaaggccgcuacgcucgcugaaaggagcgcugggcucgccuucucucuuuaccaagccauggccaaggaccaagccguugaaaauauccugguauccccugucguugucgccucaagccucggacucguaucucugggcggaaaggcaacaacugccucucaggccaaagccguccugucugcggagcagcugagagacgaagaggugcaugccggauuaggggaacuuuuaaggucucugaguaauuccaccgcccgcaacgucaccuggaaacuugguagccggcuguauggaccuagcagcguuucauuugcagaugauuucgugcgaucaagcaagcagcauuauaauugugagcacuccaagauuaacuucuag

SEQ ID NO: 342758 - RNA, 504 nt, Artificial Sequence
  derived and/or modified sequence
augagaucccuucuccuacucuccgccuucugucugcuggaagcugcacuugccgccgaagucaaaaagccugcugccgcagcugcgccagggaccgccgaaaaacugagucccaaagccgcgacccuggcagaacggucggccggccuugccuuuucucucuaccaagcaauggcaaaggaucaagcugucgagaauauucuggugagcccagucgucgucgcuucaucccugggccuggugucucugggagguaaggcuacaaccgcgucucaggcaaaagcaguccuaucagcugagcagcugagagaugaggaaguccaugccggacugggggaacucuugagaucauugucuaacucuaccgcccgaaaugugaccuggaaacugggcagcagacuuuauggacccagcucagugucuuucgccgaugacuuugucaggucuuccaaacagcauuauaauugcgaacauaguaagaucaacuuuagagacaagcgauag

SEQ ID NO: 342759 - RNA, 975 nt, Artificial Sequence
  derived and/or modified sequence
augagaucucugcuacugcucucugccuuuugccugcucgaagccgcccuggccgcugaagugaaaaaacccgcggccgcugcagcaccgggcaccgccgagaagcuuucacccaaggcagcaacucucgccgaacgcagcgcuggccuugccuuuucucuguaccaagccauggccaaagaccaggcugucgagaacauucucgugucuccaguugucguggcauccucacugggucucgugagucucggcggcaaagcuacuacagcuagccaagccaaagccguacucucugcugaacagcugcgagaugaagagguccacgccgggcugggggaacuccuuagaucccucuccaauucuacggcccguaauguuacauggaaauuaggaucgcgucuguauggaccgucuagcguguccuuugccgaugacuucguacgcucaucuaaacagcacuauaacugugagcauaguaaaaucaauuuuagggauaaaagaucugcauugcaaagcauuaaugaaugggccgcccaaacuaccgacggcaagcuccccgaagugaccaaagacguugagaggacugacggagccuugcuggugaaugcaauguuuuuuaaaccucauugggacgagaaauuucaccacaaaaugguugacaaccggggauucaugguaacacgcucauacacagugggggucaugaugaugcauagaaccggauuauacaacuacuacgaugacgagaaggagaaguugcaaauaguugaaaugccauuagcacauaaacuaucaucucuaaucauucugaugccucaccacguggagcccuuagagcgucucgagaaacuuuugaccaaggagcagcuuaagauuuggaugggcaaaaugcagaaaaaggccguggcgaucucguugcccaaaggagugguggagguuacccaugaucugcaagugagaggcggaccagcguag

SEQ ID NO: 342760 - RNA, 888 nt, Artificial Sequence
  derived and/or modified sequence
augcgcucucugcuucuauugucagccuucugccuccuugaagccgccuuggcugccgaagucaaaaagccugcugcagcggccgcccccgggacugccgagaaacuaucuccaaaggccgcuacucuggccgaacggucagcugggcuggcauuuucacucuaucaagcaauggcuaaagaccaggccguagagaacauucugguguccccuguggugguggcaucgucacugggccuaguuagucuggguggcaaagcuacgacagcaucccaggcuaaagccguguuaucggccgaacagcuucgcgacgaggaagugcacgccggacugggagagcuccuucgcuccuuauccaacucuaccgcuagaaauguaacauggaagcugggcucucggcuguacgguccauccagugugucuuucgccgacgacuuugugagauccuccaaacagcacuacaauugcgaacacuccaaaaucaauuuccgcgauaagagaucugcccuucaaucaauuaacgagugggccgcccagaccaccgacggaaaacugccugaagugacgaaggauguugagaggaccgauggcgcccuucucguuaaugcaauguucuuuaagccucauugggacgaaaaguuucaucacaaaauggucgauaaucggggguuuauggucacgcgaucuuacaccgucggugugaugaugaugcaccgcaccgggcuguacaacuauuacgacgacgaaaaagaaaagcugcaaauuguggagaugccauuggcacacaagcuguccucccuuaucauucuaaugccacaucauguagagccgcuugagagacuggagaaauugcuaacuaaggaacaguugaaaauauggaugggguag

SEQ ID NO: 342761 - RNA, 453 nt, Artificial Sequence
  derived and/or modified sequence
augaggagucugcuccuauuguccgcuuuuugccugcucgaggcggcccuggcagcugaagucaaaaagcccgccgcagccgccgccccuggcacagccgagaagcuguccccuaaggcugccacucuggcagagcguagcgccggucuggcauucaguuuauaucaagcaauggccaaagaccaggccgucgaaaacauccucguaagucccguugugguggccucuuccuuaggacuggucucccucggugguaaagcaacaaccgcuucacaggcuaaagcaguccuuagcgccgagcaauuacgagaugaagagguacaugccggucuuggagaguuacugagaaguuuaucuaauucaaccgcuagaaacgucaccuggaagcuggggucccgucuuuacgguccgucaagcguaucauuugccgacgacuucgugaggucgagcuag

SEQ ID NO: 342762 - RNA, 1257 nt, Artificial Sequence
  derived and/or modified sequence
augagaucacucuugcugcuuagugcauuuuguuugcuggaggcugcuuuggccgccgaaguuaaaaaaccagccgcagccgcugcuccuggcacagcagaaaagcuuucuccuaaagcggcaacccuggccgagagaucagccggucucgccuucucccuguaccaagccauggcaaaggaucaggcuguggaaaacauucuuguaucuccagucguuguugcauccucccugggacugguuucucuuggcgggaaggcaacuacagccucucaagcuaaagcugugcucagugccgaacagcugagagacgaagaggugcaugcggggcucggugaacucuuacggucgcuuucaaacuccacagcucggaaugucacuuggaaacugggcucucgguuguaugguccaucuuccguauccuucgcugaugauuucgugaggucaucaaagcagcacuauaauugcgaacauuccaagaucaacuuccgcgauaagagauccgcacugcaaucaauuaaugagugggccgcccagaccaccgauggcaagcugcccgaaguaaccaaagacguggaacgaaccgauggagcccucuuagugaaugcuauguuuuuuaagccacacugggacgagaaauuucaccauaagaugguggauaacaggggauuuauggugacccgcuccuauacugugggcguaaugaugaugcaccggaccggacuauacaauuacuaugacgaugaaaaggaaaaguuacagaucguugagaugccgcucgcacauaaauuaagcucccuuauuaucuugaugccccaucacguggagccccuugaaagauuggaaaaacuucugacaaaagaacagcugaagauauggauggguaaaaugcaaaagaaagcuguggcuaucagucuccccaaaggggugguugaagugacucaugauuuacagaagcaccuggcuggauugggacugacagaagcuauagauaaaaacaaggcggaucuuagccgaaugucaggcaagaaggaucucuauuuagcaucaguguuccacgcgaccgcauuugagcucgacacagacgggaacccauuugaccaggauauauacggccgagaagaauuaagaucacccaagcuguuuuaugccgaccacccauuuauauuucucguucgcgacacccagaguggcucucugcuguucauagguagauugguuagacccaagggagauaagaugcgggacgaguuauag

SEQ ID NO: 342763 - protein, 421 aa, Artificial Sequence
  derived and/or modified sequence
MAVDVAEYHLSVIKSPPGWEVGVYAAGALALLGIAAVSLWKLWTSGSFPSPSPFPNYDYRYLQQKYGESCAEAREKRVPAWNAQRASTRGPPSRKGSLSIEDTFESISELGPLELMGRELDLAPYGTLRKSQSADSLNSISSVSNTFGQDFTLGQVEVSMEYDTASHTLNVAVMQGKDLLEREEASFESCFMRVSLLPDEQIVGISRIQRNAYSIFFDEKFSIPLDPTALEEKSLRFSVFGIDEDERNVSTGVVELKLSVLDLPLQPFSGWLYLQDQNKAADAVGEILLSLSYLPTAERLTVVVVKAKNLIWTNDKTTADPFVKVYLLQDGRKMSKKKTAVKRDDPNPVFNEAMIFSVPAIVLQDLSLRVTVAESSSDGRGDNVGHVIIGPSASGMGTTHWNQMLATLRRPVSMWHAVRRN

SEQ ID NO: 342764 - DNA, 4534 bp, Artificial Sequence
  derived and/or modified sequence
gaagttctagaaaatgttaattgggggagctgtggctggcagagaaggaaaaaggaagctgaagggcacttgggctcataatggtctctccaaccctgatcctgtcctttatggacatttggcagcgctgctgccttgaggtgccttgcaatgctttatctttttgttaaagccacctctgttgcttcagccagcttgagcggttttctgttacttgctagtggttgggaaggcttagccgacgaagggaaaatgagtcaggtcctgaaggatgagcaagttacgggagtgggccgcatggtgagggagtggacttcctgatggggttaagggcgcctgaacacctgggaggcaagttgaggccaagacctggggtgatggagaggcagggtaggctacccagtgagtaggaggccgaaggaaccacagcagggctccagatctcctggcccagaggggctggtacgggaagcccagaagacactcatccctaaggggagcctgagactgaggaactctcatgccctgcgtcgggctcgtgggcgaagggccttcccagggactgcaccatggcctgtccccagccttacccaggggcctccctctcaggttctgaaggacccaggggtcacagctgtgtggggtgctccactgaacacttccttcaaactccttcaggctggagtgcagtggcgcgatctcagctccatgggagagagtttgaaaggatgaagagtttacatcctctggaaagaagcaaatagaaggcattccaggcaaaaggaactgcatcgagtaaaagcatggaggcaagaaagggcttggtgtgtttgagaaacagtgagtagggcatggtggtggcagaagcttaaagtgtatggcccgtggacagtgacagccggacaagaagctgaagtgacagaacaagttgaaccaaaggaattccagacctgggaaagtggagaaagaattttggggtcagagccgtttaagactttgcctagggcctgggtcttctttctcctaaaggcctcaacccacagcacgccacacaaatatgtcacataacacacaaacaaacatcatatttcacagtccaggaaatgaaatgaagacaaaagcgccccctgtgggtgaagtcacagtcactgcagcagacatcatggctgtggatgtggcagaataccatctgagcgtcatcaagagcccccctggctgggaggtgggtgtctatgctgcaggggccctggccctgctgggaatcgcagctgtgagcctgtggaagctctggacgtcggggagcttccccagcccctctccgttccccaattacgactacaggtaccttcagcagaagtacggcgagagctgcgcagaggccagggagaagagagtgcctgcctggaatgcccagcgggccagcacgcggggaccacccagccgcaaaggcagtctcagcattgaggacacctttgagagcatcagtgaactggggcctctggagctgatgggccgggagttggacctggccccctatgggaccctccggaagtcccagtcggccgactccctgaactccatctcctccgtgagcaacacctttgggcaggacttcacactgggccaggtggaggtgagcatggagtacgacactgcctcccacacgctgaacgtggcggtgatgcagggcaaggacctcctggagcgggaggaggccagcttcgagtcctgcttcatgcgcgtcagcctgctgccggacgagcagatcgtgggcatttctcggatccagagaaatgcctactccatcttctttgatgagaagttctccatccccctggatcccacagccctggaggagaagagcctgcggttttctgtatttggcatcgatgaggatgagcgcaacgtcagcacgggggtggtggagctgaagctttctgtgcttgacctcccgctgcagcccttcagtggctggctctatttacaggaccagaacaaggccgccgatgctgtgggggagatcctgctctccctcagctacctccccacagccgagcgcctcaccgtggtcgtggttaaggccaagaacctcatctggaccaacgacaagaccacagcggaccccttcgtcaaggtgtacctgctgcaggatgggaggaagatgagcaaaaagaagacagccgtgaagagggatgaccccaacccggtgttcaacgaagccatgatcttctcggtgccagccattgtgctccaggacctgtctctccgcgtgacggtggctgagagcagcagcgacggccgtggggacaacgtgggccatgtcatcattgggccgtcagccagtggcatgggaaccacacattggaaccagatgttggccacgctgcgcaggcccgtgtccatgtggcacgctgtccggcgaaactagcaaccagggcgggccagttgggcaatggagctgctggagcccggtacccactcagctctgtctgatgccctctccatagcccagctggagccgtgaacactggggtcccctggcagagtcctcatgacccatcctggtctctctgtccagattgcagcagaggagtgggcgtggctctgtgtccagggccccagggtctgctcctgctgaggaccagctgtggctgggccaggacagaggactcaaccctgctcctcccggtaggccagctgccgagctgggctatgttctggaacccagtgaatcttgggggccaggcactgtgctaggcaccagcaggggtaacacgaagaagacccggcccttagggcatcaggaagactagctcccctgccccggaggatctgctcagtgctgatggcagcccagctgtgtggactcagggggctctgagggctagggaaacaggaagggcctctttgacaaggtaggagctgtgcttggaggggcaggaaaagaactgagcatgtcgcaggcagcgggcccagcctgagcaatggcaggatgtgaacttccccatcgcaaatgcagttctcagcccactgcagtggatacaaggaagggcctttctcggggccggagaagagaccaagagaccaggcccgggcagcagcctaccggccacgtggaacactggctccggagttattctctgtcaaatctactccccggacctcaaccatggcaagaaccagaggtccaaagaggcccagacccaggtccttgtgctcagtcctgcgcaaaccaggcccagaccctgcaagcatttgttgatgcccttgcaggcccactgggagaaagatgcctcaggcaggtctcagcctgggggtggcaggggtggggcagagagaatactgacagcagaggtcttggtgggctgcacgtgcctgcgaagatgtggtggacaaggaggctctcgggctgggccttggaggggtggcagcggaaggacagcccaggtggctgaggcctgatgggaagccggggaaggccagggtggaagggcggcttgagggacgccaggagaagactgaatgccaggctaggaaggaggcggctctcgatcacggggtgggtgcccccgacaccgggtctcctagcttgagttccctagaagcgaaatctgagagggggattctggggcaagtagtttcttgcgggtgagtgttctcagagaaacttaccagatcaagaaagggagctcaggctggatggaggaagccacgcaagtgtggcttcaagatccatcgccttggcctgatcgctgtgggggcaggggcctggagtacgaggggcaccctgggggctcccacccagaagcagaggggctgggctgttgcacctctactggcatcagtctttggttaccccccagccccagtaggaggagagcaggcagagcttgtcatccccagcctggtgtcccgcagtcccaggaagccgcttcttgccttcatggctgagtgctgggaagggctgagctcacccaggccagcaggtggggtatcatctgctcggtggggccacccacaggtgacagcatggaccctcaggctggctgcccctgttccttggtccataactggtgagctatggagacccaggccaacaaattatccccagtgatatggggggaggaggggctagaacaagggcccaggggactggaggcaggatggtggctttccctacctgacacagccatggcccagccccaaggccaggctgtctaccctatggccacagcaggaggtcagcccagggccaggagacacatggctggacaaggctttgcagcctgggagaccccgactttctctaacccagtggctgtgcggtgcaggccactgactccccccctgccctctcccctctctccctccccctaactgcatgacatgttaactgtgtgcccaggacagccgtggtggggaccgggtatgccaactggaatgattctagaaccaaaataaagttggggcaggaagagggggcttccagggagccctgctcggccctgaatcaccttcgtctcttctctaggaa

SEQ ID NO: 342765 - DNA, 1382 bp, Artificial Sequence
  derived and/or modified sequence
aggcatctccttcttgatgtcaaagtccccaggaggcatcgttaactatcgtaacgttacctgccgagcatgagatgggaggaagtgtcatagtccagtggacggttttttccaggctactgtgaaacctgatgtgttatgccggccctgaaacagacagcttcccaagtgactcagaccttaagggatctgcaaagacttggagaacttcaatctgaattggcaggagtagctgatttctctgccacctatcttcgctgtcaactacttctcatcaaggccttgcaggaaaagttgtggaatgtagctgcccctttgtatttgaagcagagtgatttggcctcagcagcagcgaaacagattatggaagagacctacaaaatggaattcatgtacagtggtgtggagaataagcaggtggtgattatacatcacatgaggctgcaggccaaagctttgcaacttatagtaacagcacgaactacacgaggacttgaccccttatttgggatgtgtgaaaaatttttacaggaagtagacttttttcagaggtatttcatcgctgatttgccccacttgcaggacagctttgtggacaaactccttgaccttatgccccgactcatgacatccaaacctgcagaagtggtcaaaattctacagaccatgctgcgacagagtgcctttctgcatctcccgcttccagagcagatccacaaagcctcagccaccatcatcgagccagcgggcgagtcagacaaccctttgcggtttacctctgggttggtggttgccctggatgttgatgcaaccctggagcatgtgcaggatcctcagaacactgttaaggtccaggtcttatatccagatggccaggctcagatgattcaccccaagcctgcagacttccggaatcctggcccagggcggcaccggctcatcactcaggtttatctctcccacaccgcttggacagaggcatgccaggtggaagtgaggctgctgctggcctacaactccagtgctcgcattccaaaatgcccctggatggagggtggtgagatgtcaccacaggtggaaaccagcatcgagggcaccattcccttcagcaagcctgtaaaagtttatataatgcccaaacctgcacggcgctaaggcaaaaacagtcttcccaaccgtggcctagagggcccttcttaggtgtcagaatgagccaagcctgaagcacttcacctggaattgatgtgtaggcttaaggagtatgtgacccttacagtctcatctggtatcaaacacaggataaattgtttcttcattaaaaaataaaaaaccttcaagtctacttacccttctcctgtccacaataaagttgagaaaacacc

SEQ ID NO: 342766 - DNA, 1017 bp, Artificial Sequence
  derived and/or modified sequence
atgcccgccctcaaacagaccgccagccaggtgacacagacgttgcgggatctgcaaagactgggcgaactgcaatccgagttggccggggtggctgacttctctgctacttatctcaggtgtcagcttttactgattaaggccctgcaggaaaaactatggaacgttgctgcgccgctatatctcaagcagagtgacttagcctcagccgccgctaagcaaattatggaggagacatacaaaatggagttcatgtactcaggtgttgagaacaaacaggtcgtcattatccaccacatgagactgcaggctaaggcactccaattgatcgtgactgcgcgtacaacacgaggcctcgatcctttatttgggatgtgcgagaaatttctacaggaagttgatttctttcagcgatacttcatcgcagatctgcctcacctgcaggactcatttgtagacaagctgctcgatctcatgccgaggttgatgacatccaagcccgcggaagtggtgaagatcctgcagacgatgttgcgacagtctgcatttctgcacctgccattacctgaacagattcataaggcttccgcaactattatcgagccagctggtgagagcgacaacccactgcggttcacctctggcttggtggtcgctctggatgtggatgccacgctggaacatgtccaggatcctcagaatactgtaaaggtgcaggtcctttaccctgatggacaagcccagatgatccaccctaagcccgccgacttcaggaaccccggtcccgggagacaccgcctgatcactcaggtgtacctgtctcacactgcctggaccgaagcttgccaggtcgaagtacggctactgttggcgtacaatagttccgctagaattccaaaatgcccctggatggaaggcggcgagatgagcccacaggtagaaacttctatcgagggtacaattccatttagtaagcccgtaaaagtttatatcatgcccaaaccagcaagacgatag

SEQ ID NO: 342767 - DNA, 1017 bp, Artificial Sequence
  derived and/or modified sequence
atgcctgccctgaagcagacagccagccaggtgacccagaccctgcgggacctgcagaggctgggggagctgcagagcgagctggccggcgtggccgacttcagcgccacctacctgcgctgccagctgctgctgatcaaggccctgcaggagaagctgtggaatgtggccgcccccctgtacctgaagcagagcgacctggccagcgctgctgccaagcagatcatggaggagacctacaagatggagttcatgtacagcggcgtggagaacaagcaggtggtgatcatccaccacatgaggctgcaggccaaggccctgcagctgattgtgacagcccggaccacccggggcctggaccccctgtttggcatgtgtgagaagttcctgcaggaggtggacttcttccagcgctacttcatcgctgacctgccccacctgcaggacagctttgtggacaagctgctggacctgatgccccggctgatgaccagcaagccagctgaggtggtgaagatcctgcagaccatgctgcggcagagcgccttcctgcacctgcccctgcctgagcagatccacaaggccagcgccaccatcatcgagcctgctggggagagtgacaaccccctgcgcttcaccagcggcctggtggtggccctggatgtggatgccaccctggagcacgtgcaggacccccagaacacagtgaaggtgcaggtgctgtacccagatggccaggcccagatgatccaccccaagccagctgacttcaggaaccctggccctggccgccacaggctcatcacccaggtgtacctgagccacacagcctggacagaggcctgccaggtggaggtgcggctgctgctggcctacaacagcagcgcccgcatccccaagtgcccctggatggagggcggggagatgagcccccaggtggagaccagcattgagggcaccatccccttcagcaagcctgtgaaggtgtacatcatgcccaagccagcccggaggtag

SEQ ID NO: 342768 - DNA, 1017 bp, Artificial Sequence
  derived and/or modified sequence
atgcccgccctgaagcagaccgccagccaggtgacccagaccctgcgcgatctacaacgacttggcgagttacagtctgagctggccggcgttgcagactttagtgccacctacttaaggtgccagttgctgcttatcaaggcgctccaggagaagctctggaatgtagcagcccctttgtatttaaaacagagcgacttggcatccgccgccgccaaacagatcatggaagagacgtataagatggaatttatgtactctggagtggagaacaaacaagtcgtgattattcaccacatgcggctccaagctaaagccctccaactgattgttacagctaggaccacgcgcggcttagaccctctgttcgggatgtgtgagaagttcctgcaagaagtggatttctttcagcgatatttcatcgcagacttaccccatctacaggacagttttgtggacaagctgctggatctcatgcccaggctgatgacctcgaaacctgcagaggtggtgaaaatcctgcaaactatgctgcgtcagtccgctttcctgcatctgcctctcccagaacagatccacaaagcatcggctaccatcattgagccagccggcgagtccgacaacccacttcgtttcacatccggcctggtggtggctttagacgtggatgcaaccctggagcacgttcaggatccccagaataccgttaaggttcaggtactgtacccggacggccaggcccagatgattcaccctaagccggccgacttccggaaccctggcccggggcgacatcgcttaatcacccaggtgtaccttagtcatactgcctggactgaagcctgtcaggtggaggtccgcctgctgctggcgtacaatagctcagcaagaatacctaaatgtccgtggatggaaggaggcgagatgtcgccacaagtcgaaacctcgatagagggcaccataccctttagcaaaccagtgaaagtatatataatgcctaagcctgcccgacgctag

SEQ ID NO: 342769 - DNA, 1017 bp, Artificial Sequence
  derived and/or modified sequence
atgcctgcactcaagcagacggcatctcaggtcacgcagacccttcgtgatctgcagcggctgggggagctgcagtctgagctcgcaggtgtggcggatttctcagcgacgtacctacggtgccaattgctgctgataaaagccttgcaggagaagctgtggaacgtggccgcacccttatacttgaagcagagcgacctggcatccgccgctgccaaacagattatggaggagacctacaagatggagttcatgtactctggcgtggaaaataaacaggtcgtaataatccaccacatgagactgcaagctaaagcacttcaactgattgtgaccgctagaactacccgtggcctagacccattattcgggatgtgcgagaaattcttgcaggaagtcgacttcttccagcgctatttcatcgcggatctgccgcatctgcaagactccttcgtcgataaactactggatctcatgcccagactgatgacaagtaaacctgcagaggtggtaaagatactgcagaccatgttacggcaatccgcttttttgcacctgcccctgccggagcagatccacaaggccagcgctacaattattgaacctgcgggagagtcagataatcccctgagatttacctctggcttggtggtggccttggatgtcgacgctactctggagcatgtgcaagatccccagaacaccgttaaagtacaggtgctttacccggacggccaggctcagatgattcaccctaaacccgctgacttcaggaacccagggcctgggcgacaccgattgattacacaagtatatctgtcgcacaccgcttggaccgaagcttgtcaggtcgaggttaggttgctcctcgcatacaatagcagcgctcgcatacccaagtgtccatggatggagggaggcgagatgagtcctcaggtcgaaacttctatcgagggcactatcccgtttagcaagccagtcaaagtttacataatgccaaaaccagcgcgtcggtag

SEQ ID NO: 342770 - DNA, 1017 bp, Artificial Sequence
  derived and/or modified sequence
atgcccgccctgaagcagaccgccagccaggtgacccagaccctgagagacctgcagagactgggcgagctgcagagcgagctggccggcgtggccgacttcagcgccacctacctgagatgccagctgctgctgatcaaggccctgcaggagaagctgtggaacgtggccgcccccctgtacctgaagcagagcgacctggccagcgccgccgccaagcagatcatggaggagacctacaagatggagttcatgtacagcggcgtggagaacaagcaggtggtgatcatccaccacatgagactgcaggccaaggccctgcagctgatcgtgaccgccagaaccaccagaggcctggaccccctgttcggcatgtgcgagaagttcctgcaggaggtggacttcttccagagatacttcatcgccgacctgccccacctgcaggacagcttcgtggacaagctgctggacctgatgcccagactgatgaccagcaagcccgccgaggtggtgaagatcctgcagaccatgctgagacagagcgccttcctgcacctgcccctgcccgagcagatccacaaggccagcgccaccatcatcgagcccgccggcgagagcgacaaccccctgagattcaccagcggcctggtggtggccctggacgtggacgccaccctggagcacgtgcaggacccccagaacaccgtgaaggtgcaggtgctgtaccccgacggccaggcccagatgatccaccccaagcccgccgacttcagaaaccccggccccggcagacacagactgatcacccaggtgtacctgagccacaccgcctggaccgaggcctgccaggtggaggtgagactgctgctggcctacaacagcagcgccagaatccccaagtgcccctggatggagggcggcgagatgagcccccaggtggagaccagcatcgagggcaccatccccttcagcaagcccgtgaaggtgtacatcatgcccaagcccgccagaagatag

SEQ ID NO: 342771 - DNA, 867 bp, Artificial Sequence
  derived and/or modified sequence
ctctaaagtgttgcataaggcaaagataacgttaagtctgtggaggcttccgttatcgggaaaagatgctgtagtgatcttttctgagtgtctcctacttgcgacaaggtggacttgggaggaaagccgtctgccaaagcctgaagcctccaagttctgtagttcaggaaccttgtctgttgtagcagggataaaacccacaagaacatggatacagaacagttttggaatgaacattgccagtgctacaattgcactagtggggactgcttttctctcactaaatatagcagttaatatccagtcattaaggagttgtcactcttcatcagagtcaccggacctatgcaattacatgggctccatatcaaatggcatggtgtctctactgctgattctcaccttgctggaattatgcgtaaccatctctaccatagccatgtggtgcaatgcaaactgctgtaattcaagagaggaaatttcctcacctcccaattctgtgtaatcaagaatacctccttaattctgagagcatgaatatttgaccttaaatctccagtgactcagagcttcacccacaaactcaggagaacataagcctgctcgtaaagctcaatccttctatcatggcaccaatcacaagaaccttggacgtttgactgactctatcctttctctcctaactataaatcctatttgtgtgtcgtgggtatggaaggacagatatatttctttaggcattcttggatatctgtaacttctatgatcattactccaaagttgtttccagaaattggttctatttcttcttatccacctactccattgctttatgaggtttaaggaaggaaggcggtataatcccta

SEQ ID NO: 342772 - protein, 419 aa, Artificial Sequence
  derived and/or modified sequence
MAQSIFMAGILIGGLVLGDLSDRFGRRPILTCSYLLLAASGSGAAFSPTFPIYMVFRFLCGFGISGITLSTVILNVEWVPTRMRAIMSTALGYCYTFGQFILPGLAYAIPQWRWLQLTVSIPFFVFFLSSWWTPESIRWLVLSGKSSKALKILRRVAVFNGKKEEGERLSLEELKLNLQKEISLAKAKYTASDLFRIPMLRRMTFCLSLAWFATGFAYYSLAMGVEEFGVNLYILQIIFGGVDVPAKFITILSLSYLGRHTTQAAALLLAGGAILALTFVPLDLQTVRTVLAVFGKGCLSSSFSCLFLYTSELYPTVIRQTGMGVSNLWTRVGSMVSPLVKITGEVQPFIPNIIYGITALLGGSAALFLPETLNQPLPETIEDLENWSLRAKKPKQEPEVEKASQRIPLQPHGPGLGSS

SEQ ID NO: 342773 - DNA, 1260 bp, Artificial Sequence
  derived and/or modified sequence
atggcccagtctatcttcatggctggtatactgatcggcggattggttctaggagacttgagcgatcgattcggacggagacccatccttacttgcagctacctattactggctgcatcaggttcaggtgcggcattctcaccaaccttccctatctacatggttttcaggttcctctgtggctttggaatttctgggattacactctccaccgtgattctgaatgtcgagtgggtcccgacacgtatgcgggctatcatgtctactgcactgggctattgttacacattcgggcagttcattttgcccgggctcgcctatgctattccccagtggagatggctgcagcttaccgtgagtatcccatttttcgtttttttcctctccagttggtggacacccgagtcaattcgatggctggtactctccggcaagagctctaaggcactcaagatccttcgacgggtcgcagttttcaatggaaagaaggaagagggcgagagactctcactcgaggagctgaaattgaatcttcaaaaggagatcagcctggccaaggctaagtataccgcaagtgacctgtttaggatacctatgctgcgaagaatgaccttttgcctgagcctggcctggtttgcaacaggtttcgcctattactctctggccatgggcgtggaagagtttggcgttaatctgtatatactccagattatcttcggaggtgtagacgtccccgctaagttcatcactatcctgtccctgtcatatctgggccgccataccacccaggcagcggcactactcctcgccgggggagcgatacttgctctgacttttgtccctctggacctacaaacagtcaggacggtgcttgctgtcttcgggaagggatgcttgagttcttcctttagttgcctgttcctttacacctctgagttgtaccctacagtgattagacagaccggaatgggggtttcaaatttgtggactagggtcggcagtatggtaagtccactggtaaagatcaccggcgaggtacaacccttcatcccaaatattatttacgggattacagcgctactgggaggaagcgcagctcttttcctccctgaaacgctaaatcagcccctgcctgagactatcgaggacctcgaaaactggtcactccgggcaaagaagcctaagcaggagcccgaggtcgagaaagcctcacaacgcatccccttacaaccacatggccccgggttaggttcttcatag

SEQ ID NO: 342774 - DNA, 1260 bp, Artificial Sequence
  derived and/or modified sequence
atggcccagagcatcttcatggccggcatcctgattggaggcctggtgctgggggacctgagtgaccgcttcggccggcggcccatcctgacctgcagctacctgctgctggccgccagcggcagcggggccgccttcagccccaccttccccatctacatggtgttccgcttcctgtgtggcttcggcatcagcggcatcaccctgagcaccgtcatcctgaatgtggagtgggtgcccaccaggatgagggccatcatgagcacagccctgggctactgctacaccttcggccagttcatcctgcccggcctggcctatgccatcccccagtggcgctggctgcagctgactgtgtccatccccttctttgtgttcttcctgagctcctggtggaccccagagagcatccgctggctggtgctgagcggcaagagcagcaaggccctgaagatcctgcggcgggtggccgtgttcaacgggaagaaggaggagggggagcggctgagcctggaggagctgaagctgaacctgcagaaggagatcagcctggccaaggccaagtacacagccagtgacctcttccgcatccccatgctgcggaggatgaccttctgcctgagcctggcctggtttgccaccggctttgcctactacagcctggccatgggcgtggaggagtttggagtgaacctgtacatcctgcagatcatctttggaggagtggatgtgcctgccaagttcatcaccatcctgagcctgagctacctgggccgccacaccacccaggccgccgccctgctgctggccggcggggccatcctggccctgacctttgtgcccctggacctgcagacagtgaggacagtgctggccgtgtttgggaagggctgcctgagcagcagcttcagctgcctcttcctgtacaccagcgagctgtaccccaccgtcatccggcagacaggcatgggcgtgagcaacctgtggaccagggtgggctccatggtgagccccctggtgaagatcactggagaggtgcagcccttcatccccaacatcatctacggcatcacagccctgctgggcggcagcgctgccctcttcctgcctgagaccctgaaccagcccctgcctgagaccatcgaggacctggagaactggagcctgcgggccaagaagcccaagcaggagcctgaggtggagaaggccagccagaggatccccctgcagccccacggccctggcctgggcagcagctag

SEQ ID NO: 342775 - DNA, 1260 bp, Artificial Sequence
  derived and/or modified sequence
atggcccagagcatcttcatggccggcatcctgatcggcggcctggtactgggagatctgtccgatagattcggcaggagacccatcctgacatgtagctacctgttgctggccgcatcaggcagcggtgccgccttcagcccgacctttcccatttatatggtcttcagattcctgtgtggctttggaatctctgggatcactcttagcactgtgattctgaacgtggaatgggtccctacccggatgcgtgccattatgtcaactgcattaggttactgctacacctttggtcagtttatactcccggggctggcctacgcaatcccgcagtggaggtggctccagctcacagttagcatccccttctttgtgttctttctcagctcctggtggacaccagagagtatcaggtggctggttctgagtgggaagagttcaaaagccctaaaaatcctgagacgggtcgcagtatttaacggcaaaaaagaggagggtgagcgactttctctggaagaactgaaattgaatttgcagaaagagatttctctcgccaaggcaaagtatactgcatcggatttatttcgtattcctatgctccgccgaatgacgttttgtctcagtttagcttggtttgcaactggattcgcctattatagcctggccatgggcgttgaggaatttggcgttaacttgtacatactccagattatcttcgggggggtcgacgtgcctgcaaaattcatcacgattcttagcctgtcatacctggggcgtcatacaacacaggctgctgctcttttactggcagggggggcaatcttggccttgactttcgtaccattggatctacaaacagtgagaaccgtgcttgccgtatttgggaaaggctgcctgtcatcctccttcagctgcctattcctttacacttccgagctttaccccactgtcattcgccaaaccgggatgggagtttctaacttatggaccagggtgggtagcatggtgtctcccctggtgaaaattaccggcgaggtacagccttttatccctaatatcatctacggtatcacagccctgctcggtggctcggccgccttattcctgccagagaccctaaaccagccactgcccgaaaccattgaggacctcgaaaactggagtctgagggccaagaagcctaagcaggagccagaggtcgaaaaggccagccagagaatcccactgcagcctcacggacctgggttgggaagctcgtag

SEQ ID NO: 342776 - DNA, 1260 bp, Artificial Sequence
  derived and/or modified sequence
atggcccagtctatctttatggccggtatactgatcggcggtctggtgttgggcgacctaagtgaccgattcggacggaggccaatactgacttgttcatacctcttactagccgcttccgggtcaggcgctgcgttctcccctacattcccgatatacatggtctttaggtttctttgcggcttcggcatctctgggattaccctttccaccgtcattctaaatgtagagtgggtacctacgcgtatgcgggctattatgtctaccgcgctcggatactgctacacttttggtcagttcattctgcccggtctagcttacgcaatccctcaatggcgttggttgcagctcaccgtctccatccccttctttgttttctttctgtcttcctggtggaccccagaaagcattagatggcttgttctgtctggcaaaagcagtaaggctcttaaaatacttcgtcgcgtggccgtcttcaatgggaagaaggaggagggcgagcgcctgtctttggaagagctaaagttgaatctccaaaaggagatctctctggccaaggcaaagtacaccgcctctgacctgtttcggatccctatgctgaggaggatgacattttgtctttcactggcttggttcgccaccggcttcgcatattattcactggctatgggggtggaggagtttggtgtgaacctgtacatactgcaaatcatcttcggcggtgtggatgtgcctgcgaaattcatcacaattctatccttgtcctacctaggccgtcatactacacaggctgctgccctattgcttgcagggggagccattttggctcttactttcgtgcctctggatctccaaacggtgaggacagtcttggccgttttcggtaagggatgtctgtcctcctctttttcctgcctgtttctgtatacatctgagctttaccctacagtcatccgtcagacgggcatgggcgtatccaacctgtggacgcgagtgggtagcatggtctccccattggtgaaaatcactggagaggtacagccttttattccgaacattatttacggaatcacagcccttttgggagggtccgccgcactgttcctgcctgagacccttaaccaacccttaccggagactatcgaggatctcgaaaattggagcttgcgggcaaagaagcctaaacaagagccagaagtggaaaaagccagccaaagaattcccctccagccccacggtcccggactggggtcttcttag

SEQ ID NO: 342777 - DNA, 1260 bp, Artificial Sequence
  derived and/or modified sequence
atggcccagagcatcttcatggccggcatcctgatcggcggcctggtgctgggcgacctgagcgacagattcggcagaagacccatcctgacctgcagctacctgctgctggccgccagcggcagcggcgccgccttcagccccaccttccccatctacatggtgttcagattcctgtgcggcttcggcatcagcggcatcaccctgagcaccgtgatcctgaacgtggagtgggtgcccaccagaatgagagccatcatgagcaccgccctgggctactgctacaccttcggccagttcatcctgcccggcctggcctacgccatcccccagtggagatggctgcagctgaccgtgagcatccccttcttcgtgttcttcctgagcagctggtggacccccgagagcatcagatggctggtgctgagcggcaagagcagcaaggccctgaagatcctgagaagagtggccgtgttcaacggcaagaaggaggagggcgagagactgagcctggaggagctgaagctgaacctgcagaaggagatcagcctggccaaggccaagtacaccgccagcgacctgttcagaatccccatgctgagaagaatgaccttctgcctgagcctggcctggttcgccaccggcttcgcctactacagcctggccatgggcgtggaggagttcggcgtgaacctgtacatcctgcagatcatcttcggcggcgtggacgtgcccgccaagttcatcaccatcctgagcctgagctacctgggcagacacaccacccaggccgccgccctgctgctggccggcggcgccatcctggccctgaccttcgtgcccctggacctgcagaccgtgagaaccgtgctggccgtgttcggcaagggctgcctgagcagcagcttcagctgcctgttcctgtacaccagcgagctgtaccccaccgtgatcagacagaccggcatgggcgtgagcaacctgtggaccagagtgggcagcatggtgagccccctggtgaagatcaccggcgaggtgcagcccttcatccccaacatcatctacggcatcaccgccctgctgggcggcagcgccgccctgttcctgcccgagaccctgaaccagcccctgcccgagaccatcgaggacctggagaactggagcctgagagccaagaagcccaagcaggagcccgaggtggagaaggccagccagagaatccccctgcagccccacggccccggcctgggcagcagctag

SEQ ID NO: 342778 - DNA, 1818 bp, Artificial Sequence
  derived and/or modified sequence
atgagactgcccgaggccagcggccccagcttcgtgagcagccactacatcctggagagccccggcggcgtgagcctggagggcagcgagctgatgttccccgacctggtgcagctgatctgcgcctactgccacaccagagacatcctgctgctgcccctgcagctgcccagagccatccaccacgccgccacccacaaggagctggaggccatcagccacctgggcatcgagttctggagcagcagcctgaacatcaaggcccagagaggccccgccggcggccccgtgctgccccagctgaaggccagaagcccccaggagctggaccagggcaccggcgccgccctgtgcttcttcaaccccctgttccccggcgacctgggccccaccaagagagagaagttcaagagaagcttcaaggtgagagtgagcaccgagaccagcagccccctgagcccccccgccgtgccccccccccccgtgcccgtgctgcccggcgccgtgcccagccagaccgagagactgcccccctgccagctgctgagaagagagagcagcgtgggctacagagtgcccgccggcagcggccccagcctgccccccatgcccagcctgcaggaggtggactgcggcagccccagcagcagcgaggaggagggcgtgcccggcagcagaggcagccccgccaccagcccccacctgggcagaagaagacccctgctgagaagcatgagcgccgccttctgcagcctgctggcccccgagagacaggtgggcagagccgccgccgccctgatgcaggacagacacaccgccgccggccagctggtgcaggacctgctgacccaggtgagagccggccccgagccccaggagctgcagggcatcagacaggccctgagcagagccagagccatgctgagcgccgagctgggccccgagaagctgctgagccccaagagactggagcacgtgctggagaagagcctgcactgcagcgtgctgaagcccctgagacccatcctggccgccagactgagaagaagactggccgccgacggcagcctgggcagactggccgagggcctgagactggccagagcccagggccccggcgccttcggcagccacctgagcctgcccagccccgtggagctggagcaggtgagacagaagctgctgcagctgctgagaacctacagccccagcgcccaggtgaagagactgctgcaggcctgcaagctgctgtacatggccctgagaacccaggagggcgagggcgccggcgccgacgagttcctgcccctgctgagcctggtgctggcccactgcgacctgcccgagctgctgctggaggccgagtacatgagcgagctgctggagcccagcctgctgaccggcgagggcggctactacctgaccagcctgagcgccagcctggccctgctgagcggcctgggccaggcccacaccctgcccctgagccccgtgcaggagctgagaagaagcctgagcctgtgggagcagagaagactgcccgccacccactgcttccagcacctgctgagagtggcctaccaggaccccagcagcggctgcaccagcaagaccctggccgtgccccccgaggccagcatcgccaccctgaaccagctgtgcgccaccaagttcagagtgacccagcccaacaccttcggcctgttcctgcagggcaaccagagacagagagaggccggccagcagagaagcagcctgaagtggcccgagggcagcttcggcgccggcgaccccgagcccgccgagaagagcttctag

SEQ ID NO: 342779 - DNA, 1818 bp, Artificial Sequence
  derived and/or modified sequence
atgcgcctgcccgaagcctcagggcccagttttgtgtcttcccactatattctggaatcacctggcggcgttagcttagaaggaagcgaactcatgtttcccgacctggtgcagctgatttgcgcatattgccatacacgggacatcctgttgttacccttgcagctgccacgggccatccatcatgcagcgacgcacaaagagttagaagccatctcccatctggggattgagttctggagcagcagcctgaacatcaaggcccagcgcggacctgctggagggcccgttctgcctcaactgaaggcccggagtccccaggaacttgaccaggggactggagcagctttatgcttcttcaatccgctattccctggagaccttgggcccacaaagcgagagaaattcaagcggtcgtttaaggttcgcgtgtcaacagagacttctagccctctcagcccccctgcagtcccgccccccccagtgcccgtcctgcctggggctgtaccaagtcagactgaacggctgcccccttgccagctccttaggcgagagagtagcgtaggttaccgcgtaccagctggctccgggccttcgctccctcccatgccatcccttcaggaggtggattgcgggagtccaagctcctctgaggaagagggagtgcccggttcccgggggtcccctgctaccagtccccacctggggaggcggagacccctcctgcgatccatgtctgccgcattttgttcgctgttggcgcccgaaagacaggtaggccgggcggcagcggctcttatgcaggataggcatacggccgccggacagcttgtacaagacttgctcactcaggtgcgggccggtcccgaaccccaagagctgcagggaatccggcaggctctgagtcgcgcgagggcgatgttatctgccgagctcggccctgaaaaactgctaagccctaaacgcttggaacacgttctagagaagtcactgcattgctccgtccttaaaccactgaggccaatccttgctgccaggttgcggcgccgcttggccgccgacggctctttgggtcgattagcggaagggttgcggttggctagagcacagggacccggcgccttcggcagtcacctgtctttgccctcccctgttgagcttgagcaagtccggcagaagctactgcagctgctccgcacatactctcccagcgctcaggtaaagcgcctgctccaggcttgtaagctcttgtacatggccctgcggacccaggaaggcgagggagctggcgcagatgagttcctgcctctgctctccctggttctcgcccactgcgacctgcctgaactattattagaggcagaatatatgtcagagctactggagccgtcccttctcactggagagggtgggtactatctcacctcattatccgctagcctggccctgttgtccggactcggccaggctcacaccttgccactgtctcccgtgcaagagctcaggagaagtctgtctctctgggagcagcgccggctgcctgcaacacattgttttcaacacctgctccgggtcgcctatcaggatccctcctccggctgtacaagcaagacactcgctgtaccacccgaggctagtatcgccacactaaatcaactctgcgctaccaagtttcgcgttactcagcccaatacattcgggctgtttctgcaagggaatcagaggcagcgggaagccggccagcagagatctagcctgaagtggcctgagggcagcttcggagcgggggaccctgaacctgccgaaaagtcgttttag

SEQ ID NO: 342780 - DNA, 1818 bp, Artificial Sequence
  derived and/or modified sequence
atgaggctgcctgaggccagcggccccagctttgtgagcagccactacatcctggagagccctggaggagtgtccctggagggcagcgagctgatgtttcctgacctggtgcagctgatctgtgcctactgccacacccgggacatcctgctgctgcccctgcagctgccccgggccatccaccacgccgccacccacaaggagctggaggccatcagccacctgggcatcgagttctggagcagcagcctgaacatcaaggcccagaggggccctgctgggggccctgtgctgccccagctgaaggcccggagcccccaggagctggaccagggcactggagctgccctgtgcttcttcaaccccctcttccctggggacctgggccccaccaagcgggagaagttcaagaggagcttcaaggtgcgggtgtccacagagaccagcagccccctgagccccccagctgtgcccccacctcctgtgcctgtgctgcccggggctgtgcccagccagacagagcggctgcccccctgccagctgctgcggcgggagagctctgtgggctacagagtgcctgctggcagcggccccagcctgccccccatgcccagcctgcaggaggtggactgtggcagccccagcagcagcgaggaggagggcgtgcccggcagccggggcagccctgccaccagcccccacctgggcagaagaagacccctgctgcgctccatgtctgctgccttctgcagcctgctggcccctgagcggcaggtgggccgggctgctgctgccctgatgcaggacagacacacagctgctggccagctggtgcaggacctgctgacccaggtgcgggccggccctgagccccaggagctgcagggcatccggcaggccctgagccgggcccgggccatgctgtctgctgagctgggccctgagaagctgctgagccccaagaggctggagcacgtgctggagaagagcctgcactgcagcgtgctgaagcccctgcggcccatcctggccgcccggctgcggcggcggctggccgcagatggcagcctgggccgcctggccgagggcctgcggctggcccgggcccagggccctggggccttcggcagccacctgagcctgcccagccctgtggagctggagcaggtgcggcagaagctgctgcagctgctgcggacctacagccccagcgcccaggtgaagaggctgctgcaggcctgcaagctgctgtacatggccctgcggacccaggagggggagggcgctggagcagatgagttcctgcccctgctgagcctggtgctggcccactgtgacctgcctgagctgctgctggaggccgagtacatgtctgagctgctggagcccagcctgctgactggagagggcggctactacctgaccagcctgagcgccagcctggccctgctgagcggcctgggccaggcccacaccctgcccctgagccctgtgcaggagctgcggcgcagcctgagcctgtgggagcagaggcggctgcctgccacccactgcttccagcacctgctgcgggtggcctaccaggaccccagcagcggctgcaccagcaagaccctggccgtgcccccagaggccagcatcgccaccctgaaccagctgtgtgccaccaagttccgggtgacccagcccaacaccttcggcctcttcctgcagggcaaccagaggcagcgggaggccggccagcagaggagcagcctgaagtggccagagggcagctttggagctggggaccctgagcctgctgagaagagcttctag

SEQ ID NO: 342781 - DNA, 1818 bp, Artificial Sequence
  derived and/or modified sequence
atgcggctgcccgaggccagcggccccagcttcgtgagcagccactacattctggagagccctggtggagtctcgctcgagggctctgagctcatgtttcccgacctggtacagctcatctgcgcctactgccacacccgagacattctgctgcttccccttcagcttcctagagctatccatcatgccgcgacccacaaagaactcgaggccatatcgcacctcggtatcgaattctggtctagttcactcaatatcaaggcccagagaggcccagctggcgggccagtgcttccccagctgaaagcgcgcagcccccaggagctggaccagggaaccggagcagccttatgttttttcaaccctctctttcctggcgacctcggccccactaaaagggagaagtttaaaagatcgttcaaagtgcgggtaagcactgagacttcctcaccactgagtccccctgccgtccctccgccacccgtcccggttctgccgggtgcggtgccgtcacagaccgaaaggctccctccctgtcaactgctgcgccgggagagctctgtggggtatcgagtacccgcaggatccggacccagtttaccgcccatgccatctctgcaggaggtggattgtggaagcccatctagctcagaagaagaaggcgtcccggggtcccgaggatcccccgccacaagtccccatcttggccgccgacgcccactattgagatcaatgagtgccgccttctgttccctgctggctcccgaaaggcaggtgggccgggcagccgcagcacttatgcaggatcgacacactgcggctgggcaactggtgcaggacctgctgacccaggttcgagcaggccctgaaccacaggagctccagggtatccgccaagctctgtcccgggcccgtgctatgctatctgccgagctcggacctgagaaactcctgtcgcccaaacgtctggaacacgttctggagaaatccctccattgttctgttctgaagccactccggccgatcctggctgctaggttgcgcaggcgactcgccgccgatggatcactggggcggctcgctgagggcctcagactggcccgcgcccagggacctggcgcctttggctcccatctatccctgccctcccctgtggaacttgagcaggtgcgtcagaagcttctccagctgctccggacctattcacccagcgcgcaggtgaagaggcttctgcaggcgtgtaagctcctttatatggcgttgaggacccaagagggagagggggcaggagctgatgaattcctccccctcttaagcctcgtgctggcacattgcgatctccctgagctacttttggaggcagagtacatgagcgaacttctcgaaccctctctgctgacgggagagggcggctactacctgacatcactctccgcaagtctggcgttgctgtccggcctgggacaggcacatactctgccgctgagtcccgtccaggagctgagacgcagtttgagcctgtgggagcagcgcagactgccagcaactcactgcttccaacacttgttaagggtggcctaccaagacccgagctccggatgtacaagtaagacgctggccgtgccccccgaagcaagcatcgcaacgcttaaccagctttgcgcgacgaagtttcgggtgacacagccaaataccttcggcttattcctgcagggaaatcagaggcaacgcgaagctgggcagcagcgaagttcgctcaagtggcctgagggatcttttggcgctggcgacccagagcccgcagagaaatctttctag

SEQ ID NO: 342782 - DNA, 1818 bp, Artificial Sequence
  derived and/or modified sequence
atgcgtttaccagaggcttctgggccatcattcgtctcgtcgcactatatcctggaaagccccggaggagtttcactggagggttccgaactcatgtttcctgacctggtgcagctcatatgtgcctattgccataccagagatatactgctgctgccccttcaactgcccagggctatccaccacgctgcgactcacaaggaattggaggccatttcacatttaggaattgagttttggtcgtcaagcctgaacatcaaagctcagcggggacccgctggaggccctgtactgccacagctcaaggctcgtagcccccaagagcttgatcagggtacaggagcagctttgtgtttcttcaaccccctgttccccggagatttaggcccaacgaaaagagagaagttcaagcgaagtttcaaagtgagggttagcacagaaacgtcgtcccctctctccccccctgccgtgcctcctccacccgttcccgtgcttcctggcgcagtaccaagtcagacagagcgactacctccctgccagctgctgcggagggagtcctctgtcgggtacagggtgcctgcaggctctggaccctctctgccgccaatgccgagcttacaggaggttgactgtggtagtccttcgagctcagaagaagagggcgtccctggtagccggggttcccctgcgaccagcccacatctgggcagaaggaggcccctgctgcgctctatgtcagctgctttctgttccctgctcgctccagagagacaggttgggagggccgctgctgccttaatgcaggatcggcacacagccgctggccaactggtgcaggatctgttgacccaggtgagggctggccctgaaccccaggagcttcaggggatacgccaggctctgtcccgggctagggccatgctgagcgctgagctgggccctgagaaactgctgagccccaagagactggaacacgtgctggaaaaatccctgcactgtagtgtgctcaagccacttcggccaatcctcgcagctaggctgagacgccgactggccgcagatgggagtttgggtaggctcgcagaaggactcaggttggccagggctcagggtccaggggctttcggctcgcacctgtcacttccaagccctgtggaactggaacaggtgcggcagaaattactgcagttgctgcggacatactcaccctctgcgcaagttaaaaggcttctgcaggcctgcaagctgctgtacatggctctacggacgcaggaaggcgagggagcaggtgcggacgaatttttgcccttattatccctcgtgctggcccactgtgaccttcccgaattattgttagaggctgagtacatgagcgagcttttggagccctccttgctaaccggcgaaggcggatactacctgacatcccttagtgcttccctggcactcctttcagggctggggcaggctcacacactccctctgtcccctgtccaggaacttaggagaagtctgagtttgtgggagcagcggaggcttccggctacccattgttttcagcacctccttagggttgcttaccaggacccctcatcagggtgcacttctaagactctagctgttcctcctgaggcctccattgccacattgaaccaactttgcgcaacaaagttcagggtaacacagcccaacacattcggcttattcctacagggaaaccagcgacagcgcgaggccggtcagcagagaagctcattgaagtggcccgagggaagctttggtgccggtgatccagaacccgcagagaagtcgttctag

SEQ ID NO: 342783 - DNA, 2084 bp, Artificial Sequence
  derived and/or modified sequence
agccatggaaagccctggagagtcaggcgcgggctctcctggagcccccagcccgtccagcttcactactgggcacctggcgagagaaaaacgttcctcgtgcggaaatctaacacccgccagtgccaggccctgtgcatgcggttgcctgaagccagtggcccctccttcgtctccagccactacatcctggagagccctggcggcgtctccttggagggctcggagctcatgttcccagacctagtccagctcatctgtgcctactgccacacccgggacatccttctcctcccgctgcagctccccagagccatccaccacgcagccactcacaaagagctggaggccatctcccatctgggcattgagttctggagctcctccctcaacatcaaggctcagcggggcccggctggaggcccagtgttgccccagctgaaggcccggtcccctcaagagctggaccagggcaccggagccgccttgtgcttcttcaaccccctgttcccgggggacctagggcccaccaagcgggagaaattcaagagaagcttcaaagtgcgcgtgtccacagagacctccagccccctgtctccacctgccgtgccacctccccccgtccccgtgctgccaggggcagtccccagccagacagagcggctgcccccttgccagctgctacggagggagagctcagtggggtaccgcgtgccagcaggcagtggccctagccttccgcctatgccctccctccaagaggtggactgcggctcccccagcagctccgaggaggagggggtgccagggtcccgggggagcccagcgacctcaccccacctgggccgccgacgacctctgcttcggtccatgagcgccgccttctgctccctactggcaccggagcggcaggtgggccgggctgcggcagcactgatgcaggaccgacacacagccgcgggccagctggtgcaggacctactgacccaggtgcgggctgggcccgagccccaggagctgcagggcatccgtcaggcgctgagccgggcccgggccatgctgagtgcggagctgggccctgagaagctgctgtcgcctaagaggctggaacatgtcctggagaagtcattgcattgctctgtgctcaagcctctccggcccatcctggcagcccgcctgcggcgccggcttgccgcagacggctccctgggccgcctagctgagggcctccgcctggcccgggcccagggccccggagccttcgggtcccacctgagcctgccctccccagtagagttggagcaagtgcgccagaagctgctgcagctgctccgcacctactcacccagcgcccaggtcaagcggctcctgcaggcctgcaagctgctctacatggccctgaggacccaggaaggggagggcgcgggtgccgacgagttcctgcctctgctgagcctcgtcttggcccactgtgaccttcctgagctgctgctggaggccgagtacatgtcggagctgctggagcccagcctgcttactggagagggtggctactacctgaccagcctctctgccagcctggccctgctgagtggcctgggtcaggcccacaccctcccactgagccccgtgcaggagctacggcgctccctcagcctctgggagcagcgccgcctgcctgccacccactgcttccagcacctcctccgagtagcctatcaggatcccagcagtggctgcacctccaagaccctggccgtgcccccagaagcctcgattgccaccctgaaccagctctgtgccaccaagttccgagtgacccagcccaacacttttggcctcttcctccaggggaaccagaggcagagggaagccgggcagcagaggagtagcttgaagtggccagaagggtcattcggggcgggagaccctgagcctgctgagaaatccttttagcgccagcaagccccacccagggccctgtcctgtgtctgccaccacctttgtctgatacttgtttccagggaagctgggggaactgccacatctgaggaactggaataaagatgagggggcttcggggg

SEQ ID NO: 342784 - protein, 306 aa, Artificial Sequence
  derived and/or modified sequence
MEEGPLPGGLPSPEDAMVTELLSPEGPFASENIGLKAPVKYEEDEFHVFKEAYLGPADPKEPVLHAFNPALGADCKGQVKAKLAGGDSDGGELLGEYPGIPELSALEDVALLQAPQPPACNVHFLSSLLPAHRSPAVLPLGAWVLEGASHPGVRMIPVEIKEAGGTTTSNNPEEATLQNLLAQESCCKFPSSQELEDASCCSLKKDSNPMVICQLKGGTQMLCIDNSRTRELKALHLVPQYQDQNNYLQSDVPKPMTALVGRFLPASTKLNLITQQLEGALPSVVNGSAFPSGSTLPGPPKITLAG

SEQ ID NO: 342785 - protein, 684 aa, Artificial Sequence
  derived and/or modified sequence
MQKLASQYLKRDWPGVKADDRNDYRSMYPVWKSFLEGTMQVAQSRMNICENYKNFISEPARTVRSLKEQQLKRCVDQLTKIQTELQETVKDLAKGKKKYFETEQMAHAVREKADIEAKSKLSLFQSRISLQKASVKLKARRSECNSKATHARNDYLLTLAAANAHQDRYYQTDLVNIMKALDGNVYDHLKDYLIAFSRTELETCQAVQNTFQFLLENSSKVVRDYNLQLFLQENAVFHKPQPFQFQPCDSDTSRQLESETGTTEEHSLNKEARKWATRVAREHKNIVHQQRVLNDLECHGAAVSEQSRAELEQKIDEARENIRKAEIIKLKAEARLDLLKQIGVSVDTWLKSAMNQVMEELENERWARPPAVTSNGTLHSLNADTEREEGEEFEDNMDVFDDSSSSPSGTLRNYPLTCKVVYSYKASQPDELTIEEHEVLEVIEDGDMEDWVKARNKVGQVGYVPEKYLQFPTSNSLLSMLQSLAALDSRSHTSSNSTEAELVSGSLNGDASVCFVKALYDYEGQTDDELSFPEGAIIRILNKENQDDDGFWEGEFNGRIGVFPSVLVEELSASENGDTPWMREIQISPSPKPHASLPPLPLYDQPPSSPYPSPDKRSSLYFPRSPSANEKSLHAESPGFSQASRHTPETSYGKLRPVRAAPPPPTQNHRRPAEKIEDVEITLV

SEQ ID NO: 342786 - protein, 515 aa, Artificial Sequence
  derived and/or modified sequence
MQKLASQYLKRDWPGVKADDRNDYRSMYPVWKSFLEGTMQVAQSRMNICENYKNFISEPARTVRSLKEQQLKRCVDQLTKIQTELQETVKDLAKGKKKYFETEQMAHAVREKADIEAKSKLSLFQSRISLQKASVKLKARRSECNSKATHARNDYLLTLAAANAHQDRYYQTDLVNIMKALDGNVYDHLKDYLIAFSRTELETCQAVQNTFQFLLENSSKVVRDYNLQLFLQENAVFHKPQPFQFQPCDSDTSRQLESETGTTEEHSLNKEARKWATRVAREHKNIVHQQRVLNDLECHGAAVSEQSRAELEQKIDEARENIRKAEIIKLKAEARLDLLKQIGVSVDTWLKSAMNQVMEELENERWARPPAVTSNGTLHSLNADTEREEGEEFEDNMDVFDDSSSSPSGTLRNYPLTCKVVYSYKASQPDELTIEEHEVLEVIEDGDMEDWVKARNKVGQVGYVPEKYLQFPTSNSLLSMLQSLAALDSRSHTSSNSTEAELVSGSLNGDASGKD

SEQ ID NO: 342787 - DNA, 4803 bp, Artificial Sequence
  derived and/or modified sequence
gcgcccagcctcgccgccgccgagcgcccgacgcgccacgccgcgctgggcagctggagagctggcggcggagcgggccgggagcggcgggggcggcgccgaggccgcgggcggggggaggagggccgcagccccggagaggggaaaaggcgggccggacggcgccagcagccagccccgaggacgcgagcggcaggtgtgcacagaggttctccactttgttttctgaactcgcggtcaggatggttttctctgtcaggcagtgtggccatgttggcagaactgaagaagttttactgacgttcaagatattccttgtcatcatttgtcttcatgtcgttctggtaacatccctggaagaagatactgataattccagtttgtcaccaccacctgatgaggaaactggggcttgttcagatgttactttaagcttactcccttcaaacgaaacagaaaaaactaaaatcactatagtaaaaaccttcaatgcatcaggcgtcaaaccccagagaaatatctgcaatttgtcatctatttgcaatgactcagcattttttagaggtgagatcatgtttcaatatgataaagaaagcactgttccccagaatcaacatataacgaatggcaccttaactggagtcctgtctctaagtgaattaaaacgctcagagctcaacaaaaccctgcaaaccctaagtgagacttactttataatgtgtgctacagcagaggcccaaagcacattaaattgtacattcacaataaaactgaataatacaatgaatgcatgtgctgtaatagctgctttggaaagagtaaagattcgaccaatggaacactgctgctgttctgtcaggataccctgcccttcctccccagaagagttggaaaagcttcagtgtgacctgcaggatcccattgtctgtcttgctgaccatccacgtggcccaccattttcttccagccaatccatcccagtggtgcctcgggccactgtgctttcccaggtccccaaagctacctcttttgctgagcctccagattattcacctgtgacccacaatgttccctctccaataggggagattcaacccctttcaccccagccttcagctcccatagcttccagccctgccattgacatgcccccacagtctgaaacgatctcttcccctatgccccaaacccatgtctccggcaccccacctcctgtgaaagcctcattttcctctcccaccgtgtctgcccctgcgaatgtcaacactaccagcgcacctcctgtccagacagacatcgtcaacaccagcagtatttctgatcttgagaaccaagtgttgcagatggagaaggctctgtccttgggcagcctggagcctaacctcgcaggagaaatgatcaaccaagtcagcagactccttcattccccgcctgacatgctggcccctctggctcaaagattgctgaaagtagtggatgacattggcctacagctgaacttttcaaacacgactataagtctaacctccccttctttggctctggctgtgatcagagtgaatgccagtagtttcaacacaactacctttgtggcccaagaccctgcaaatcttcaggtttctctggaaacccaagctcctgagaacagtattggcacaattactcttccttcatcgctgatgaataatttaccagctcatgacatggagctagcttccagggttcagttcaatttttttgaaacacctgctttgtttcaggatccttccctggagaacctctctctgatcagctacgtcatatcatcgagtgttgcaaacctgaccgtcaggaacttgacaagaaacgtgacagtcacattaaagcacatcaacccgagccaggatgagttaacagtgagatgtgtattttgggacttgggcagaaatggtggcagaggaggctggtcagacaatggctgctctgtcaaagacaggagattgaatgaaaccatctgtacctgtagccatctaacaagcttcggcgttctgctggacctatctaggacatctgtgctgcctgctcaaatgatggctctgacgttcattacatatattggttgtgggctttcatcaatttttctgtcagtgactcttgtaacctacatagcttttgaaaagatccggagggattacccttccaaaatcctcatccagctgtgtgctgctctgcttctgctgaacctggtcttcctcctggactcgtggattgctctgtataagatgcaaggcctctgcatctcagtggctgtatttcttcattattttctcttggtctcattcacatggatgggcctagaagcattccatatgtacctggcccttgtcaaagtatttaatacttacatccgaaaatacatccttaaattctgcattgtcggttggggggtaccagctgtggttgtgaccatcatcctgactatatccccagataactatgggcttggatcctatgggaaattccccaatggttcaccggatgacttctgctggatcaacaacaatgcagtattctacattacggtggtgggatatttctgtgtgatatttttgctgaacgtcagcatgttcattgtggtcctggttcagctctgtcgaattaaaaagaagaagcaactgggagcccagcgaaaaaccagtattcaagacctcaggagtatcgctggccttacatttttactgggaataacttggggctttgccttctttgcctggggaccagttaacgtgaccttcatgtatctgtttgccatctttaataccttacaaggatttttcatattcatcttttactgtgtggccaaagaaaatgtcaggaagcaatggaggcggtatctttgttgtggaaagttacggctggctgaaaattctgactggagtaaaactgctactaatggtttaaagaagcagactgtaaaccaaggagtgtccagctcttcaaattccttacagtcaagcagtaactccactaactccaccacactgctagtgaataatgattgctcagtacacgcaagcgggaatggaaatgcttctacagagaggaatggggtctcttttagtgttcagaatggagatgtgtgccttcacgatttcactggaaaacagcacatgtttaacgagaaggaagattcctgcaatgggaaaggccgtatggctctcagaaggacttcaaagcggggaagcttacactttattgagcaaatgtgattcctttcttctaaaatcaaagcatgatgcttgacagtgtgaaatgtccaattttaccttttacacaatgtgagatgtatgaaaatcaactcattttattctcggcaacatctggagaagcataagctaattaagggcgatgattattattacaagaagaaaccaagacattacaccatggtttttagacatttctgatttggtttcttatctttcattttataagaaggttggttttaaacaatacactaagaatgactcctataaagaaaacaaaaaaaggtagtgaactttcagctaccttttaaagaggctaagttatctttgataacatcatataaagcaactgttgacttcagcctgttggtgagtttagttgtgcatgcctttgttgtatataagctaaattctagtgacccatgtgtcaaaaatcttacttctacatttttttgtatttattttctactgtgtaaatgtattcctttgtagaatcatggttgttttgtctcacgtgataattcagaaaatccttgctcgttccgcaaatcctaaagctccttttggagatgatataggatgtgaaatacagaaacctcagtgaaatcaagaaataatgatcccagccagactgagaaaatgtaagcagacagtgccacagttagctcatacagtgcctttgagcaagttaggaaaagatgcccccactgggcagacacagccctatgggctcatggtttgacaaacagagtggagagaccatattttagccccactcaccctcttgggtgcacgacctgtacagccaaacacagcatccaatatgaatacccatcccctgaccgcatccccagtagtcagattatagaatctgcaccaagatgtttagctttataccttggccacagagagggatgaactgtcatccagaccatgtgtcaggaaaattgtgaacgtagatgaggtacatacactgccgcttctcaaatccccagagcctttaggaacaggagagtagactaggattccttctcttaaaaaggtacatatatatggaaaaaaatcatattgccgttctttaaaaggcaactgcatggtacattgttgattgttatgactggtacactctggcccagccagagctataattgttttttaaatgtgtcttgaagaatgcacagtgacaaggggagtagctattgggaacagggaactgtcctacactgctattgttgctacatgtatcgagccttgattgctcctagttatatacagggtctatcttgcttcctacctacatctgcttgagcagtgcctcaagtacatccttattaggaacatttcaaaccccttttagttaagtctttcactaaggttctcttgcatatatttcaagtgaatgttggatctcagactaaccatagtaataatacacatttctgtgagtgctgacttgtctttgcaatatttcttttctgatttatttaattttcttgtatttatatgttaaaatcaaaaatgttaaaatcaatgaaataaatttgcagttaagatcttt

SEQ ID NO: 342788 - DNA, 4630 bp, Artificial Sequence
  derived and/or modified sequence
agccccgaggacgcgagcggcaggtgtgcacagaggttctccactttgttttctgaactcgcggtcaggatggttttctctgtcaggcagtgtggccatgttggcagaactgaagaagttttactgacgttcaagatattccttgtcatcatttgtcttcatgtcgttctggtaacatccctggaagaagatactgataattccagtttgtcaccaccacctgctaaattatctgttgtcagttttgccccctcctccaatggtactccagaggttgaaacaacaagcctcaatgatgttactttaagcttactcccttcaaacgaaacaggcgtcaaaccccagagaaatatctgcaatttgtcatctatttgcaatgactcagcattttttagaggtgagatcatgtttcaatatgataaagaaagcactgttccccagaatcaacatataacgaatggcaccttaactggagtcctgtctctaagtgaattaaaacgctcagagctcaacaaaaccctgcaaaccctaagtgagacttactttataatgtgtgctacagcagaggcccaaagcacattaaattgtacattcacaataaaactgaataatacaatgaatgcatgtgctgtaatagctgctttggaaagagtaaagattcgaccaatggaacactgctgctgttctgtcaggataccctgcccttcctccccagaagagttggaaaagcttcagtgtgacctgcaggatcccattgtctgtcttgctgaccatccacgtggcccaccattttcttccagccaatccatcccagtggtgcctcgggccactgtgctttcccaggtccccaaagctacctcttttgctgagcctccagattattcacctgtgacccacaatgttccctctccaataggggagattcaacccctttcaccccagccttcagctcccatagcttccagccctgccattgacatgcccccacagtctgaaacgatctcttcccctatgccccaaacccatgtctccggcaccccacctcctgtgaaagcctcattttcctctcccaccgtgtctgcccctgcgaatgtcaacactaccagcgcacctcctgtccagacagacatcgtcaacaccagcagtatttctgatcttgagaaccaagtgttgcagatggagaaggctctgtccttgggcagcctggagcctaacctcgcaggagaaatgatcaaccaagtcagcagactccttcattccccgcctgacatgctggcccctctggctcaaagattgctgaaagtagtggatgacattggcctacagctgaacttttcaaacacgactataagtctaacctccccttctttggctctggctgtgatcagagtgaatgccagtagtttcaacacaactacctttgtggcccaagaccctgcaaatcttcaggtttctctggaaacccaagctcctgagaacagtattggcacaattactcttccttcatcgctgatgaataatttaccagctcatgacatggagctagcttccagggttcagttcaatttttttgaaacacctgctttgtttcaggatccttccctggagaacctctctctgatcagctacgtcatatcatcgagtgttgcaaacctgaccgtcaggaacttgacaagaaacgtgacagtcacattaaagcacatcaacccgagccaggatgagttaacagtgagatgtgtattttgggacttgggcagaaatggtggcagaggaggctggtcagacaatggctgctctgtcaaagacaggagattgaatgaaaccatctgtacctgtagccatctaacaagcttcggcgttctgctggacctatctaggacatctgtgctgcctgctcaaatgatggctctgacgttcattacatatattggttgtgggctttcatcaatttttctgtcagtgactcttgtaacctacatagcttttgaaaagatccggagggattacccttccaaaatcctcatccagctgtgtgctgctctgcttctgctgaacctggtcttcctcctggactcgtggattgctctgtataagatgcaaggcctctgcatctcagtggctgtatttcttcattattttctcttggtctcattcacatggatgggcctagaagcattccatatgtacctggcccttgtcaaagtatttaatacttacatccgaaaatacatccttaaattctgcattgtcggttggggggtaccagctgtggttgtgaccatcatcctgactatatccccagataactatgggcttggatcctatgggaaattccccaatggttcaccggatgacttctgctggatcaacaacaatgcagtattctacattacggtggtgggatatttctgtgtgatatttttgctgaacgtcagcatgttcattgtggtcctggttcagctctgtcgaattaaaaagaagaagcaactgggagcccagcgaaaaaccagtattcaagacctcaggagtatcgctggccttacatttttactgggaataacttggggctttgccttctttgcctggggaccagttaacgtgaccttcatgtatctgtttgccatctttaataccttacaaggatttttcatattcatcttttactgtgtggccaaagaaaatgtcaggaagcaatggaggcggtatctttgttgtggaaagttacggctggctgaaaattctgactggagtaaaactgctactaatggtttaaagaagcagactgtaaaccaaggagtgtccagctcttcaaattccttacagtcaagcagtaactccactaactccaccacactgctagtgaataatgattgctcagtacacgcaagcgggaatggaaatgcttctacagagaggaatggggtctcttttagtgttcagaatggagatgtgtgccttcacgatttcactggaaaacagcacatgtttaacgagaaggaagattcctgcaatgggaaaggccgtatggctctcagaaggacttcaaagcggggaagcttacactttattgagcaaatgtgattcctttcttctaaaatcaaagcatgatgcttgacagtgtgaaatgtccaattttaccttttacacaatgtgagatgtatgaaaatcaactcattttattctcggcaacatctggagaagcataagctaattaagggcgatgattattattacaagaagaaaccaagacattacaccatggtttttagacatttctgatttggtttcttatctttcattttataagaaggttggttttaaacaatacactaagaatgactcctataaagaaaacaaaaaaaggtagtgaactttcagctaccttttaaagaggctaagttatctttgataacatcatataaagcaactgttgacttcagcctgttggtgagtttagttgtgcatgcctttgttgtatataagctaaattctagtgacccatgtgtcaaaaatcttacttctacatttttttgtatttattttctactgtgtaaatgtattcctttgtagaatcatggttgttttgtctcacgtgataattcagaaaatccttgctcgttccgcaaatcctaaagctccttttggagatgatataggatgtgaaatacagaaacctcagtgaaatcaagaaataatgatcccagccagactgagaaaatgtaagcagacagtgccacagttagctcatacagtgcctttgagcaagttaggaaaagatgcccccactgggcagacacagccctatgggctcatggtttgacaaacagagtggagagaccatattttagccccactcaccctcttgggtgcacgacctgtacagccaaacacagcatccaatatgaatacccatcccctgaccgcatccccagtagtcagattatagaatctgcaccaagatgtttagctttataccttggccacagagagggatgaactgtcatccagaccatgtgtcaggaaaattgtgaacgtagatgaggtacatacactgccgcttctcaaatccccagagcctttaggaacaggagagtagactaggattccttctcttaaaaaggtacatatatatggaaaaaaatcatattgccgttctttaaaaggcaactgcatggtacattgttgattgttatgactggtacactctggcccagccagagctataattgttttttaaatgtgtcttgaagaatgcacagtgacaaggggagtagctattgggaacagggaactgtcctacactgctattgttgctacatgtatcgagccttgattgctcctagttatatacagggtctatcttgcttcctacctacatctgcttgagcagtgcctcaagtacatccttattaggaacatttcaaaccccttttagttaagtctttcactaaggttctcttgcatatatttcaagtgaatgttggatctcagactaaccatagtaataatacacatttctgtgagtgctgacttgtctttgcaatatttcttttctgatttatttaattttcttgtatttatatgttaaaatcaaaaatgttaaaatcaatgaaataaatttgcagttaag

SEQ ID NO: 342789 - DNA, 4678 bp, Artificial Sequence
  derived and/or modified sequence
cgggagcggcgggggcggcgccgaggccgcgggcggggggaggagggccgcagccccggagaggggaaaaggcgggccggacggcgccagcagccagccccgaggacgcgagcggcaggtgtgcacagaggttctccactttgttttctgaactcgcggtcaggatggttttctctgtcaggcagtgtggccatgttggcagaactgaagaagttttactgacgttcaagatattccttgtcatcatttgtcttcatgtcgttctggtaacatccctggaagaagatactgataattccagtttgtcaccaccacctgaggttgaaacaacaagcctcaatgatgttactttaagcttactcccttcaaacgaaacaggcgtcaaaccccagagaaatatctgcaatttgtcatctatttgcaatgactcagcattttttagaggtgagatcatgtttcaatatgataaagaaagcactgttccccagaatcaacatataacgaatggcaccttaactggagtcctgtctctaagtgaattaaaacgctcagagctcaacaaaaccctgcaaaccctaagtgagacttactttataatgtgtgctacagcagaggcccaaagcacattaaattgtacattcacaataaaactgaataatacaatgaatgcatgtgctgtaatagctgctttggaaagagtaaagattcgaccaatggaacactgctgctgttctgtcaggataccctgcccttcctccccagaagagttggaaaagcttcagtgtgacctgcaggatcccattgtctgtcttgctgaccatccacgtggcccaccattttcttccagccaatccatcccagtggtgcctcgggccactgtgctttcccaggtccccaaagctacctcttttgctgagcctccagattattcacctgtgacccacaatgttccctctccaataggggagattcaacccctttcaccccagccttcagctcccatagcttccagccctgccattgacatgcccccacagtctgaaacgatctcttcccctatgccccaaacccatgtctccggcaccccacctcctgtgaaagcctcattttcctctcccaccgtgtctgcccctgcgaatgtcaacactaccagcgcacctcctgtccagacagacatcgtcaacaccagcagtatttctgatcttgagaaccaagtgttgcagatggagaaggctctgtccttgggcagcctggagcctaacctcgcaggagaaatgatcaaccaagtcagcagactccttcattccccgcctgacatgctggcccctctggctcaaagattgctgaaagtagtggatgacattggcctacagctgaacttttcaaacacgactataagtctaacctccccttctttggctctggctgtgatcagagtgaatgccagtagtttcaacacaactacctttgtggcccaagaccctgcaaatcttcaggtttctctggaaacccaagctcctgagaacagtattggcacaattactcttccttcatcgctgatgaataatttaccagctcatgacatggagctagcttccagggttcagttcaatttttttgaaacacctgctttgtttcaggatccttccctggagaacctctctctgatcagctacgtcatatcatcgagtgttgcaaacctgaccgtcaggaacttgacaagaaacgtgacagtcacattaaagcacatcaacccgagccaggatgagttaacagtgagatgtgtattttgggacttgggcagaaatggtggcagaggaggctggtcagacaatggctgctctgtcaaagacaggagattgaatgaaaccatctgtacctgtagccatctaacaagcttcggcgttctgctggacctatctaggacatctgtgctgcctgctcaaatgatggctctgacgttcattacatatattggttgtgggctttcatcaatttttctgtcagtgactcttgtaacctacatagcttttgaaaagatccggagggattacccttccaaaatcctcatccagctgtgtgctgctctgcttctgctgaacctggtcttcctcctggactcgtggattgctctgtataagatgcaaggcctctgcatctcagtggctgtatttcttcattattttctcttggtctcattcacatggatgggcctagaagcattccatatgtacctggcccttgtcaaagtatttaatacttacatccgaaaatacatccttaaattctgcattgtcggttggggggtaccagctgtggttgtgaccatcatcctgactatatccccagataactatgggcttggatcctatgggaaattccccaatggttcaccggatgacttctgctggatcaacaacaatgcagtattctacattacggtggtgggatatttctgtgtgatatttttgctgaacgtcagcatgttcattgtggtcctggttcagctctgtcgaattaaaaagaagaagcaactgggagcccagcgaaaaaccagtattcaagacctcaggagtatcgctggccttacatttttactgggaataacttggggctttgccttctttgcctggggaccagttaacgtgaccttcatgtatctgtttgccatctttaataccttacaaggatttttcatattcatcttttactgtgtggccaaagaaaatgtcaggaagcaatggaggcggtatctttgttgtggaaagttacggctggctgaaaattctgactggagtaaaactgctactaatggtttaaagaagcagactgtaaaccaaggagtgtccagctcttcaaattccttacagtcaagcagtaactccactaactccaccacactgctagtgaataatgattgctcagtacacgcaagcgggaatggaaatgcttctacagagaggaatggggtctcttttagtgttcagaatggagatgtgtgccttcacgatttcactggaaaacagcacatgtttaacgagaaggaagattcctgcaatgggaaaggccgtatggctctcagaaggacttcaaagcggggaagcttacactttattgagcaaatgtgattcctttcttctaaaatcaaagcatgatgcttgacagtgtgaaatgtccaattttaccttttacacaatgtgagatgtatgaaaatcaactcattttattctcggcaacatctggagaagcataagctaattaagggcgatgattattattacaagaagaaaccaagacattacaccatggtttttagacatttctgatttggtttcttatctttcattttataagaaggttggttttaaacaatacactaagaatgactcctataaagaaaacaaaaaaaggtagtgaactttcagctaccttttaaagaggctaagttatctttgataacatcatataaagcaactgttgacttcagcctgttggtgagtttagttgtgcatgcctttgttgtatataagctaaattctagtgacccatgtgtcaaaaatcttacttctacatttttttgtatttattttctactgtgtaaatgtattcctttgtagaatcatggttgttttgtctcacgtgataattcagaaaatccttgctcgttccgcaaatcctaaagctccttttggagatgatataggatgtgaaatacagaaacctcagtgaaatcaagaaataatgatcccagccagactgagaaaatgtaagcagacagtgccacagttagctcatacagtgcctttgagcaagttaggaaaagatgcccccactgggcagacacagccctatgggctcatggtttgacaaacagagtggagagaccatattttagccccactcaccctcttgggtgcacgacctgtacagccaaacacagcatccaatatgaatacccatcccctgaccgcatccccagtagtcagattatagaatctgcaccaagatgtttagctttataccttggccacagagagggatgaactgtcatccagaccatgtgtcaggaaaattgtgaacgtagatgaggtacatacactgccgcttctcaaatccccagagcctttaggaacaggagagtagactaggattccttctcttaaaaaggtacatatatatggaaaaaaatcatattgccgttctttaaaaggcaactgcatggtacattgttgattgttatgactggtacactctggcccagccagagctataattgttttttaaatgtgtcttgaagaatgcacagtgacaaggggagtagctattgggaacagggaactgtcctacactgctattgttgctacatgtatcgagccttgattgctcctagttatatacagggtctatcttgcttcctacctacatctgcttgagcagtgcctcaagtacatccttattaggaacatttcaaaccccttttagttaagtctttcactaaggttctcttgcatatatttcaagtgaatgttggatctcagactaaccatagtaataatacacatttctgtgagtgctgacttgtctttgcaatatttcttttctgatttatttaattttcttgtatttatatgttaaaatcaaaaatgttaaaatcaatgaaataaatttgcagttaaga

SEQ ID NO: 342790 - DNA, 4661 bp, Artificial Sequence
  derived and/or modified sequence
cccgaggacgcgagcggcaggtgtgcacagaggttctccactttgttttctgaactcgcggtcaggatggttttctctgtcaggcagtgtggccatgttggcagaactgaagaagttttactgacgttcaagatattccttgtcatcatttgtcttcatgtcgttctggtaacatccctggaagaagatactgataattccagtttgtcaccaccacctgctaaattatctgttgtcagttttgccccctcctccaatgaggttgaaacaacaagcctcaatgatgttactttaagcttactcccttcaaacgaaacagaaaaaactaaaatcactatagtaaaaaccttcaatgcatcaggcgtcaaaccccagagaaatatctgcaatttgtcatctatttgcaatgactcagcattttttagaggtgagatcatgtttcaatatgataaagaaagcactgttccccagaatcaacatataacgaatggcaccttaactggagtcctgtctctaagtgaattaaaacgctcagagctcaacaaaaccctgcaaaccctaagtgagacttactttataatgtgtgctacagcagaggcccaaagcacattaaattgtacattcacaataaaactgaataatacaatgaatgcatgtgctgtaatagctgctttggaaagagtaaagattcgaccaatggaacactgctgctgttctgtcaggataccctgcccttcctccccagaagagttggaaaagcttcagtgtgacctgcaggatcccattgtctgtcttgctgaccatccacgtggcccaccattttcttccagccaatccatcccagtggtgcctcgggccactgtgctttcccaggtccccaaagctacctcttttgctgagcctccagattattcacctgtgacccacaatgttccctctccaataggggagattcaacccctttcaccccagccttcagctcccatagcttccagccctgccattgacatgcccccacagtctgaaacgatctcttcccctatgccccaaacccatgtctccggcaccccacctcctgtgaaagcctcattttcctctcccaccgtgtctgcccctgcgaatgtcaacactaccagcgcacctcctgtccagacagacatcgtcaacaccagcagtatttctgatcttgagaaccaagtgttgcagatggagaaggctctgtccttgggcagcctggagcctaacctcgcaggagaaatgatcaaccaagtcagcagactccttcattccccgcctgacatgctggcccctctggctcaaagattgctgaaagtagtggatgacattggcctacagctgaacttttcaaacacgactataagtctaacctccccttctttggctctggctgtgatcagagtgaatgccagtagtttcaacacaactacctttgtggcccaagaccctgcaaatcttcaggtttctctggaaacccaagctcctgagaacagtattggcacaattactcttccttcatcgctgatgaataatttaccagctcatgacatggagctagcttccagggttcagttcaatttttttgaaacacctgctttgtttcaggatccttccctggagaacctctctctgatcagctacgtcatatcatcgagtgttgcaaacctgaccgtcaggaacttgacaagaaacgtgacagtcacattaaagcacatcaacccgagccaggatgagttaacagtgagatgtgtattttgggacttgggcagaaatggtggcagaggaggctggtcagacaatggctgctctgtcaaagacaggagattgaatgaaaccatctgtacctgtagccatctaacaagcttcggcgttctgctggacctatctaggacatctgtgctgcctgctcaaatgatggctctgacgttcattacatatattggttgtgggctttcatcaatttttctgtcagtgactcttgtaacctacatagcttttgaaaagatccggagggattacccttccaaaatcctcatccagctgtgtgctgctctgcttctgctgaacctggtcttcctcctggactcgtggattgctctgtataagatgcaaggcctctgcatctcagtggctgtatttcttcattattttctcttggtctcattcacatggatgggcctagaagcattccatatgtacctggcccttgtcaaagtatttaatacttacatccgaaaatacatccttaaattctgcattgtcggttggggggtaccagctgtggttgtgaccatcatcctgactatatccccagataactatgggcttggatcctatgggaaattccccaatggttcaccggatgacttctgctggatcaacaacaatgcagtattctacattacggtggtgggatatttctgtgtgatatttttgctgaacgtcagcatgttcattgtggtcctggttcagctctgtcgaattaaaaagaagaagcaactgggagcccagcgaaaaaccagtattcaagacctcaggagtatcgctggccttacatttttactgggaataacttggggctttgccttctttgcctggggaccagttaacgtgaccttcatgtatctgtttgccatctttaataccttacaaggatttttcatattcatcttttactgtgtggccaaagaaaatgtcaggaagcaatggaggcggtatctttgttgtggaaagttacggctggctgaaaattctgactggagtaaaactgctactaatggtttaaagaagcagactgtaaaccaaggagtgtccagctcttcaaattccttacagtcaagcagtaactccactaactccaccacactgctagtgaataatgattgctcagtacacgcaagcgggaatggaaatgcttctacagagaggaatggggtctcttttagtgttcagaatggagatgtgtgccttcacgatttcactggaaaacagcacatgtttaacgagaaggaagattcctgcaatgggaaaggccgtatggctctcagaaggacttcaaagcggggaagcttacactttattgagcaaatgtgattcctttcttctaaaatcaaagcatgatgcttgacagtgtgaaatgtccaattttaccttttacacaatgtgagatgtatgaaaatcaactcattttattctcggcaacatctggagaagcataagctaattaagggcgatgattattattacaagaagaaaccaagacattacaccatggtttttagacatttctgatttggtttcttatctttcattttataagaaggttggttttaaacaatacactaagaatgactcctataaagaaaacaaaaaaaggtagtgaactttcagctaccttttaaagaggctaagttatctttgataacatcatataaagcaactgttgacttcagcctgttggtgagtttagttgtgcatgcctttgttgtatataagctaaattctagtgacccatgtgtcaaaaatcttacttctacatttttttgtatttattttctactgtgtaaatgtattcctttgtagaatcatggttgttttgtctcacgtgataattcagaaaatccttgctcgttccgcaaatcctaaagctccttttggagatgatataggatgtgaaatacagaaacctcagtgaaatcaagaaataatgatcccagccagactgagaaaatgtaagcagacagtgccacagttagctcatacagtgcctttgagcaagttaggaaaagatgcccccactgggcagacacagccctatgggctcatggtttgacaaacagagtggagagaccatattttagccccactcaccctcttgggtgcacgacctgtacagccaaacacagcatccaatatgaatacccatcccctgaccgcatccccagtagtcagattatagaatctgcaccaagatgtttagctttataccttggccacagagagggatgaactgtcatccagaccatgtgtcaggaaaattgtgaacgtagatgaggtacatacactgccgcttctcaaatccccagagcctttaggaacaggagagtagactaggattccttctcttaaaaaggtacatatatatggaaaaaaatcatattgccgttctttaaaaggcaactgcatggtacattgttgattgttatgactggtacactctggcccagccagagctataattgttttttaaatgtgtcttgaagaatgcacagtgacaaggggagtagctattgggaacagggaactgtcctacactgctattgttgctacatgtatcgagccttgattgctcctagttatatacagggtctatcttgcttcctacctacatctgcttgagcagtgcctcaagtacatccttattaggaacatttcaaaccccttttagttaagtctttcactaaggttctcttgcatatatttcaagtgaatgttggatctcagactaaccatagtaataatacacatttctgtgagtgctgacttgtctttgcaatatttcttttctgatttatttaattttcttgtatttatatgttaaaatcaaaaatgttaaaatcaatgaaataaatttgcagttaaga

SEQ ID NO: 342791 - DNA, 4702 bp, Artificial Sequence
  derived and/or modified sequence
cgggagcggcgggggcggcgccgaggccgcgggcggggggaggagggccgcagccccggagaggggaaaaggcgggccggacggcgccagcagccagccccgaggacgcgagcggcaggtgtgcacagaggttctccactttgttttctgaactcgcggtcaggatggttttctctgtcaggcagtgtggccatgttggcagaactgaagaagttttactgacgttcaagatattccttgtcatcatttgtcttcatgtcgttctggtaacatccctggaagaagatactgataattccagtttgtcaccaccacctgctaaattatctgttgtcagttttgccccctcctccaatggtactccagatgttactttaagcttactcccttcaaacgaaacaggcgtcaaaccccagagaaatatctgcaatttgtcatctatttgcaatgactcagcattttttagaggtgagatcatgtttcaatatgataaagaaagcactgttccccagaatcaacatataacgaatggcaccttaactggagtcctgtctctaagtgaattaaaacgctcagagctcaacaaaaccctgcaaaccctaagtgagacttactttataatgtgtgctacagcagaggcccaaagcacattaaattgtacattcacaataaaactgaataatacaatgaatgcatgtgctgtaatagctgctttggaaagagtaaagattcgaccaatggaacactgctgctgttctgtcaggataccctgcccttcctccccagaagagttggaaaagcttcagtgtgacctgcaggatcccattgtctgtcttgctgaccatccacgtggcccaccattttcttccagccaatccatcccagtggtgcctcgggccactgtgctttcccaggtccccaaagctacctcttttgctgagcctccagattattcacctgtgacccacaatgttccctctccaataggggagattcaacccctttcaccccagccttcagctcccatagcttccagccctgccattgacatgcccccacagtctgaaacgatctcttcccctatgccccaaacccatgtctccggcaccccacctcctgtgaaagcctcattttcctctcccaccgtgtctgcccctgcgaatgtcaacactaccagcgcacctcctgtccagacagacatcgtcaacaccagcagtatttctgatcttgagaaccaagtgttgcagatggagaaggctctgtccttgggcagcctggagcctaacctcgcaggagaaatgatcaaccaagtcagcagactccttcattccccgcctgacatgctggcccctctggctcaaagattgctgaaagtagtggatgacattggcctacagctgaacttttcaaacacgactataagtctaacctccccttctttggctctggctgtgatcagagtgaatgccagtagtttcaacacaactacctttgtggcccaagaccctgcaaatcttcaggtttctctggaaacccaagctcctgagaacagtattggcacaattactcttccttcatcgctgatgaataatttaccagctcatgacatggagctagcttccagggttcagttcaatttttttgaaacacctgctttgtttcaggatccttccctggagaacctctctctgatcagctacgtcatatcatcgagtgttgcaaacctgaccgtcaggaacttgacaagaaacgtgacagtcacattaaagcacatcaacccgagccaggatgagttaacagtgagatgtgtattttgggacttgggcagaaatggtggcagaggaggctggtcagacaatggctgctctgtcaaagacaggagattgaatgaaaccatctgtacctgtagccatctaacaagcttcggcgttctgctggacctatctaggacatctgtgctgcctgctcaaatgatggctctgacgttcattacatatattggttgtgggctttcatcaatttttctgtcagtgactcttgtaacctacatagcttttgaaaagatccggagggattacccttccaaaatcctcatccagctgtgtgctgctctgcttctgctgaacctggtcttcctcctggactcgtggattgctctgtataagatgcaaggcctctgcatctcagtggctgtatttcttcattattttctcttggtctcattcacatggatgggcctagaagcattccatatgtacctggcccttgtcaaagtatttaatacttacatccgaaaatacatccttaaattctgcattgtcggttggggggtaccagctgtggttgtgaccatcatcctgactatatccccagataactatgggcttggatcctatgggaaattccccaatggttcaccggatgacttctgctggatcaacaacaatgcagtattctacattacggtggtgggatatttctgtgtgatatttttgctgaacgtcagcatgttcattgtggtcctggttcagctctgtcgaattaaaaagaagaagcaactgggagcccagcgaaaaaccagtattcaagacctcaggagtatcgctggccttacatttttactgggaataacttggggctttgccttctttgcctggggaccagttaacgtgaccttcatgtatctgtttgccatctttaataccttacaaggatttttcatattcatcttttactgtgtggccaaagaaaatgtcaggaagcaatggaggcggtatctttgttgtggaaagttacggctggctgaaaattctgactggagtaaaactgctactaatggtttaaagaagcagactgtaaaccaaggagtgtccagctcttcaaattccttacagtcaagcagtaactccactaactccaccacactgctagtgaataatgattgctcagtacacgcaagcgggaatggaaatgcttctacagagaggaatggggtctcttttagtgttcagaatggagatgtgtgccttcacgatttcactggaaaacagcacatgtttaacgagaaggaagattcctgcaatgggaaaggccgtatggctctcagaaggacttcaaagcggggaagcttacactttattgagcaaatgtgattcctttcttctaaaatcaaagcatgatgcttgacagtgtgaaatgtccaattttaccttttacacaatgtgagatgtatgaaaatcaactcattttattctcggcaacatctggagaagcataagctaattaagggcgatgattattattacaagaagaaaccaagacattacaccatggtttttagacatttctgatttggtttcttatctttcattttataagaaggttggttttaaacaatacactaagaatgactcctataaagaaaacaaaaaaaggtagtgaactttcagctaccttttaaagaggctaagttatctttgataacatcatataaagcaactgttgacttcagcctgttggtgagtttagttgtgcatgcctttgttgtatataagctaaattctagtgacccatgtgtcaaaaatcttacttctacatttttttgtatttattttctactgtgtaaatgtattcctttgtagaatcatggttgttttgtctcacgtgataattcagaaaatccttgctcgttccgcaaatcctaaagctccttttggagatgatataggatgtgaaatacagaaacctcagtgaaatcaagaaataatgatcccagccagactgagaaaatgtaagcagacagtgccacagttagctcatacagtgcctttgagcaagttaggaaaagatgcccccactgggcagacacagccctatgggctcatggtttgacaaacagagtggagagaccatattttagccccactcaccctcttgggtgcacgacctgtacagccaaacacagcatccaatatgaatacccatcccctgaccgcatccccagtagtcagattatagaatctgcaccaagatgtttagctttataccttggccacagagagggatgaactgtcatccagaccatgtgtcaggaaaattgtgaacgtagatgaggtacatacactgccgcttctcaaatccccagagcctttaggaacaggagagtagactaggattccttctcttaaaaaggtacatatatatggaaaaaaatcatattgccgttctttaaaaggcaactgcatggtacattgttgattgttatgactggtacactctggcccagccagagctataattgttttttaaatgtgtcttgaagaatgcacagtgacaaggggagtagctattgggaacagggaactgtcctacactgctattgttgctacatgtatcgagccttgattgctcctagttatatacagggtctatcttgcttcctacctacatctgcttgagcagtgcctcaagtacatccttattaggaacatttcaaaccccttttagttaagtctttcactaaggttctcttgcatatatttcaagtgaatgttggatctcagactaaccatagtaataatacacatttctgtgagtgctgacttgtctttgcaatatttcttttctgatttatttaattttcttgtatttatatgttaaaatcaaaaatgttaaaatcaatgaaataaatttgcagttaaga

SEQ ID NO: 342792 - DNA, 4768 bp, Artificial Sequence
  derived and/or modified sequence
cgggagcggcgggggcggcgccgaggccgcgggcggggggaggagggccgcagccccggagaggggaaaaggcgggccggacggcgccagcagccagccccgaggacgcgagcggcaggtgtgcacagaggttctccactttgttttctgaactcgcggtcaggatggttttctctgtcaggcagtgtggccatgttggcagaactgaagaagttttactgacgttcaagatattccttgtcatcatttgtcttcatgtcgttctggtaacatccctggaagaagatactgataattccagtttgtcaccaccacctgctaaattatctgttgtcagttttgccccctcctccaatggtactccagaggttgaaacaacaagcctcaatgatgttactttaagcttactcccttcaaacgaaacagaaaaaactaaaatcactatagtaaaaaccttcaatgcatcaggcgtcaaaccccagagaaatatctgcaatttgtcatctatttgcaatgactcagcattttttagaggtgagatcatgtttcaatatgataaagaaagcactgttccccagaatcaacatataacgaatggcaccttaactggagtcctgtctctaagtgaattaaaacgctcagagctcaacaaaaccctgcaaaccctaagtgagacttactttataatgtgtgctacagcagaggcccaaagcacattaaattgtacattcacaataaaactgaataatacaatgaatgcatgtgctgtaatagctgctttggaaagagtaaagattcgaccaatggaacactgctgctgttctgtcaggataccctgcccttcctccccagaagagttggaaaagcttcagtgtgacctgcaggatcccattgtctgtcttgctgaccatccacgtggcccaccattttcttccagccaatccatcccagtggtgcctcgggccactgtgctttcccaggtccccaaagctacctcttttgctgagcctccagattattcacctgtgacccacaatgttccctctccaataggggagattcaacccctttcaccccagccttcagctcccatagcttccagccctgccattgacatgcccccacagtctgaaacgatctcttcccctatgccccaaacccatgtctccggcaccccacctcctgtgaaagcctcattttcctctcccaccgtgtctgcccctgcgaatgtcaacactaccagcgcacctcctgtccagacagacatcgtcaacaccagcagtatttctgatcttgagaaccaagtgttgcagatggagaaggctctgtccttgggcagcctggagcctaacctcgcaggagaaatgatcaaccaagtcagcagactccttcattccccgcctgacatgctggcccctctggctcaaagattgctgaaagtagtggatgacattggcctacagctgaacttttcaaacacgactataagtctaacctccccttctttggctctggctgtgatcagagtgaatgccagtagtttcaacacaactacctttgtggcccaagaccctgcaaatcttcaggtttctctggaaacccaagctcctgagaacagtattggcacaattactcttccttcatcgctgatgaataatttaccagctcatgacatggagctagcttccagggttcagttcaatttttttgaaacacctgctttgtttcaggatccttccctggagaacctctctctgatcagctacgtcatatcatcgagtgttgcaaacctgaccgtcaggaacttgacaagaaacgtgacagtcacattaaagcacatcaacccgagccaggatgagttaacagtgagatgtgtattttgggacttgggcagaaatggtggcagaggaggctggtcagacaatggctgctctgtcaaagacaggagattgaatgaaaccatctgtacctgtagccatctaacaagcttcggcgttctgctggacctatctaggacatctgtgctgcctgctcaaatgatggctctgacgttcattacatatattggttgtgggctttcatcaatttttctgtcagtgactcttgtaacctacatagcttttgaaaagatccggagggattacccttccaaaatcctcatccagctgtgtgctgctctgcttctgctgaacctggtcttcctcctggactcgtggattgctctgtataagatgcaaggcctctgcatctcagtggctgtatttcttcattattttctcttggtctcattcacatggatgggcctagaagcattccatatgtacctggcccttgtcaaagtatttaatacttacatccgaaaatacatccttaaattctgcattgtcggttggggggtaccagctgtggttgtgaccatcatcctgactatatccccagataactatgggcttggatcctatgggaaattccccaatggttcaccggatgacttctgctggatcaacaacaatgcagtattctacattacggtggtgggatatttctgtgtgatatttttgctgaacgtcagcatgttcattgtggtcctggttcagctctgtcgaattaaaaagaagaagcaactgggagcccagcgaaaaaccagtattcaagacctcaggagtatcgctggccttacatttttactgggaataacttggggctttgccttctttgcctggggaccagttaacgtgaccttcatgtatctgtttgccatctttaataccttacaaggatttttcatattcatcttttactgtgtggccaaagaaaatgtcaggaagcaatggaggcggtatctttgttgtggaaagttacggctggctgaaaattctgactggagtaaaactgctactaatggtttaaagaagcagactgtaaaccaaggagtgtccagctcttcaaattccttacagtcaagcagtaactccactaactccaccacactgctagtgaataatgattgctcagtacacgcaagcgggaatggaaatgcttctacagagaggaatggggtctcttttagtgttcagaatggagatgtgtgccttcacgatttcactggaaaacagcacatgtttaacgagaaggaagattcctgcaatgggaaaggccgtatggctctcagaaggacttcaaagcggggaagcttacactttattgagcaaatgtgattcctttcttctaaaatcaaagcatgatgcttgacagtgtgaaatgtccaattttaccttttacacaatgtgagatgtatgaaaatcaactcattttattctcggcaacatctggagaagcataagctaattaagggcgatgattattattacaagaagaaaccaagacattacaccatggtttttagacatttctgatttggtttcttatctttcattttataagaaggttggttttaaacaatacactaagaatgactcctataaagaaaacaaaaaaaggtagtgaactttcagctaccttttaaagaggctaagttatctttgataacatcatataaagcaactgttgacttcagcctgttggtgagtttagttgtgcatgcctttgttgtatataagctaaattctagtgacccatgtgtcaaaaatcttacttctacatttttttgtatttattttctactgtgtaaatgtattcctttgtagaatcatggttgttttgtctcacgtgataattcagaaaatccttgctcgttccgcaaatcctaaagctccttttggagatgatataggatgtgaaatacagaaacctcagtgaaatcaagaaataatgatcccagccagactgagaaaatgtaagcagacagtgccacagttagctcatacagtgcctttgagcaagttaggaaaagatgcccccactgggcagacacagccctatgggctcatggtttgacaaacagagtggagagaccatattttagccccactcaccctcttgggtgcacgacctgtacagccaaacacagcatccaatatgaatacccatcccctgaccgcatccccagtagtcagattatagaatctgcaccaagatgtttagctttataccttggccacagagagggatgaactgtcatccagaccatgtgtcaggaaaattgtgaacgtagatgaggtacatacactgccgcttctcaaatccccagagcctttaggaacaggagagtagactaggattccttctcttaaaaaggtacatatatatggaaaaaaatcatattgccgttctttaaaaggcaactgcatggtacattgttgattgttatgactggtacactctggcccagccagagctataattgttttttaaatgtgtcttgaagaatgcacagtgacaaggggagtagctattgggaacagggaactgtcctacactgctattgttgctacatgtatcgagccttgattgctcctagttatatacagggtctatcttgcttcctacctacatctgcttgagcagtgcctcaagtacatccttattaggaacatttcaaaccccttttagttaagtctttcactaaggttctcttgcatatatttcaagtgaatgttggatctcagactaaccatagtaataatacacatttctgtgagtgctgacttgtctttgcaatatttcttttctgatttatttaattttcttgtatttatatgttaaaatcaaaaatgttaaaatcaatgaaataaatttgcagttaaga

SEQ ID NO: 342793 - DNA, 4779 bp, Artificial Sequence
  derived and/or modified sequence
gcgcccagcctcgccgccgccgagcgcccgacgcgccacgccgcgctgggcagctggagagctggcggcggagcgggccgggagcggcgggggcggcgccgaggccgcgggcggggggaggagggccgcagccccggagaggggaaaaggcgggccggacggcgccagcagccagccccgaggacgcgagcggcaggtgtgcacagaggttctccactttgttttctgaactcgcggtcaggatggttttctctgtcaggcagtgtggccatgttggcagaactgaagaagttttactgacgttcaagatattccttgtcatcatttgtcttcatgtcgttctggtaacatccctggaagaagatactgataattccagtttgtcaccaccacctgatgttactttaagcttactcccttcaaacgaaacagaaaaaactaaaatcactatagtaaaaaccttcaatgcatcaggcgtcaaaccccagagaaatatctgcaatttgtcatctatttgcaatgactcagcattttttagaggtgagatcatgtttcaatatgataaagaaagcactgttccccagaatcaacatataacgaatggcaccttaactggagtcctgtctctaagtgaattaaaacgctcagagctcaacaaaaccctgcaaaccctaagtgagacttactttataatgtgtgctacagcagaggcccaaagcacattaaattgtacattcacaataaaactgaataatacaatgaatgcatgtgctgtaatagctgctttggaaagagtaaagattcgaccaatggaacactgctgctgttctgtcaggataccctgcccttcctccccagaagagttggaaaagcttcagtgtgacctgcaggatcccattgtctgtcttgctgaccatccacgtggcccaccattttcttccagccaatccatcccagtggtgcctcgggccactgtgctttcccaggtccccaaagctacctcttttgctgagcctccagattattcacctgtgacccacaatgttccctctccaataggggagattcaacccctttcaccccagccttcagctcccatagcttccagccctgccattgacatgcccccacagtctgaaacgatctcttcccctatgccccaaacccatgtctccggcaccccacctcctgtgaaagcctcattttcctctcccaccgtgtctgcccctgcgaatgtcaacactaccagcgcacctcctgtccagacagacatcgtcaacaccagcagtatttctgatcttgagaaccaagtgttgcagatggagaaggctctgtccttgggcagcctggagcctaacctcgcaggagaaatgatcaaccaagtcagcagactccttcattccccgcctgacatgctggcccctctggctcaaagattgctgaaagtagtggatgacattggcctacagctgaacttttcaaacacgactataagtctaacctccccttctttggctctggctgtgatcagagtgaatgccagtagtttcaacacaactacctttgtggcccaagaccctgcaaatcttcaggtttctctggaaacccaagctcctgagaacagtattggcacaattactcttccttcatcgctgatgaataatttaccagctcatgacatggagctagcttccagggttcagttcaatttttttgaaacacctgctttgtttcaggatccttccctggagaacctctctctgatcagctacgtcatatcatcgagtgttgcaaacctgaccgtcaggaacttgacaagaaacgtgacagtcacattaaagcacatcaacccgagccaggatgagttaacagtgagatgtgtattttgggacttgggcagaaatggtggcagaggaggctggtcagacaatggctgctctgtcaaagacaggagattgaatgaaaccatctgtacctgtagccatctaacaagcttcggcgttctgctggacctatctaggacatctgtgctgcctgctcaaatgatggctctgacgttcattacatatattggttgtgggctttcatcaatttttctgtcagtgactcttgtaacctacatagcttttgaaaagatccggagggattacccttccaaaatcctcatccagctgtgtgctgctctgcttctgctgaacctggtcttcctcctggactcgtggattgctctgtataagatgcaaggcctctgcatctcagtggctgtatttcttcattattttctcttggtctcattcacatggatgggcctagaagcattccatatgtacctggcccttgtcaaagtatttaatacttacatccgaaaatacatccttaaattctgcattgtcggttggggggtaccagctgtggttgtgaccatcatcctgactatatccccagataactatgggcttggatcctatgggaaattccccaatggttcaccggatgacttctgctggatcaacaacaatgcagtattctacattacggtggtgggatatttctgtgtgatatttttgctgaacgtcagcatgttcattgtggtcctggttcagctctgtcgaattaaaaagaagaagcaactgggagcccagcgaaaaaccagtattcaagacctcaggagtatcgctggccttacatttttactgggaataacttggggctttgccttctttgcctggggaccagttaacgtgaccttcatgtatctgtttgccatctttaataccttacaaggatttttcatattcatcttttactgtgtggccaaagaaaatgtcaggaagcaatggaggcggtatctttgttgtggaaagttacggctggctgaaaattctgactggagtaaaactgctactaatggtttaaagaagcagactgtaaaccaaggagtgtccagctcttcaaattccttacagtcaagcagtaactccactaactccaccacactgctagtgaataatgattgctcagtacacgcaagcgggaatggaaatgcttctacagagaggaatggggtctcttttagtgttcagaatggagatgtgtgccttcacgatttcactggaaaacagcacatgtttaacgagaaggaagattcctgcaatgggaaaggccgtatggctctcagaaggacttcaaagcggggaagcttacactttattgagcaaatgtgattcctttcttctaaaatcaaagcatgatgcttgacagtgtgaaatgtccaattttaccttttacacaatgtgagatgtatgaaaatcaactcattttattctcggcaacatctggagaagcataagctaattaagggcgatgattattattacaagaagaaaccaagacattacaccatggtttttagacatttctgatttggtttcttatctttcattttataagaaggttggttttaaacaatacactaagaatgactcctataaagaaaacaaaaaaaggtagtgaactttcagctaccttttaaagaggctaagttatctttgataacatcatataaagcaactgttgacttcagcctgttggtgagtttagttgtgcatgcctttgttgtatataagctaaattctagtgacccatgtgtcaaaaatcttacttctacatttttttgtatttattttctactgtgtaaatgtattcctttgtagaatcatggttgttttgtctcacgtgataattcagaaaatccttgctcgttccgcaaatcctaaagctccttttggagatgatataggatgtgaaatacagaaacctcagtgaaatcaagaaataatgatcccagccagactgagaaaatgtaagcagacagtgccacagttagctcatacagtgcctttgagcaagttaggaaaagatgcccccactgggcagacacagccctatgggctcatggtttgacaaacagagtggagagaccatattttagccccactcaccctcttgggtgcacgacctgtacagccaaacacagcatccaatatgaatacccatcccctgaccgcatccccagtagtcagattatagaatctgcaccaagatgtttagctttataccttggccacagagagggatgaactgtcatccagaccatgtgtcaggaaaattgtgaacgtagatgaggtacatacactgccgcttctcaaatccccagagcctttaggaacaggagagtagactaggattccttctcttaaaaaggtacatatatatggaaaaaaatcatattgccgttctttaaaaggcaactgcatggtacattgttgattgttatgactggtacactctggcccagccagagctataattgttttttaaatgtgtcttgaagaatgcacagtgacaaggggagtagctattgggaacagggaactgtcctacactgctattgttgctacatgtatcgagccttgattgctcctagttatatacagggtctatcttgcttcctacctacatctgcttgagcagtgcctcaagtacatccttattaggaacatttcaaaccccttttagttaagtctttcactaaggttctcttgcatatatttcaagtgaatgttggatctcagactaaccatagtaataatacacatttctgtgagtgctgacttgtctttgcaatatttcttttctgatttatttaattttcttgtatttatatgttaaaatcaaaaatgttaaaatcaatgaaataaatttgcagttaagatcttt

SEQ ID NO: 342794 - DNA, 4803 bp, Artificial Sequence
  derived and/or modified sequence
gcgcccagcctcgccgccgccgagcgcccgacgcgccacgccgcgctgggcagctggagagctggcggcggagcgggccgggagcggcgggggcggcgccgaggccgcgggcggggggaggagggccgcagccccggagaggggaaaaggcgggccggacggcgccagcagccagccccgaggacgcgagcggcaggtgtgcacagaggttctccactttgttttctgaactcgcggtcaggatggttttctctgtcaggcagtgtggccatgttggcagaactgaagaagttttactgacgttcaagatattccttgtcatcatttgtcttcatgtcgttctggtaacatccctggaagaagatactgataattccagtttgtcaccaccacctgaggttgaaacaacaagcctcaatgatgttactttaagcttactcccttcaaacgaaacagaaaaaactaaaatcactatagtaaaaaccttcaatgcatcaggcgtcaaaccccagagaaatatctgcaatttgtcatctatttgcaatgactcagcattttttagaggtgagatcatgtttcaatatgataaagaaagcactgttccccagaatcaacatataacgaatggcaccttaactggagtcctgtctctaagtgaattaaaacgctcagagctcaacaaaaccctgcaaaccctaagtgagacttactttataatgtgtgctacagcagaggcccaaagcacattaaattgtacattcacaataaaactgaataatacaatgaatgcatgtgctgtaatagctgctttggaaagagtaaagattcgaccaatggaacactgctgctgttctgtcaggataccctgcccttcctccccagaagagttggaaaagcttcagtgtgacctgcaggatcccattgtctgtcttgctgaccatccacgtggcccaccattttcttccagccaatccatcccagtggtgcctcgggccactgtgctttcccaggtccccaaagctacctcttttgctgagcctccagattattcacctgtgacccacaatgttccctctccaataggggagattcaacccctttcaccccagccttcagctcccatagcttccagccctgccattgacatgcccccacagtctgaaacgatctcttcccctatgccccaaacccatgtctccggcaccccacctcctgtgaaagcctcattttcctctcccaccgtgtctgcccctgcgaatgtcaacactaccagcgcacctcctgtccagacagacatcgtcaacaccagcagtatttctgatcttgagaaccaagtgttgcagatggagaaggctctgtccttgggcagcctggagcctaacctcgcaggagaaatgatcaaccaagtcagcagactccttcattccccgcctgacatgctggcccctctggctcaaagattgctgaaagtagtggatgacattggcctacagctgaacttttcaaacacgactataagtctaacctccccttctttggctctggctgtgatcagagtgaatgccagtagtttcaacacaactacctttgtggcccaagaccctgcaaatcttcaggtttctctggaaacccaagctcctgagaacagtattggcacaattactcttccttcatcgctgatgaataatttaccagctcatgacatggagctagcttccagggttcagttcaatttttttgaaacacctgctttgtttcaggatccttccctggagaacctctctctgatcagctacgtcatatcatcgagtgttgcaaacctgaccgtcaggaacttgacaagaaacgtgacagtcacattaaagcacatcaacccgagccaggatgagttaacagtgagatgtgtattttgggacttgggcagaaatggtggcagaggaggctggtcagacaatggctgctctgtcaaagacaggagattgaatgaaaccatctgtacctgtagccatctaacaagcttcggcgttctgctggacctatctaggacatctgtgctgcctgctcaaatgatggctctgacgttcattacatatattggttgtgggctttcatcaatttttctgtcagtgactcttgtaacctacatagcttttgaaaagatccggagggattacccttccaaaatcctcatccagctgtgtgctgctctgcttctgctgaacctggtcttcctcctggactcgtggattgctctgtataagatgcaaggcctctgcatctcagtggctgtatttcttcattattttctcttggtctcattcacatggatgggcctagaagcattccatatgtacctggcccttgtcaaagtatttaatacttacatccgaaaatacatccttaaattctgcattgtcggttggggggtaccagctgtggttgtgaccatcatcctgactatatccccagataactatgggcttggatcctatgggaaattccccaatggttcaccggatgacttctgctggatcaacaacaatgcagtattctacattacggtggtgggatatttctgtgtgatatttttgctgaacgtcagcatgttcattgtggtcctggttcagctctgtcgaattaaaaagaagaagcaactgggagcccagcgaaaaaccagtattcaagacctcaggagtatcgctggccttacatttttactgggaataacttggggctttgccttctttgcctggggaccagttaacgtgaccttcatgtatctgtttgccatctttaataccttacaaggatttttcatattcatcttttactgtgtggccaaagaaaatgtcaggaagcaatggaggcggtatctttgttgtggaaagttacggctggctgaaaattctgactggagtaaaactgctactaatggtttaaagaagcagactgtaaaccaaggagtgtccagctcttcaaattccttacagtcaagcagtaactccactaactccaccacactgctagtgaataatgattgctcagtacacgcaagcgggaatggaaatgcttctacagagaggaatggggtctcttttagtgttcagaatggagatgtgtgccttcacgatttcactggaaaacagcacatgtttaacgagaaggaagattcctgcaatgggaaaggccgtatggctctcagaaggacttcaaagcggggaagcttacactttattgagcaaatgtgattcctttcttctaaaatcaaagcatgatgcttgacagtgtgaaatgtccaattttaccttttacacaatgtgagatgtatgaaaatcaactcattttattctcggcaacatctggagaagcataagctaattaagggcgatgattattattacaagaagaaaccaagacattacaccatggtttttagacatttctgatttggtttcttatctttcattttataagaaggttggttttaaacaatacactaagaatgactcctataaagaaaacaaaaaaaggtagtgaactttcagctaccttttaaagaggctaagttatctttgataacatcatataaagcaactgttgacttcagcctgttggtgagtttagttgtgcatgcctttgttgtatataagctaaattctagtgacccatgtgtcaaaaatcttacttctacatttttttgtatttattttctactgtgtaaatgtattcctttgtagaatcatggttgttttgtctcacgtgataattcagaaaatccttgctcgttccgcaaatcctaaagctccttttggagatgatataggatgtgaaatacagaaacctcagtgaaatcaagaaataatgatcccagccagactgagaaaatgtaagcagacagtgccacagttagctcatacagtgcctttgagcaagttaggaaaagatgcccccactgggcagacacagccctatgggctcatggtttgacaaacagagtggagagaccatattttagccccactcaccctcttgggtgcacgacctgtacagccaaacacagcatccaatatgaatacccatcccctgaccgcatccccagtagtcagattatagaatctgcaccaagatgtttagctttataccttggccacagagagggatgaactgtcatccagaccatgtgtcaggaaaattgtgaacgtagatgaggtacatacactgccgcttctcaaatccccagagcctttaggaacaggagagtagactaggattccttctcttaaaaaggtacatatatatggaaaaaaatcatattgccgttctttaaaaggcaactgcatggtacattgttgattgttatgactggtacactctggcccagccagagctataattgttttttaaatgtgtcttgaagaatgcacagtgacaaggggagtagctattgggaacagggaactgtcctacactgctattgttgctacatgtatcgagccttgattgctcctagttatatacagggtctatcttgcttcctacctacatctgcttgagcagtgcctcaagtacatccttattaggaacatttcaaaccccttttagttaagtctttcactaaggttctcttgcatatatttcaagtgaatgttggatctcagactaaccatagtaataatacacatttctgtgagtgctgacttgtctttgcaatatttcttttctgatttatttaattttcttgtatttatatgttaaaatcaaaaatgttaaaatcaatgaaataaatttgcagttaagatcttt

SEQ ID NO: 342795 - DNA, 3594 bp, Artificial Sequence
  derived and/or modified sequence
tgcacagaggttctccactttgttttctgaactcgcggtcaggatggttttctctgtcaggcagtgtggccatgttggcagaactgaagaagttttactgacgttcaagatattccttgtcatcatttgtcttcatgtcgttctggtaacatccctggaagaagatactgataattccagtttgtcaccaccacctgaggttgaaacaacaagcctcaatgatgttactttaagcttactcccttcaaacgaaacaggcgtcaaaccccagagaaatatctgcaatttgtcatctatttgcaatgactcagcattttttagaggtgagatcatgtttcaatatgataaagaaagcactgttccccagaatcaacatataacgaatggcaccttaactggagtcctgtctctaagtgaattaaaacgctcagagctcaacaaaaccctgcaaaccctaagtgagacttactttataatgtgtgctacagcagaggcccaaagcacattaaattgtacattcacaataaaactgaataatacaatgaatgcatgtgctgtaatagctgctttggaaagagtaaagattcgaccaatggaacactgctgctgttctgtcaggataccctgcccttcctccccagaagagttggaaaagcttcagtgtgacctgcaggatcccattgtctgtcttgctgaccatccacgtggcccaccattttcttccagccaatccatcccagtggtgcctcgggccactgtgctttcccaggtccccaaagctacctcttttgctgagcctccagattattcacctgtgacccacaatgttccctctccaataggggagattcaacccctttcaccccagccttcagctcccatagcttccagccctgccattgacatgcccccacagtctgaaacgatctcttcccctatgccccaaacccatgtctccggcaccccacctcctgtgaaagcctcattttcctctcccaccgtgtctgcccctgcgaatgtcaacactaccagcgcacctcctgtccagacagacatcgtcaacaccagcagtatttctgatcttgagaaccaagtgttgcagatggagaaggctctgtccttgggcagcctggagcctaacctcgcaggagaaatgatcaaccaagtcagcagactccttcattccccgcctgacatgctggcccctctggctcaaagattgctgaaagtagtggatgacattggcctacagctgaacttttcaaacacgactataagtctaacctccccttctttggctctggctgtgatcagagtgaatgccagtagtttcaacacaactacctttgtggcccaagaccctgcaaatcttcaggatgagttaacagtgagatgtgtattttgggacttgggcagaaatggtggcagaggaggctggtcagacaatggctgctctgtcaaagacaggagattgaatgaaaccatctgtacctgtagccatctaacaagcttcggcgttctgctggacctatctaggacatctgtgctgcctgctcaaatgatggctctgacgttcattacatatattggttgtgggctttcatcaatttttctgtcagtgactcttgtaacctacatagcttttgaaaagatccggagggattacccttccaaaatcctcatccagctgtgtgctgctctgcttctgctgaacctggtcttcctcctggactcgtggattgctctgtataagatgcaaggcctctgcatctcagtggctgtatttcttcattattttctcttggtctcattcacatggatgggcctagaagcattccatatgtacctggcccttgtcaaagtatttaatacttacatccgaaaatacatccttaaattctgcattgtcggttggggggtaccagctgtggttgtgaccatcatcctgactatatccccagataactatgggcttggatcctatgggaaattccccaatggttcaccggatgacttctgctggatcaacaacaatgcagtattctacattacggtggtgggatatttctgtgtgatatttttgctgaacgtcagcatgttcattgtggtcctggttcagctctgtcgaattaaaaagaagaagcaactgggagcccagcgaaaaaccagtattcaagacctcaggagtatcgctggccttacatttttactgggaataacttggggctttgccttctttgcctggggaccagttaacgtgaccttcatgtatctgtttgccatctttaataccttacaaggatttttcatattcatcttttactgtgtggccaaagaaaatgtcaggaagcaatggaggcggtatctttgttgtggaaagttacggctggctgaaaattctgactggagtaaaactgctactaatggtttaaagaagcagactgtaaaccaaggagtgtccagctcttcaaattccttacagtcaagcagtaactccactaactccaccacactgctagtgaataatgattgctcagtacacgcaagcgggaatggaaatgcttctacagagaggaatggggtctcttttagtgttcagaatggagatgtgtgccttcacgatttcactggaaaacagcacatgtttaacgagaaggaagattcctgcaatgggaaaggccgtatggctctcagaaggacttcaaagcggggaagcttacactttattgagcaaatgtgattcctttcttctaaaatcaaagcatgatgcttgacagtgtgaaatgtccaattttaccttttacacaatgtgagatgtatgaaaatcaactcattttattctcggcaacatctggagaagcataagctaattaagggcgatgattattattacaagaagaaaccaagacattacaccatggtttttagacatttctgatttggtttcttatctttcattttataagaaggttggttttaaacaatacactaagaatgactcctataaagaaaacaaaaaaaggtagtgaactttcagctaccttttaaagaggctaagttatctttgataacatcatataaagcaactgttgacttcagcctgttggtgagtttagttgtgcatgcctttgttgtatataagctaaattctagtgacccatgtgtcaaaaatcttacttctacatttttttgtatttattttctactgtgtaaatgtattcctttgtagaatcatggttgttttgtctcacgtgataattcagaaaatccttgctcgttccgcaaatcctaaagctccttttggagatgatataggatgtgaaatacagaaacctcagtgaaatcaagaaataatgatcccagccagactgagaaaatgtaagcagacagtgccacagttagctcatacagtgcctttgagcaagttaggaaaagatgcccccactgggcagacacagccctatgggctcatggtttgacaaacagagtggagagaccatattttagccccactcaccctcttgggtgcacgacctgtacagccaaacacagcatccaatatgaatacccatcccctgaccgcatccccagtag

SEQ ID NO: 342796 - DNA, 2047 bp, Artificial Sequence
  derived and/or modified sequence
gcagaggccgtggagttcaggtgtgaggggcagctgtgagctttgcagccagccccggggacgggctggacgggccaggacaggaggggacactggcatcttttccgtcccttcctgctcccacatgagacccagggcgggccagccccacccttcttgaacctgtgatcccaatggctttcctttccgatgccaggtttccttagcttccttagtgtgtctttgcgctcaccaggttcggggatcgcctctagcttcccaggacaaccagccacggatcctgtgggcaggagggctgccaaggcccagttggaggctcaatttatggcggcctgggggaagaagcatgcaggaaaggatccagtccgtgatgaatgtgaggaaagaaaccgttttacagaaacaagggaggaagatgtaactgatgagcatggggaaagagaaccttttgctgaaacagatgaacacacgggggctaataccaagaagccagaagatactgcagttggtgcaaataatttcaaaaactatcctgtacatattggcgtctctagtgaacaacatattttacttgattgttctctaagtaggcagaaacgtgattatatacattctctgaagttgctaaatgtccttgaagaatacatcacagacgagcagaaagaggaagaagaagaagagggagaagaggaagaactaattagaatatttcaagaacaacagaagaagtggcaacaatatagaagtgttaggagagagaggctgaaagagatgaagctgctacgtgaccaattcgtaaaggctcttgaggactttgaagacctttgtgacagagttttttccgatgaagacagtgaacttgataactagacatgtttttaaataaaatcatgtcagaactcttttggaaaagttggcacttacccagttgtctcttcaacctctgttattctgatgactgaagaaagaacttgaacctatgttatatgatacaagcacaacttgagctacagtaaactacatgacagtgttttgataattgttgtataaatcggtatagctcctctgtcactcgtctgttaaatgccagacctcgtttctatgatctgttgaatgaatcctagacacttctgtgagaaagcagggattgcatagttatgtacacggtcaattaaattttaacattaaagataatttagatttcgatttggcctctgtggatttgtatcagttccaaaaatgtagaaagcacaggcatagaaaagtacatttttctctaataaaagaagacaatatctgctgggtgtggtggctcacgcctgtaatcccagcactttgggaggccgaggggagtggatcacttgaggtcaggagtttgagaccagcctggccaacatggtgaaaccccatctctgctaaaaataccaaaattacccgggcgtggtggcacgcacgtgtagttccagctactcaggaagctgaggcaggaggatctcttgaacccgggagttggaggttgcagtaagccaagattgtgccactgcactccagcctgggcgacagagcaagactctttctcagaaaacaagaagaagaagacaaaagctatcttatctgtgcgttcttttgtatttactcattaggataaagaggcaattccaatgaaagtaggacttcaaaaaatagatatactctatggccatatcaaaattattaaaagcaccttactgtctgtgttcttaaaaaaaattatactgctgtaaatgattaaggcaactgagcaagatatattaatatcagtgctgagccactggtttgtgggtatgtcatttccacagacatcaaaatgctatttagtttgttttggtccatcattcaatgatacctccccttagaattgaatgaaagcattttgttaacatttatgtatgcttacaattatttcacatctgtggcaaggtaaattttgtagagtgctttgtttatccagtttaatattcgtggattatgtggaagtttatatggacatctaaaaacttgaatgatg

SEQ ID NO: 342797 - DNA, 681 bp, Artificial Sequence
  derived and/or modified sequence
atgcctgggttcctgtcattcttgagcgtcagtcttagatcaccggggagtggtatagctagttcatttcccggccagccggctaccgatcctgtcggacgcagggctgcaaaagcccaactcgaggcgcagttcatggctgcttggggaaagaagcatgcaggcaaggacccagtgagggacgagtgcgaggaacggaacagattcacagaaaccagagaggaagacgtgacagacgagcatggggagagagagccatttgcagagaccgacgagcacacgggcgccaataccaaaaagcctgaagacaccgccgtaggggccaacaacttcaagaattatccagtgcacatcggggtgagttctgagcagcatattctgttggactgctctctgagcagacaaaaaagggattatattcattccctcaaattgctgaatgtcctggaggaatatattactgacgagcaaaaagaggaagaggaggaggaaggagaagaagaggagcttattagaatctttcaggagcagcagaaaaaatggcagcagtacagaagtgtgcggcgtgagcggctgaaagagatgaagttgctgcgagatcagttcgttaaggcccttgaggattttgaggacctatgcgatcgcgttttcagcgatgaggacagcgaactcgataattag

SEQ ID NO: 342798 - DNA, 681 bp, Artificial Sequence
  derived and/or modified sequence
atgcctggcttcctgtccttcctgtctgtgtccctgcggagccctggcagcggcatcgccagcagcttccctggccagcctgccacagatcctgtgggccggcgggccgccaaggcccagctggaggcccagttcatggccgcctggggcaagaagcacgccggcaaggaccctgtgagagatgaatgtgaggagaggaaccgcttcacagagacccgggaggaggatgtgacagatgaacatggagagcgggagccctttgctgagacagatgagcacactggagccaacaccaagaagccagaggacacagctgtgggcgccaacaacttcaagaactaccctgtgcacatcggcgtgagcagcgagcagcacatcctgctggactgcagcctgagccggcagaagagggactacatccacagcctgaagctgctgaatgtgctggaggagtacatcacagatgagcagaaggaggaggaggaggaggagggggaggaggaggagctgatccgcatcttccaggagcagcagaagaagtggcagcagtacagatctgtgcggcgggagcggctgaaggagatgaagctgctgcgggaccagtttgtgaaggccctggaggactttgaggacctgtgtgacagagtcttcagtgatgaggacagcgagctggacaactag

SEQ ID NO: 342799 - DNA, 681 bp, Artificial Sequence
  derived and/or modified sequence
atgcccggcttcctgagcttcctgagcgtgagcctgcggagccccgggtccggcatcgcatcatcatttccgggtcagccagccaccgatcctgttggtcggcgggccgctaaagctcagttagaggcccagttcatggccgcttggggtaagaagcacgccgggaaggatcccgtgcgtgacgaatgcgaggagcggaatcggttcacggaaacacgggaggaggatgtgacagacgagcatggtgaacgggagccatttgctgagacagatgagcacaccggcgcaaacacaaagaagccagaggacactgccgtgggtgccaataactttaaaaactacccggtacacatcggcgtgagttctgagcaacacattttattggattgctctctcagcagacagaagagagactacatccatagcttaaaactcctgaacgtcctggaggaatatataaccgacgagcagaaagaggaagaagaggaagagggagaagaggaggagctcattagaatattccaagagcagcagaagaagtggcaacagtaccgcagcgtgcggcgagaacggctaaaggagatgaagctgcttcgggaccagttcgtgaaggcccttgaggattttgaagacctgtgtgaccgggtcttcagtgacgaagacagcgaactggataactag

SEQ ID NO: 342800 - DNA, 681 bp, Artificial Sequence
  derived and/or modified sequence
atgccgggtttcctcagtttcctgtcagtctctctccgatcccccggatccggaatagccagtagctttcccggtcaacctgctaccgatccggttggtcgccgagcggctaaagcacagctggaggcgcagtttatggccgcatggggaaaaaaacacgccggtaaagatcctgtgagagatgaatgtgaggagcgcaaccgcttcaccgagactcgggaggaggatgtgactgacgagcacggtgagagggagcctttcgctgagaccgatgagcacaccggggctaacaccaagaaacccgaggatacagctgtgggggctaacaatttcaagaattaccccgtacacatcggggtgagttccgagcagcatatcctgctggactgttctctttcacggcagaaacgcgattacatccattctctgaaactcctgaatgtcctcgaggagtacattactgatgagcagaaggaggaggaggaggaggagggcgaggaggaggagttgatcaggatattccaggaacaacagaagaaatggcagcagtaccgctccgtgagaagagagcggctgaaggaaatgaagttactgcgagatcagtttgtgaaggcactggaggatttcgaggatctctgtgatagagttttttccgatgaagatagtgaactcgacaattag

SEQ ID NO: 342801 - DNA, 681 bp, Artificial Sequence
  derived and/or modified sequence
atgcccggcttcctgagcttcctgagcgtgagcctgagaagccccggcagcggcatcgccagcagcttccccggccagcccgccaccgaccccgtgggcagaagagccgccaaggcccagctggaggcccagttcatggccgcctggggcaagaagcacgccggcaaggaccccgtgagagacgagtgcgaggagagaaacagattcaccgagaccagagaggaggacgtgaccgacgagcacggcgagagagagcccttcgccgagaccgacgagcacaccggcgccaacaccaagaagcccgaggacaccgccgtgggcgccaacaacttcaagaactaccccgtgcacatcggcgtgagcagcgagcagcacatcctgctggactgcagcctgagcagacagaagagagactacatccacagcctgaagctgctgaacgtgctggaggagtacatcaccgacgagcagaaggaggaggaggaggaggagggcgaggaggaggagctgatcagaatcttccaggagcagcagaagaagtggcagcagtacagaagcgtgagaagagagagactgaaggagatgaagctgctgagagaccagttcgtgaaggccctggaggacttcgaggacctgtgcgacagagtgttcagcgacgaggacagcgagctggacaactag

SEQ ID NO: 342802 - DNA, 3591 bp, Artificial Sequence
  derived and/or modified sequence
atgctgtggtgggaggaggttgaggattgctacgagagagaggacgtgcagaagaagacattcactaagtgggtgaatgcccagtttagcaagttcggtaagcagcacatagaaaacctgttttcagacctgcaagacggtaggaggctgctggacttgttagaaggcctgactggacagaagctgccaaaagaaaagggaagcacccgagttcatgcgctcaacaacgtgaataaagcgctgcgagtgctgcagaacaataatgttgatctagtgaatataggctccactgatatagtggacggcaaccacaagctgaccctcggacttatctggaatattatcctgcattggcaagtgaaaaacgtgatgaagaatataatggccggtctccagcagacaaactcagagaagatcctgttgtcctgggtgagacagtccacccgaaattacccacaagtgaatgtcattaactttactacaagctggtcagatggactcgcactcaacgcactgattcactctcatcgacctgacctgtttgattggaatagcgtggtgtgtcagcagagtgcaactcaacggctggagcatgcattcaatatagcaagataccaattgggaatcgagaaactgttggatcctgaagacgttgacacaacctacccagataaaaagtctatcctgatgtacatcaccagtctcttccaagttctgccccaacaggtcagcatcgaagctattcaggaggtggaaatgctgccacggcccccaaaggtgaccaaagaagaacattttcagttacaccaccagatgcactactctcagcagattactgtgtctctagctcagggatacgagagaaccagctcaccgaagccccgattcaagagctacgcctacacccaggctgcttatgtgaccacaagtgacccgactagaagcccattcccctcacagcacctggaagctccagaggataagtcctttggttcttccctcatggaatccgaagtcaatctcgaccgataccagaccgccctggaggaagtgttgtcttggctactgtcagcggaggacacgctacaggcacagggcgagatttcaaacgacgttgaagtggtgaaggaccagttccacacacacgaaggatacatgatggatttgactgctcaccaggggagggtaggaaatatcttgcaactaggaagcaaactgattggaaccgggaaacttagtgaagatgaggagactgaagtgcaagaacaaatgaatttgctgaattcgcgatgggaatgtttaagagtagcaagcatggaaaagcagagtaatctgcacagagtcttgatggacctgcagaaccagaaactgaaggaactgaacgattggctgactaaaactgaggagcgaacacgtaagatggaggaagaaccacttggtcccgatttagaagatctcaagaggcaggtgcagcagcacaaagtcctgcaggaagatctagagcaagaacaggtacgtgtgaactcattgacccacatggttgtcgtcgtcgacgagagtagtggcgaccatgccaccgctgccctcgaagaacaattgaaggtgttgggggaccgttgggctaatatttgccgatggactgaagacagatgggtgctgttgcaggatatattgctgaagtggcaaagacttaccgaagaacagtgcctctttagcgcttggctctcggagaaagaagacgccgtcaacaaaatccataccaccggatttaaggatcagaacgagatgctctcatctctccagaagctcgctgtactgaaggctgatctggaaaaaaagaagcagtctatgggtaagctgtacagtctgaagcaggatttgctttctaccctaaagaataaatcagttactcagaagactgaggcgtggctcgacaatttcgcacgttgttgggacaatctggtgcagaaattagagaagtcgacagcccagatatcccaagccgtgaccacaacccagccgtccctgacacagaccacagtcatggaaactgttacaactgtgactacccgagaacagatcctcgtcaagcatgctcaggaagaacttcccccacctcctccccaaaaaaagcggcaaattaccgtggatacgctcgagcgactccaggagctgcaggaagctaccgacgagttggaccttaaactcagacaagcagaagtcatcaaaggcagctggcaaccagttggcgacttgttgattgattccctacaagatcatctggaaaaagttaaggcgctgaggggggagattgcaccacttaaagagaacgtgtctcatgtgaatgatctggccagacagcttacaaccttggggatccaactcagtccctacaatttgtctacactcgaagacctcaatactcgatggaagttacttcaagtcgcggtggaggatcgagttagacagttacacgaggcacatcgggacttcggccccgcctctcagcatttcctttcaacctccgtgcaggggccctgggagagggcaatctcccctaacaaggtgccctactacatcaaccacgaaacacagaccacctgctgggatcacccaaaaatgacagagctgtaccagagtttggctgatctgaacaacgtccgtttcagcgcgtataggactgccatgaaactgcgcagattacagaaggcactgtgtctcgatcttttgtctctgagcgccgcatgcgacgccctggaccagcataacctgaaacagaatgatcagcctatggatatcctccagatcattaactgtcttacaacgatctacgaccgcttggagcaagaacacaataacctagtgaatgtaccactctgcgtggatatgtgtctgaactggttactcaatgtctacgacacaggacgaaccggaaggattcgggttctctcgtttaagactgggataataagtctttgtaaggcccacctggaggacaagtacagatatcttttcaaacaggtcgcgtcgtctaccgggttttgtgatcagcgcaggctgggactgctgcttcatgattcaatacagatcccgagacagctcggggaagtggccagttttggaggcagtaacattgagcccagcgtgagatcttgcttccaatttgctaacaacaagcctgagattgaggccgctctgtttctcgactggatgaggctggaaccgcagagcatggtatggttaccagtgttgcatagggtggcagctgcagagaccgccaagcatcaagctaagtgcaatatctgcaaggagtgcccaatcattggattccgataccggtctctgaagcactttaattatgacatctgtcagtcatgtttcttcagcggtcgcgtggctaaaggccacaagatgcactatcccatggtggaatactgtacccctaccacgagtggcgaggacgtgcgagactttgctaaagtcctgaagaataaattcagaaccaagaggtatttcgcaaaacacccgagaatggggtacttgccagtgcagactgttctagaaggtgacaacatggaaactgataccatg

SEQ ID NO: 342803 - DNA, 3591 bp, Artificial Sequence
  derived and/or modified sequence
atgttatggtgggaagaagtggaagactgttatgaaagagaagatgttcaaaagaaaacttttaccaaatgggtaaatgcacaattttcaaaatttggtaaacaacatattgaaaatttattttctgatcttcaagatggtagacgattattagatttattagaaggtttgacaggacaaaaacttccaaaagaaaaaggttctacaagagttcatgctttaaataatgttaataaggcattaagagtcctacaaaataataatgtcgatttagttaatattggatccactgatattgttgatggtaatcataaattaacattaggacttatctggaatattatattacattggcaagtaaaaaatgttatgaaaaatattatggcaggattacaacaaacaaattcagaaaaaattttacttagttgggtgagacaatcaacacgtaattatcctcaagtgaacgttattaattttacaacatcttggagtgatggattggctcttaatgcattaattcattctcatagaccagatttatttgattggaactcagttgtttgtcaacaatcagctacacaaagattagaacatgcattcaatattgcaagatatcaattaggtatcgaaaaattattagacccagaggatgttgatacaacttatccagataagaaatcaattcttatgtatattacaagtttatttcaagtacttccacaacaagtaagtatagaagcaatacaagaagtcgaaatgttgccaaggccacctaaagttacaaaagaagaacattttcaattacatcatcaaatgcattattcacaacaaattactgtttctttagcacaaggatatgaaagaacatcttcacctaaaccacgattcaagagttatgcttatactcaagctgcttatgttacaacttcagatccaacaagaagtccattcccttcacaacatttagaagcacctgaagacaagtcttttggatcatctttaatggaatctgaagttaacttagatagatatcaaacggctttagaagaggtgctttcatggcttcttagtgccgaagatactcttcaagcacaaggtgaaatcagtaatgatgttgaagttgttaaagatcaatttcatactcacgaaggatatatgatggatttaactgctcatcaaggacgtgttggtaatatattacaacttggatcaaaacttataggaacaggaaaacttagcgaagatgaagaaactgaagttcaagaacaaatgaatcttcttaattcaagatgggaatgtttaagagtcgcttcaatggaaaaacaatctaatcttcacagagtattaatggatctacaaaatcaaaaacttaaagaattaaacgactggttaactaaaactgaagaacgtactagaaaaatggaagaagaaccattaggtcctgatttagaagatttaaaaagacaagttcaacaacataaagttcttcaagaagatcttgaacaagaacaagttagagtaaattctttaacacatatggttgttgttgtagatgaatcatcaggggatcacgctactgctgcacttgaagaacaattaaaagttttaggagacagatgggcaaacatttgtcgatggacagaagacagatgggttttgttgcaagatatacttttaaaatggcaacgactcactgaagaacaatgtcttttttcagcttggttatcagaaaaagaagatgctgttaataaaattcatacaactggttttaaagatcaaaatgaaatgttaagtagtttacaaaaattagcagttttaaaggctgatttggaaaaaaaaaaacaatctatgggaaaattatatagtcttaagcaagatttgttaagtactcttaagaataaatcagttacacagaaaactgaagcttggcttgacaattttgcaagatgttgggataatttagtacaaaaattagaaaaatctactgcacaaatttcgcaagcagtaacaacaacacaaccatcacttactcaaaccactgttatggaaactgtaacaactgttacaacaagagaacaaattttagttaaacatgctcaagaagaattaccacctccacctccacaaaaaaaaagacaaataactgttgatacattagagagattacaagaacttcaagaagccacagatgaacttgatcttaaattgagacaagctgaagttataaaaggaagttggcaaccagttggagatcttttaattgattcattacaagatcatcttgaaaaggtaaaagcattaagaggagaaattgcccctttaaaagaaaatgtatcacatgtaaatgatcttgcaagacaacttactactttaggaatacaattaagtccttataatttatcaaccttagaagatttaaacactagatggaaacttttacaagttgctgttgaagacagagttagacaactccatgaggcacatcgagattttggaccagcatctcaacattttcttagtacatcagttcaaggaccatgggaaagagctatttctccaaataaagttccatattatattaatcatgagacacaaacaacttgttgggaccatccaaagatgactgaactttatcaatcattagcagaccttaataatgttagattttctgcttatagaacagccatgaagttacgtagattacaaaaagctttatgtttggatcttttatcattatctgcagcatgtgatgcattagatcaacataatttaaaacaaaatgatcagccaatggatatacttcaaattattaattgccttacaacaatttatgacagacttgaacaagaacacaataatttagtaaatgtccctctttgtgttgatatgtgtttaaattggcttttgaatgtatatgatacaggaagaacaggtagaattcgtgttttgtctttcaaaactggaattataagtttatgcaaggctcacttagaagataaatatagatatttattcaaacaagtagcttcttcaactggattttgtgatcaaagaagacttggattacttttacatgactctattcaaattccaagacaattgggagaagtggcaagtttcggtggatctaatatcgaaccttctgtaagatcttgctttcaattcgctaataataagccagaaatcgaagcagcattatttcttgattggatgcgattagaaccacaatcaatggtttggcttccagttttacatagagttgctgcagctgaaacagctaaacaccaagctaagtgtaatatttgtaaagaatgtccaattattggattcagatatagaagtttaaaacattttaattatgacatatgtcaatcttgtttcttttcaggtagagttgcaaaaggacataaaatgcattatccaatggtagaatattgtactccaacaactagtggagaagatgtaagagattttgctaaagttcttaaaaataagttcagaactaagagatactttgctaaacatccaagaatggggtaccttccagttcaaacagtattagaaggagataatatggagacagatacaatg

SEQ ID NO: 342804 - DNA, 3591 bp, Artificial Sequence
  derived and/or modified sequence
atgctgtggtgggaagaagttgaggactgttacgaaagagaggacgtgcaaaagaaaactttcaccaagtgggtgaacgcgcaattctcaaagttcggcaagcagcatatcgaaaatctcttttccgaccttcaagatggacgcaggctgctggatctcctcgaaggactcaccggccagaaactccccaaagaaaaggggtccacgagagtgcacgcactcaacaacgtgaataaggcactccgcgtcctgcagaacaataacgtggatctggtgaatatcggatcgaccgacatcgtggacggcaaccataaactcaccctgggactgatatggaatatcatccttcactggcaggttaagaacgtgatgaagaacatcatggctggactgcaacagaccaactcagagaaaatcctgctttcgtgggtcaggcagagcacccgcaattacccgcaggtgaacgtgatcaatttcacgacctcgtggagcgacggtctggccctcaacgcgctgatccacagccatcggcccgatctgtttgactggaactcagtggtgtgtcagcagtcagctacccagcggctcgagcacgcgtttaacatcgcgcggtatcagctgggaatcgaaaagctccttgaccctgaggatgtggatactacttaccccgacaagaagtcaatcctgatgtacattaccagcctgtttcaggtgctccctcagcaggtcagcatcgaggccatccaggaagtggaaatgcttcctcggccgccgaaagtgaccaaagaagagcactttcagttgcatcaccaaatgcactactcgcaacagatcaccgtgtcgctggcgcaaggatacgaacgaacctcctcaccgaagccgcggttcaagtcgtatgcctacacccaggccgcctacgtgacgacctccgatccaacccgctccccgttcccatcccaacacctggaagccccggaggacaaatcattcggctcgtccctgatggagtcggaggtgaatctcgatcggtaccaaaccgccctggaagaggtgttgtcgtggctgctgagcgcggaggatactttgcaggctcaaggtgaaatctccaacgacgtggaagtcgtgaaggaccagttccacacccacgagggctacatgatggacctgactgctcatcagggccgcgttggaaatattttgcagctgggctccaagctgatcggcacgggaaaattgtccgaggatgaggagactgaagtgcaggagcagatgaacctgctgaattcacgatgggaatgcctgagagtcgcctcgatggagaaacaatcgaacttgcatcgcgtgctgatggatctgcagaaccaaaagctgaaggaacttaatgactggctcaccaaaaccgaggagagaacccgtaaaatggaggaggaaccgctcggaccggacctcgaagatctgaagcgccaggtacagcaacacaaggtgctgcaagaggacctggaacaagagcaggtccgcgtcaacagcctgactcacatggtcgtcgtcgtggacgagtcaagcggggatcatgccaccgccgctttggaggaacagcttaaggtcctgggcgatcggtgggctaacatctgccggtggactgaggaccgttgggtgctgttgcaggacatccttctcaagtggcaacgcctcaccgaggagcaatgccttttctcagcatggctctccgaaaaggaggatgcggtgaacaagattcacactactggattcaaagaccagaacgaaatgctgagctccctgcagaagctcgcagtgcttaaggccgacctggagaagaaaaagcagagcatgggaaagttgtacagcctgaagcaagacctgctgtcgaccctgaagaacaagtcggtgacgcaaaagactgaggcttggctcgacaacttcgcaagatgctgggacaatctcgtgcaaaaacttgaaaaaagcaccgcccagatttcgcaggcagtcactactactcagccttcgctgactcagaccactgtgatggaaacggtgactaccgtcaccactcgggaacagatcctggtgaagcatgctcaagaggaactcccgccccctccaccccaaaagaagcgccaaatcactgtggacacccttgagcgcctgcaggaactgcaggaagccactgatgaactggatctgaaattgcgccaggccgaagtgattaagggaagctggcaaccggtgggagatctgctgatcgattccctccaggaccacctcgaaaaggtgaaggcccttcgcggcgaaattgctccgttgaaggaaaatgtgagccatgtcaatgacttggcaaggcagctgaccaccctcggtatccagctgtctccgtacaatctctcgacgctggaggacctgaacactcggtggaagctgctccaggtggcggtcgaagatagagtccgccagctgcacgaggctcacagggatttcgggcctgccagtcaacattttttgtccacttcagtgcaaggaccgtgggaaagagccattagtccgaacaaggtgccatactacattaatcatgaaactcaaaccacttgctgggaccacccgaagatgacggaactgtaccaatctctggcggacctcaataacgtcagattctcagcctaccgcactgccatgaagctccgcagactgcaaaaggcgctgtgtctcgatttgttgtccctgtccgccgcatgcgacgcactcgaccagcataatttgaaacagaatgaccaaccaatggacatcctccagatcatcaactgccttaccactatctacgaccggctggaacaggagcacaacaacctggtgaatgttccactctgcgtggacatgtgcctgaattggctgctcaacgtctacgacactgggaggacgggacggatcagggttctgtctttcaagaccggaatcatctccctgtgcaaagcccatctcgaggataaatacagatacctttttaagcaggtggcctcgtcgaccggattctgcgaccagaggagattgggactccttctgcatgattcgatccaaattccacggcagctcggcgaggtcgcgagcttcggtgggagcaacatcgaaccgtccgtccgctcctgcttccaatttgcgaacaacaaaccagaaattgaagccgccctgttcctcgactggatgcgactggaaccacagtcgatggtctggctgcctgtgctgcaccgggtggcggcggctgaaaccgccaagcaccaggcaaagtgtaacatctgtaaagaatgcccaatcatcggattccgctaccggagcctcaagcacttcaactacgacatctgccagtcgtgtttcttttccgggcgggtggcgaaggggcacaagatgcactaccctatggtcgagtattgcactcccaccacttcaggtgaagatgtccgcgatttcgcaaaggtgctcaagaataagttcagaactaaacggtacttcgcaaaacatccacgcatgggatacctgccggtgcaaaccgtcctggaaggtgataacatggaaaccgacactatg

SEQ ID NO: 342805 - DNA, 3591 bp, Artificial Sequence
  derived and/or modified sequence
atgctctggtgggaagaagtggaagattgttatgaaagagaggacgttcagaaaaagacctttactaaatgggtgaacgcacagttctcaaagtttggaaagcaacatattgaaaatcttttcagcgacttgcaggacggacggcgattgcttgatcttctggaaggactgaccggtcaaaaacttccaaaggaaaagggttcgactagagttcatgccctgaacaatgttaacaaggcactccgtgtcttgcaaaacaataacgtggatctggtgaacattggatccaccgatatcgtggatggaaatcacaagctgactctgggacttatctggaacattatccttcattggcaagtgaaaaatgtcatgaagaatatcatggcaggccttcaacaaacgaactcggagaagattctgctgagctgggtgcgtcagtccactaggaactaccctcaggtgaacgtcattaactttactacctcctggtccgacggccttgcacttaacgctctcattcattcacacagacccgatctgtttgattggaacagcgtcgtgtgtcaacagtcggcaacccagagactggagcatgcattcaacattgcacggtaccagctgggcattgagaaacttctcgaccctgaggacgtggatactacctaccctgacaagaaatccatccttatgtacatcacctcgttgttccaggtgctccctcagcaggtgtccatcgaggccatccaagaagtggaaatgctgcctaggcctcccaaggtcaccaaagaggagcatttccagcttcatcatcagatgcattactctcagcagataaccgtgtcactggcacaaggttacgaacgcaccagctcaccaaagcctcggttcaagtcctacgcttacactcaagcagcatacgtgactactagcgatccgacccgctccccttttccaagccagcatctggaagcaccagaagataagtcctttggatcctccctcatggagagcgaagtgaatcttgatagataccaaacggcactggaagaagtgctttcctggctgctttctgctgaggacactctgcaggcgcaaggtgagatttcaaatgatgtcgaagtggtgaaggaccaatttcatacgcacgagggatacatgatggatctgactgcgcatcaaggaagagtggggaacatcctccagctgggatccaagttgattgggaccggtaaattgtccgaagatgaagaaactgaagtccaagaacagatgaaccttcttaactcacgatgggaatgcctcagagtggcatccatggagaagcagtccaacctgcaccgcgtgctgatggatctgcagaaccagaagctgaaagaactgaacgactggctgaccaaaaccgaggagcgcacgcggaaaatggaagaggaacctttgggccctgatctggaagatctgaagcgccaagtgcaacagcataaggtgctgcaagaagatctggaacaggaacaagtgcgagtgaattcgctgacccatatggttgttgtcgtggatgaatcgtcgggagatcacgcaactgcagcgctcgaggaacagcttaaggtgctgggggatagatgggcaaatatctgtcggtggaccgaagatcgctgggtgctgcttcaagatatcctccttaagtggcaaagacttaccgaagagcaatgcctcttctccgcatggctttccgagaaggaggatgcagtcaataagatccatacgaccggtttcaaagaccaaaatgaaatgctttcgagccttcaaaaactggcagtcctgaaagccgatctggaaaagaaaaagcagtccatggggaaactttacagccttaagcaggatctgttgtcgactctcaagaacaagtctgtgacccaaaagacggaagcatggctggacaactttgcaaggtgttgggataaccttgtccaaaaacttgaaaagtcaaccgcacagatttcccaagcagttaccaccactcaaccaagccttacgcagaccacggtcatggaaaccgtcactactgtcactactagagagcagattttggtgaaacacgcacaagaagagcttccaccaccccctcctcagaaaaaacgtcaaatcactgtcgatactctggaacgccttcaagagcttcaagaggctactgacgaacttgatctcaagctcaggcaggcagaggtgatcaagggttcatggcaacctgtgggtgaccttcttattgattctcttcaagatcatctggaaaaggtgaaagccctgcggggggagatcgcaccgctgaaggaaaatgtgtcacatgtgaacgaccttgcccgccaactcaccactctcgggattcagcttagcccgtacaatctgtcgactctggaggaccttaacactaggtggaagctcctccaggtcgcagtggaggatcgcgtgaggcagcttcatgaggcacaccgcgattttggtccggccagccaacactttctcagcacctcagtgcaaggcccctgggaaagggcgatttcacctaataaggtgccctattacattaatcatgagacgcagactacctgttgggatcatcctaagatgaccgaactctaccaatccctggcggatctgaacaatgtgcgcttttcagcctaccgtacggccatgaaactgcggaggcttcagaaggcactgtgtctggacttgctgtcgctttccgccgcgtgcgatgcgcttgatcagcacaaccttaagcagaacgaccaacctatggacattctgcaaatcattaactgccttaccactatttacgatcgcttggagcaggagcacaacaacctggtgaacgttccactttgtgtcgacatgtgtctgaactggctcctgaacgtctacgatactggccgaactggaaggattcgggtgctctcgtttaagactggaatcatcagcctgtgtaaagcacatcttgaagataagtatcgctatctctttaaacaagtggcaagcagcactggcttctgtgatcaaagacgacttggactcctcctccacgactcaatccaaattcctcgccagcttggagaagtggcatcgtttggaggttccaacattgaaccttcggtgaggtcgtgctttcagtttgccaacaacaagccagaaatcgaagccgcccttttcctggattggatgcgactggagcctcagtcgatggtgtggcttcccgtgcttcatagagtggcagcagcagaaaccgctaagcaccaagccaagtgtaacatttgcaaggaatgtcctattatcgggtttcgttacaggtcgcttaagcatttcaactacgatatttgtcagtcgtgtttcttcagcggtagagtggcaaagggacacaagatgcattaccctatggtggaatactgcaccccaactacctccggagaagatgtgcgagattttgcaaaggtgcttaagaataagtttcgcaccaagcgctactttgcgaagcatcctcggatgggataccttcccgtccaaaccgtcctggagggagataacatggagactgataccatg

SEQ ID NO: 342806 - DNA, 3591 bp, Artificial Sequence
  derived and/or modified sequence
atgctgtggtgggaagaagtggaggattgttatgagcgggaggacgtgcagaagaaaaccttcaccaaatgggtgaatgctcagttctcgaaattcggcaaacaacacattgaaaacttgttttccgatctgcaggatggtcgcaggcttctggatctgcttgagggactcaccggacagaagctgcctaaggaaaaaggaagcacccgcgtgcatgccctcaataacgtcaataaggcattgcgggtccttcagaataacaacgtggatctggtcaacattgggtccaccgatatagtggacggaaaccataagttgaccctcggactcatttggaatatcatcctgcattggcaagtcaagaacgtgatgaagaacattatggcaggactgcagcaaactaactccgagaaaatcttgctttcctgggtgagacagtccaccaggaactacccacaggtcaatgtcatcaatttcactacctcctggtccgatggtctggcactgaatgccctcattcactcccatcgacctgacctttttgattggaattcggtggtttgtcaacaatcggcaactcaaagacttgaacatgcgttcaacattgcacgataccagctggggatcgaaaagctgcttgatccagaggacgtggatactacttaccccgacaagaagagcatacttatgtacatcacgtccctgtttcaggtgctccctcaacaagttagcattgaagccattcaggaggtggagatgttgcctcgcccgccaaaggtcaccaaggaggagcattttcagcttcatcatcaaatgcactactcccagcagatcaccgtctcgctggctcaaggatacgagagaacgtcgtccccgaagccaagatttaagtcatacgcctacacgcaagcagcctacgtgaccacctcggaccccactcgctccccatttccaagccagcacctggaagcacccgaggacaagagtttcgggtcgtccctgatggaatcggaagtcaacctggatagataccagactgcactggaagaagtccttagttggttgctctccgcggaggacactcttcaggcgcaaggagaaattagcaacgacgtggaagttgtgaaggatcaatttcacacccacgagggttacatgatggaccttaccgcacatcaaggtcgcgtgggaaacattctccagctgggatcaaagctcattgggactggaaagttgtcagaggacgaagaaaccgaagtccaagaacaaatgaacctgctgaactcgagatgggaatgtcttagagtcgcgtcgatggagaagcagtccaaccttcacagagtgcttatggacctccagaaccaaaaactcaaagaactcaatgattggctgactaagactgaagaacggacccgtaagatggaagaagaaccgttgggcccagatctggaggatctgaaacggcaagttcagcagcacaaggtgcttcaggaggacctcgaacaagaacaagtgagagtcaacagtctgacccacatggtagtggtggtcgatgagtcatcaggtgatcacgccaccgctgcacttgaggaacagctcaaggtgctcggagataggtgggcaaacatctgtcgatggaccgaggatcggtgggtgcttctccaagatattcttctgaagtggcaacggttgactgaagaacaatgtctcttttcggcttggctgtcagaaaaggaggatgcagtcaataagatacataccactgggttcaaagatcaaaatgagatgctgagcagcttgcagaagctggcagtcctgaaggcagatctcgagaagaagaagcagtcgatgggtaagttgtattctctgaagcaagacttgttgtctactctgaaaaacaaaagcgtcacgcaaaaaactgaagcatggttggacaactttgcaagatgctgggacaacctcgtgcagaaattggaaaaaagcactgcacaaatttcacaagccgtgaccactacgcagccatctctgactcaaactaccgtgatggaaaccgtcactacggtcactactagagagcaaattcttgtgaaacacgcacaggaagaactgccacctcctccccctcaaaagaaaaggcaaattaccgtggacacgcttgaacgactgcaagaactgcaggaagcgacggatgagcttgacctgaaactgcgacaagccgaagtgattaagggctcatggcaaccagtcggggatctgctgattgacagccttcaagatcatttggagaaggtaaaggcgctgagaggggagatcgcccccctgaaggaaaacgtgtcgcacgtaaatgatcttgcacggcaactcactaccctcgggatacaactttcgccttacaacctttcgacgctggaagatctcaacaccagatggaagctgctgcaggtggcagtggaggatcgtgttaggcagctccatgaggcgcatcgtgattttggaccagcatcgcagcatttcttgagcaccagcgtgcagggcccttgggaaagggcaatttctcccaataaagtcccctactacattaatcatgaaacccaaaccacttgttgggatcacccaaagatgacggaactctaccagagcttggctgatctgaataacgttcgtttttccgcataccgaaccgccatgaagttgcgccgtctccaaaaggctctttgcctggacttgcttagcctttccgcggcatgcgacgcattggaccaacacaatcttaaacaaaacgaccaacctatggatatccttcaaatcatcaactgtctgacgactatttacgaccggctcgaacaagagcataacaacctggtgaatgtgcctttgtgtgtggatatgtgcttgaattggttgctgaatgtgtacgataccggcaggaccggaaggattcgcgtgctttcctttaagactggtataatcagcctgtgcaaagcacatcttgaggacaagtaccggtaccttttcaagcaggttgcttcaagcaccggcttttgtgaccaacgacgcctcggacttcttcttcatgactcgatacaaatccccagacagctgggtgaggtggcatccttcgggggttccaacatagagccgtcagtgcgttcgtgtttccagtttgccaataacaagccagaaatcgaagctgccctttttctggattggatgcgcttggaacctcaatcgatggtgtggcttccggtcttgcatcgtgtggccgcggccgaaactgcaaagcatcaagcaaaatgtaatatctgtaaagaatgtcctatcattggattcagatacaggagccttaagcactttaactacgatatttgccagagctgcttcttttccggaagggtcgcaaaaggtcataagatgcattatcctatggtggagtactgcacccctactacttccggcgaagatgtcagagattttgcaaaggttctcaagaacaagtttagaaccaagcggtactttgcaaagcatccccgaatgggctaccttcctgtgcagaccgtcctcgaaggcgataacatggaaactgataccatg

SEQ ID NO: 342807 - DNA, 3591 bp, Artificial Sequence
  derived and/or modified sequence
atgctgtggtgggaggaggtggaagactgctacgagcgcgaagatgtacagaagaagacattcactaagtgggttaacgcacagttttcaaagtttggcaagcagcatattgagaaccttttcagtgatctgcaagacggaagaaggcttctggatttgttagagggtctcacaggccagaagctccctaaggaaaaggggagcaccagggttcacgccctcaataatgttaacaaggccctccgtgtcttacagaataacaatgtggatttagtgaacatcggctccactgacatagtcgatggcaaccataaattgacattgggattgatctggaacatcatcttgcattggcaggttaagaatgttatgaagaatataatggcaggattgcagcagactaattcagaaaaaattctgctctcgtgggtacgacagtccacgagaaactatcctcaagttaacgtgatcaatttcactactagctggtccgatggtctggccctgaatgccctgatccattcccaccgacccgacctcttcgattggaactctgtggtgtgccaacagtccgcaacacaacgtctggaacatgcttttaatatcgcaagataccagttgggtatcgaaaagttgctcgatcccgaagacgtagataccacttacccggacaaaaagtctatactcatgtacatcaccagtctcttccaggtcctgccccagcaggtatctattgaagccatccaagaggtggaaatgctgccaagaccccccaaggtgacaaaagaggaacacttccaactgcatcaccagatgcattacagccagcaaataaccgttagcctggcccaagggtacgagaggacatcttcccccaagccaagatttaaatcatatgcttacacacaggcagcatatgttacgacatccgatcctacccgcagcccattcccgagtcaacatctcgaggcgcccgaggataagagtttcggcagttccctgatggaaagcgaggtcaatctggaccggtatcagaccgcattagaagaggttctctcatggctcctatccgccgaggatactttacaggcacagggggaaatctccaatgatgttgaggtggtgaaggaccagtttcatacccatgaagggtacatgatggacctaactgcacatcagggcagagtggggaacattctccagctgggaagtaaactcataggaaccggaaaactgtcagaagatgaagagaccgaggtgcaggagcagatgaatttgctgaattcaagatgggaatgcttacgagtagcatcgatggagaaacagagcaatttgcatagagtgctcatggacttacaaaaccagaagctgaaagagctgaatgactggctgactaagacagaggagcgaactcggaagatggaagaagagcccctcggccccgatttggaggatctgaagaggcaagtgcagcaacacaaagtgttgcaggaagatcttgagcaggagcaggtgcgcgtgaacagtcttacacacatggtggtagtggtcgacgaaagctccggtgatcacgctacggccgctctcgaggagcagttgaaagtgttgggagaccgttgggcaaacatctgcagatggactgaagacaggtgggtgctacttcaggacatcctcttgaagtggcaaagacttactgaagagcagtgcttgtttagtgcctggttgtctgaaaaggaggatgccgtgaataagattcatactacagggtttaaagatcagaatgaaatgttgtcatctctgcaaaagcttgcggtcctaaaggccgatttagaaaaaaaaaagcagagcatggggaaactgtactcccttaagcaagacctgctgtccaccctcaagaataagtcggtcacgcaaaaaaccgaggcttggctggacaactttgcacgctgctgggacaacctggtgcagaagcttgaaaagtccaccgcccagatttctcaggccgtcacaacgactcaaccctcactgacacagaccacagtgatggaaacggttactaccgtgactacaagggagcaaattctagttaagcacgcacaggaggagttacctccccctccacctcagaaaaagcggcagattacagtggatacgctggagcgattgcaagaactccaagaagcaactgacgaactggatctgaagctgcgccaggctgaggtgatcaagggctcctggcaacctgtcggcgatcttctcatcgactccctgcaggaccacctggagaaggtgaaggctctaaggggggagatagctccgctgaaagagaacgtgagccatgtgaacgacttagcccggcagctgacaaccctgggcattcaattgagcccctacaatctgtcaacgctggaagacctgaatacacggtggaaacttctccaagtggcggtggaggatcgcgttcgccagctgcacgaggctcacagggacttcggtcccgcttcccagcactttcttagtacatcagtgcaagggccgtgggaacgagcaatttccccgaataaagttccgtactacatcaatcatgaaacccaaacaacctgttgggatcacccaaagatgactgaactctaccaatcactggctgatttaaataacgtgagattttctgcatatcgcaccgccatgaagctgaggagactccagaaggctttatgtctggacctgctctcgctctcggctgcttgcgatgcgttggatcagcataacttgaaacagaacgaccagccaatggacatccttcagataatcaattgccttaccacgatctacgatagactagagcaggaacataacaacttagtgaacgtaccactgtgcgtggatatgtgcttaaactggctcttaaacgtgtacgatacagggcggacagggcgcatcagagtgttgagctttaagacagggattatttcattgtgtaaggcacacctggaagacaagtatcggtatctgttcaaacaggtcgccagctctaccggattttgtgaccagagaagactaggtctgctgctacacgactctattcagatcccccgccagctcggggaagttgcctcgtttggtggcagtaacatagagcccagcgtaagatcctgcttccagtttgctaacaataagccggagatcgaagccgcccttttccttgattggatgaggttagaaccgcaatcgatggtctggcttccagtgctacacagagtggctgctgccgaaaccgctaagcaccaggcaaaatgcaacatttgtaaagagtgcccgattattggcttccgttacaggagtctgaagcacttcaattacgacatttgtcaatcttgcttcttttctggaagggtcgctaaagggcacaagatgcattaccccatggtcgagtactgtaccccaaccactagtggggaagacgtgagagatttcgcaaaagttctgaaaaacaaattccgaaccaaacgatacttcgccaagcacccaaggatggggtatctgccagtccagaccgtgctggaaggggataatatggagactgacaccatg

SEQ ID NO: 342808 - DNA, 3591 bp, Artificial Sequence
  derived and/or modified sequence
atgttatggtgggaagaagtcgaagactgttatgagcgcgaggacgtgcaaaagaaaacttttacgaaatgggtgaacgcccagttttctaagttcggaaaacagcatatagaaaaccttttttcggacctccaagacggccgccgactgctagacctgcttgagggcctgaccggccagaaactcccgaaagagaaggggtccacaagggtccacgctctgaacaacgtgaataaggccttgcgtgtgctgcagaacaataatgtggacctcgttaatatcggatctacagatatcgttgatggtaaccataagctcaccttgggattgatatggaacatcatactgcattggcaggtgaaaaacgtgatgaaaaacatcatggccggattgcaacagacgaacagcgagaagatcctcctgagttgggtacggcagagcaccagaaactaccctcaggtgaacgtgatcaatttcaccacttcctggtcagatggtctcgcgctgaatgccttgatccactcccaccgtcccgacctgtttgactggaacagcgtggtgtgccaacagtccgcgacccaacggcttgaacatgcattcaatattgcgagatatcagctcgggattgaaaaactgctggatcccgaggacgtggacacaacctatcccgacaagaagtccatcctcatgtacatcacctccttgtttcaggtgctgccacagcaggtgagcattgaagcaatccaggaagtcgagatgctcccccgaccccctaaggtgacgaaggaggagcactttcagttacatcaccagatgcactactcacagcagattaccgtgtcattggctcaggggtacgaacgtacgtcctctcccaaaccccggttcaagagctatgcttacactcaggccgcatacgtgacaacctccgacccgacaaggtctcccttcccaagccagcatctcgaggctcctgaagataaaagcttcggctcctcactcatggaaagcgaggtgaatttggatagataccagaccgccttggaggaggtgctgtcttggctcctgtccgcagaagacacgctgcaagcacagggagagattagtaatgatgtcgaagtggtcaaggaccaattccatacacacgaaggttacatgatggatctgaccgctcaccagggaagggttggaaacattctgcagctaggctcgaagctcattggtacaggcaagctgagcgaagatgaagagacggaggtgcaggagcagatgaacctgttgaactcccggtgggagtgcttgagagttgcgagcatggaaaaacagtctaacttgcatagggtgttgatggatctccagaaccagaagctgaaggagcttaacgactggcttacaaaaactgaagaaaggactaggaagatggaggaggaaccactggggccagatcttgaagacctcaagaggcaggtgcaacagcacaaggttttgcaagaggatctggagcaggaacaggtgagggtgaacagtctgacacacatggtcgttgtcgtcgacgaatcctccggcgaccatgctactgcagcacttgaggagcaactcaaggtgcttggagaccggtgggccaacatctgtcgctggaccgaggaccgttgggtactcctccaggatattttactgaagtggcagaggcttactgaagaacagtgtttattctccgcatggctcagcgaaaaagaggacgccgtcaataagatccacaccacaggcttcaaggatcagaatgaaatgctctcctcacttcaaaagctggcagtgctcaaagcggatctggaaaaaaaaaagcagtcaatgggaaagctttacagccttaagcaagatctgctgtcaacactgaaaaataagtcagttacccaaaagacagaggcctggctggataactttgcacggtgttgggataatctcgtccagaagctggagaaaagtactgctcagatctcccaagccgtcacgaccacccagccttctctgacacagaccactgtgatggaaacggtgacaactgttacaacacgggagcagattctggtcaagcacgcacaggaggaacttcctcccccccctccacaaaagaagcgccagatcactgtcgacactttagagcgcctccaagagcttcaggaggccaccgacgagctggacctgaagctgcgccaggctgaggtaattaagggcagctggcagcccgtcggagatctgttgatcgactcccttcaggaccacctggaaaaggtgaaggccctgaggggagaaattgcgcctttgaaggagaacgtctcacacgtgaatgatcttgctcgccagctgacgacactaggaattcagctgtccccctataatctcagcacgttggaagacctcaacacccgctggaaactacttcaggtggctgtcgaagatcgggtgcgccagctgcatgaagcacatcgtgacttcgggccagccagccagcatttcttgtcgacttcggttcaggggccctgggaacgtgccatttcaccaaataaagttccatactatatcaatcatgaaacacagacaacctgttgggaccaccctaagatgaccgaactgtatcagagtttagcagatttaaataacgttagattctccgcttaccgcactgctatgaagctacgaagacttcagaaggcactgtgtttagatctgctatccctgagtgcagcctgcgatgcacttgaccaacataatctgaagcaaaatgaccagccaatggatattctccaaattattaattgcctgacaactatctatgatcgcctggagcaggaacataataatctggtgaacgtccctctctgcgttgacatgtgtttgaattggctgctcaatgtctacgacaccggaagaaccggtagaatccgcgtgttgtccttcaagactggtataatcagcctatgtaaggcacatctggaggacaaatacaggtatctattcaagcaggtggcatcctctaccgggttctgcgaccaacgccgactcggactgcttctgcatgattccatccagatcccaaggcaactgggggaggtggcttcattcggcggctcgaatatcgagccctctgtgcggtcctgcttccagtttgccaataacaagcccgagattgaggctgcactgttcctggactggatgcgtctggagccgcaatctatggtctggttgccagttctacatagagtggccgccgcggagactgctaagcatcaggctaaatgcaatatatgcaaggagtgccctattatcgggtttagatatcgaagcctgaagcatttcaattacgacatatgccagtcatgcttttttagtggccgcgtcgccaaaggccacaagatgcactatccaatggtggagtattgcactccaaccacatctggtgaggacgtcagggattttgcaaaggtcttgaaaaacaagtttaggaccaaaaggtacttcgccaaacacccccgcatggggtatctacccgtgcagacagtgcttgagggcgacaacatggaaaccgatactatg

SEQ ID NO: 342809 - DNA, 3591 bp, Artificial Sequence
  derived and/or modified sequence
atgctctggtgggaagaagtggaggactgctacgaacgcgaagatgttcagaaaaagacgtttacgaagtgggtcaatgcgcagttttccaaattcggtaagcaacacatcgaaaatctgtttagcgacctgcaggatggacgcagacttctggacctcctggaaggcctgactggccagaagctgccgaaggagaagggcagcacgcgcgtccatgctctgaacaacgtcaacaaggcgctcagagtgctgcagaacaacaacgttgacctggtgaacatcggatccaccgacattgtcgatgggaaccataagctgaccctcggactcatctggaatatcattctccactggcaggtgaaaaacgtcatgaagaatatcatggcaggactgcagcagactaattcagaaaagatcctcctgtcgtgggtgcggcagtcaactcggaactacccgcaggtgaatgtgatcaatttcaccacttcgtggtcggacggactcgcactcaatgcactcatccatagtcataggccggacctgttcgactggaactccgttgtgtgccagcagtcagccacccagagactggaacatgcattcaacatcgcccggtatcagttgggaatcgaaaaacttctggaccctgaagatgtggataccacttaccctgataagaagtccatcctcatgtacatcacttccctgttccaagtgctgcctcagcaggtttcgatcgaggccatacaggaggtggaaatgttgccccggccgccgaaggtgaccaaggaggagcacttccagctgcatcaccagatgcactacagccaacagattactgtctcgctggctcagggatacgagcgcacctccagtccaaagccaaggtttaagtcatacgcatacacccaagccgcctatgtcactacttcggacccaaccagaagccctttcccgtcacaacatttggaagcgccggaagataaatcattcggatcatcgctgatggagtcggaggtgaaccttgatagataccagaccgcgctggaagaagtgctgtcctggctcctctcagcagaggacaccctccaagcacagggcgaaatctccaacgacgtcgaagtggtcaaagatcagttccatactcatgagggatacatgatggatctcaccgctcaccaggggcgcgtgggaaacatcctgcaactgggatccaagctgatcggcaccgggaagctgtcagaagatgaagaaaccgaagtgcaggagcaaatgaacctcctgaattcacggtgggaatgtctgcgcgtggcgagcatggagaaacagagcaacctgcatcgggtgctgatggatttgcagaatcagaaacttaaagaactgaatgactggctcaccaagaccgaggaaaggacccggaagatggaagaagagcccttgggtcctgatctcgaagatctgaagcgccaggtccagcaacacaaggtgctgcaagaggacctggagcaagaacaggtccgcgtgaactcccttacccatatggtggtggtcgtggacgagagctcgggcgatcacgccaccgccgccctggaagagcagttgaaagtcctcggcgaccgttgggccaacatctgccgctggaccgaggacagatgggtgctgctgcaagacatcctgctgaagtggcagcgactcacggaggaacagtgtctcttctcagcctggctgagcgagaaagaggacgcagtgaacaaaatccacaccacggggttcaaggaccagaacgaaatgctgtcgtcgctgcagaagctggccgtgctgaaggctgacctcgagaagaaaaagcaaagcatggggaagctgtactcgctgaagcaagacctgctctccaccctcaagaacaagagtgtcacgcaaaagactgaggcatggcttgataactttgctcggtgctgggataacctggttcagaaattggaaaagtcgactgctcaaatttcgcaggccgttaccaccacgcagccgtctcttacgcaaacgaccgtgatggaaaccgtcaccaccgtgaccaccagagagcagattcttgtgaagcatgcccaagaggaactcccacctccgcctccgcagaaaaagaggcaaatcactgtggatactctggaaaggctgcaggaactccaagaggccactgatgagctcgatttgaagctgagacaggcggaagtgattaagggttcatggcagccggtcggtgaccttcttatcgactcgctgcaagaccatttggaaaaggtcaaggcactgcggggggagattgccccactgaaggagaatgtgagccatgtcaacgatctcgcacggcagctgactaccctgggaattcaactgagtccttacaatctctcaaccctcgaggatctcaacacccgatggaagttgttgcaggtggcagtggaggacagagtgcggcagctgcacgaggcgcaccgggacttcggaccagcctcccaacatttcttgtcaacctcggtgcaaggcccttgggagcgagcaattagcccaaataaggtgccgtactacatcaatcatgaaactcaaaccacttgctgggaccatcccaaaatgactgaactgtaccagtctcttgctgatctcaacaacgtccgcttttccgcctaccgcacggctatgaagctcagacgcctgcaaaaagccctttgcctcgacttgctctcgttgtcggcggcatgtgacgcactggaccagcacaacctcaaacaaaacgaccagcctatggacatcctgcaaatcataaactgcctgaccaccatctacgaccgcctggagcaggagcacaacaacctcgtgaacgtgcccctgtgtgtggacatgtgcctgaattggctcctcaacgtgtatgataccggacgcactgggcgaatcagagtcctctcgttcaagaccggaatcatctcattgtgtaaagctcatttggaggacaaataccgctacctcttcaagcaagtggcttcgtccaccgggttttgcgaccaaaggcggctgggcctgttgctccatgactcgatccagatcccccgccaactgggagaagtcgcgtcatttggagggtcaaacatcgaaccatcggtgagatcctgcttccagtttgctaacaacaaaccagaaatcgaagcggcgctcttcttggactggatgagactggagccccaatcaatggtgtggcttcctgttctgcatagagtggcggccgccgaaactgcaaagcaccaggctaaatgtaacatatgcaaggaatgcccaatcatcggcttccgctacagaagcctgaaacacttcaattatgacatttgccagtcctgcttcttttccggacgcgtggcaaagggccataagatgcactacccgatggtggaatactgtactccaaccacttccggagaggatgtgcgggacttcgctaaagtgctcaaaaacaagttcagaactaagcgctacttcgcgaagcaccctcggatgggttacctgccggtgcagactgtgctggaaggcgacaatatggaaaccgacacgatg

SEQ ID NO: 342810 - DNA, 3591 bp, Artificial Sequence
  derived and/or modified sequence
atgctttggtgggaggaagtggaggactgttatgaacgagaggacgtccagaaaaaaacatttacaaagtgggtgaacgcacagttctcaaaattcggtaagcagcatattgaaaacctcttcagtgacctacaggacgggcggagactgcttgacttgttggaggggcttactggccagaaattgcccaaggaaaaggggagcacccgggtgcatgctcttaataatgtgaacaaggctctacgggtgttgcagaacaataacgtcgacctggttaatatagggagcactgatatagttgatgggaaccacaaactcaccttgggtctcatttggaacatcattttacattggcaggtgaaaaacgttatgaagaacattatggctggcctacagcagaccaacagcgagaagatcttgctgagttgggtgcgacagtccacccgaaattatccacaagtcaacgtgatcaacttcacaacatcatggtcggatggccttgcactaaatgctcttattcactcacacaggcctgatttgttcgattggaatagcgtagtgtgccagcaaagcgctacccagcggttggagcatgccttcaacattgccagataccagctcggcatagagaagttgctggaccctgaggatgtcgacacaacctaccctgacaagaagagcattcttatgtatatcacaagcctttttcaggtcttgccacagcaggtcagcatcgaggccatccaggaggtggagatgcttcctcggccacccaaggtcactaaggaagaacatttccagctgcatcatcagatgcattattctcagcagatcaccgtctcactcgcgcaggggtatgaacgaacatcttcacccaaacctcgcttcaagagctacgcctatactcaggcagcctacgtgactacatcagaccccacccgttccccttttcctagtcaacacctcgaagcgccggaagataagagctttggcagctctttgatggaatcagaagtaaatctggatcgctaccagactgcactggaggaggtgctgtcatggctgttgtcagccgaggacaccctccaggctcagggggaaataagcaacgatgtggaagtggttaaagatcagttccatacccacgagggctatatgatggaccttaccgctcaccagggaagagtcggaaatatcctgcagctgggttcaaaactgattggcaccggtaaactctcggaagatgaagaaactgaagttcaggagcagatgaacctgttgaactctaggtgggagtgtctgcgggtggccagtatggaaaagcaaagcaacttgcaccgagtgttgatggatctacagaatcagaaattgaaggagctgaacgattggctgactaagaccgaggagcggacgcggaagatggaggaggagccactcgggccggacctggaggacttgaagaggcaggtccagcagcacaaggtgctacaggaagacctcgagcaggaacaggtccgggtgaacagtctcacccacatggtagtcgtggtggacgagagcagtggtgaccatgccacagccgctttggaagaacagctgaaagttttaggagatcgatgggcaaatatctgccggtggacagaggacagatgggttctcctgcaggatatactgcttaaatggcagagactcacagaggagcagtgcctgttctccgcgtggctcagcgaaaaggaggacgcagtcaacaagatccatacgaccggcttcaaggatcagaatgagatgctgtcctcgctacagaagctcgccgtcctgaaggccgacctggagaagaagaagcagtcaatggggaagctctacagcctcaaacaggatttgcttagtacacttaagaacaaatcagtgacccagaaaacagaggcatggctggacaattttgcaaggtgctgggataacctagttcaaaagttggaaaagtctacggctcagatttcccaggccgtgaccactactcagccgtcactgactcagacaactgtgatggagaccgtgacgacggttacaacgcgggaacagatactcgtcaaacatgcacaggaggaactgccccccccgcctccacagaaaaagaggcaaataaccgtcgatactctagagcggctacaagagttgcaggaggcaaccgatgagctcgatctgaaattgcggcaagcagaagtgataaagggctcatggcagcctgttggcgatttgctgatcgactccctgcaagatcatctggaaaaagtgaaggccttgcgtggtgaaatcgccccactgaaggagaatgtgtctcacgtaaatgacctggcccgccagctaaccactcttggaatacagctgagcccttacaaccttagtaccctcgaagacctaaatacccgctggaaactactacaagtggcggtggaagatagagtcaggcaactacacgaggcacaccgtgattttggaccagcgtcacaacattttctgtctactagtgtccagggcccttgggagcgggctatcagtcccaacaaagtcccatattacattaaccatgagacacagacgacctgttgggaccatccaaaaatgaccgagctataccagagtctcgcggatctgaacaacgtgaggtttagcgcatacagaacagccatgaagcttcggagactccagaaggccctgtgcttagacctcctgtccctgtcggcggcatgcgatgcgctggatcaacacaatctaaaacagaatgatcaacctatggacattctgcagatcatcaattgtttaaccacaatatatgatagacttgagcaagagcataataatctcgtgaacgtgccgctgtgcgtggacatgtgcctgaactggttactaaatgtctatgacaccggtcgaactggcagaattcgggtcctgtcttttaagaccggcatcatttctttgtgtaaagcgcatctcgaagacaaataccgctacctattcaaacaggttgcttcctccactggtttttgtgaccagaggcgattggggcttctcctgcacgactccatccaaattcctcgccagttaggcgaagtcgctagtttcggcgggtctaacatcgagccctccgtgagatcctgctttcagtttgccaataacaagcctgaaatcgaggctgccctttttctcgactggatgcgtcttgaaccgcagtcaatggtctggcttccagtgctgcatcgagtggctgcggcggagactgctaagcatcaggctaagtgtaacatctgcaaagagtgcccgataattggattccgctaccgctctcttaaacattttaattatgatatttgtcaatcctgttttttctcggggagagtggcgaagggccataaaatgcattaccccatggtcgagtactgcactcctacaacaagcggagaagatgtacgcgattttgccaaagtgctaaagaacaagttcagaacgaagcgatactttgcaaagcatcccagaatgggctatctcccggtgcagacagtcctggagggagataatatggagacggacacaatg

SEQ ID NO: 342811 - DNA, 3591 bp, Artificial Sequence
  derived and/or modified sequence
atgctgtggtgggaagaagtcgaggactgctacgaacgcgaggacgtccagaagaaaacgttcactaagtgggtcaatgcgcagttcagtaaattcggcaaacagcacatcgaaaatctgttttcagacctgcaagacgggcggcgcctgcttgatcttctggaaggactcaccgggcaaaagctgccgaaggaaaaaggtagtaccagagtgcacgccttgaataacgtcaataaggccctgagggtcctccagaataacaatgtggatctcgtgaacattggatcgaccgatatcgtggacggaaaccacaagttgacccttggattgatctggaacataatcttgcactggcaggtgaagaacgtgatgaaaaacatcatggccggactgcagcagaccaactccgagaagatcttgctcagctgggtgcggcagtcaacccgcaactacccccaggtcaatgtgatcaacttcactacgtcatggtcagatggattggccttgaacgcactcatccattcccaccggccggacctctttgactggaactcagtggtgtgccaacagtcggccactcaaagactcgaacatgccttcaatatcgcccggtaccaacttggaatcgaaaaactgctcgaccccgaagatgtggacaccacgtacccagacaagaaatccatcctgatgtacattacctccctgttccaagtattgccacagcaagtctctattgaagcgatccaagaagtggaaatgctgccgcggccgccgaaggttaccaaggaggaacacttccagttgcatcaccagatgcactactcgcagcagataaccgtcagcctcgcccaaggatatgagcgaacttcctccccgaagccgcggttcaagtcctacgcatacactcaggcagcctacgtgactacctctgaccccacgaggtcgccctttccgtcccagcatctcgaggcaccggaggacaaatcctttggatcaagcctcatggagtccgaggtgaacttggacaggtaccaaaccgctctggaggaagtgcttagctggctgctgtcagcagaagatactttgcaagcccaaggagagattagcaatgatgtcgaagtggtgaaggatcaattccacactcatgaaggatacatgatggatctgaccgctcatcaaggtcgagttggaaatatcttgcaattgggaagcaagctcatcggaaccggcaagctgagcgaggatgaagagacggaggtccaggagcagatgaacctgctgaattcgcggtgggagtgtctgcgggtggcctcaatggaaaagcagagcaacctgcatcgggtgctcatggacctgcagaaccaaaagctgaaggagctcaatgactggctgaccaagaccgaggagcgaacgcgcaagatggaggaagaacccctcggcccagatcttgaggatctgaaaagacaggtgcaacagcacaaagtgctccaagaagatcttgaacaggaacaggtgcgcgtgaactcactgacccatatggtggtcgtggtggacgaatcttcaggggatcacgcaactgccgccctcgaagagcagctgaaggttctcggggaccgttgggcgaacatctgccgctggactgaggacagatgggttctgctgcaggacatcctgctcaagtggcaacggctgactgaagagcagtgccttttcagtgcctggctctccgaaaaggaagatgcggtcaacaagatccacaccactggattcaaggaccagaacgaaatgctgtcatcgctccaaaaactcgccgtgctcaaggcggacctggagaagaagaagcagtccatgggaaaactttacagccttaagcaagatctcctctctaccctgaaaaacaagagcgtgactcaaaagaccgaagcctggctcgataactttgctcggtgctgggacaacctggtgcaaaaactggagaaatcgaccgcacaaattagccaggctgtgactactactcaacctagcctgacccaaactaccgtaatggaaaccgtcactaccgtgactactcgtgaacagatactcgtgaagcatgctcaggaggaactgcctcctccaccaccgcaaaagaagcgacagatcaccgtcgataccctcgagcgcctgcaggagctgcaagaagcgaccgacgagctggacctgaagctgcggcaagcggaagtgatcaagggatcctggcagcctgtgggggacctcctgatcgacagcttgcaagaccatctcgagaaagtcaaggcactcagaggcgagatcgcccctcttaaggagaacgtgtcccacgtgaatgatttggcccgccagctgactacgctgggaatccagctgtcaccatacaacctgtcgactctcgaagatctcaacacccgctggaaacttctgcaggtcgctgttgaagatcgcgtgcgccagctgcatgaagcgcaccgcgacttcgggcctgcctcgcagcacttcctgtccactagcgtccagggcccatgggagagagcaatttcccccaacaaagtgccgtactatatcaatcatgaaacgcagaccacttgttgggaccatccgaaaatgaccgaactctaccagtcgctggccgacctgaataatgtgcgcttctcggcgtatcgcaccgccatgaaactgcgcagattgcaaaaggcgctgtgccttgacctcctttccttgagtgcagcctgcgacgccctggaccagcacaaccttaagcaaaatgatcaaccgatggacatcttgcagatcattaactgcctcactactatctacgaccgcctcgagcaggaacacaataatctcgtcaacgtgccgctctgcgtggatatgtgtctcaactggttgctgaacgtgtatgataccggtagaactggcagaatccgggtcttgtccttcaagaccggaatcatatcgctgtgcaaggcgcacctggaagataagtacagataccttttcaagcaggtcgcctcttcgaccggtttctgtgaccagcgacgacttggactgctcctccacgattctattcaaatcccgagacagctcggtgaggtggcgtcctttggcggctccaatatcgaaccttccgtgcggtcgtgttttcagttcgctaataacaagcctgagattgaggctgccctgtttctcgactggatgcgcttggagccacaaagcatggtgtggctgcccgtcctgcaccgcgtcgcagcggcagaaactgcgaagcaccaggcaaagtgcaacatctgcaaggagtgcccaattatcgggttcaggtaccggagcctcaaacatttcaattacgatatctgccagtcgtgcttcttttcaggccgcgtggctaagggtcacaaaatgcattaccctatggtcgagtactgcactccgacgacgtcaggagaagatgtgcgggatttcgctaaagtcctgaagaacaaatttcggacgaagcgctatttcgctaagcacccgagaatgggatacctgccggtgcagaccgtgttggaaggcgataacatggaaactgacaccatg

SEQ ID NO: 342812 - DNA, 3591 bp, Artificial Sequence
  derived and/or modified sequence
atgctgtggtgggaggaagtcgaagattgctacgagagggaagatgtgcaaaagaaaacttttaccaagtgggtgaatgcacaattttctaagttcgggaaacaacatattgagaaccttttttcggatctgcaggacggcagacgcctcctggacctgctggagggactcaccggacagaagctcccaaaggaaaaaggctccacccgcgtgcacgcacttaacaatgtgaataaggcattgagagtgcttcaaaacaacaatgtcgaccttgtgaacattggctcgacggacatcgtggatggaaaccataagttgaccctgggactgatctggaatatcatccttcactggcaagtcaagaacgtgatgaagaacatcatggcaggactgcaacaaacgaattccgaaaagatcctcctttcgtgggtgaggcaatcaactcgtaactaccctcaggtgaacgtgataaacttcactactagctggtcggacggactggccctcaatgcacttatccattcacacaggccagacttgttcgattggaatagcgtggtctgtcagcagagcgcgactcaaagactggaacatgcttttaacattgcccgataccagctgggaattgagaaactccttgaccctgaggatgtcgataccacctaccctgataagaagtcgatcctgatgtacattacgtccctctttcaagtgctgccgcaacaagtgtcgattgaggcaattcaggaagtggaaatgcttccaagaccgcctaaggtcacgaaagaggagcacttccagctgcatcaccagatgcattactcccagcagattaccgtgtcccttgcacagggctacgaacgtacctcgtccccgaaaccacgcttcaagtcctacgcatacacccaggcagcgtacgtgaccacttcggatcctacccggtccccttttccatcccaacatctggaagcaccagaagataagtcatttggttcgtcgctgatggaatccgaagtgaatcttgatagataccaaactgcactggaagaagtgctttcgtggcttctctcagcggaggataccctccaggcacaaggtgaaatatccaatgacgttgaggtcgtcaaagaccaattccatactcacgagggatacatgatggatcttactgcacatcaaggaagggtgggaaacatactccagctcggaagcaaacttattggaactggaaaacttagcgaggatgaagaaaccgaagtgcaggaacagatgaaccttcttaatagccgctgggagtgtctgagagtcgccagcatggaaaagcaatcgaacctgcacagggtgcttatggatctgcaaaaccaaaaacttaaagaactcaacgattggctgaccaagaccgaggagcggactcgaaagatggaagaagaacccctgggtcctgacttggaggaccttaaacgacaggtgcagcaacacaaagtcctccaagaggaccttgagcaggaacaggtcagagtcaacagcctgacccacatggtggtcgtggttgatgagtcgtcaggagatcacgcgactgctgccttggaggagcaacttaaggtgcttggagacaggtgggcaaacatttgtcgctggaccgaggaccgctgggtgctcctgcaggatatcctcctgaagtggcagagactgacggaggagcaatgcctgtttagcgcatggctgtcggaaaaagaagatgcagtcaacaagattcataccactggattcaaggatcaaaatgaaatgcttagctctcttcaaaagctggctgtgcttaaggcggaccttgaaaagaagaagcagtctatgggcaagctctactctctgaaacaagatctgctgagcacccttaagaataagtccgtgacccaaaagaccgaagcatggcttgacaattttgcccggtgttgggacaacctggttcagaagttggaaaagtccactgcacaaatcagccaagcagttaccactacccaacctagcctgacccaaactaccgtgatggaaaccgtgacgaccgtgacgactcgagagcagattctggtcaagcatgcgcaggaggaactgcctccgcctccgccacagaagaagcggcagataacggttgataccctcgaaaggcttcaggagctgcaagaagccactgatgaattggatctgaagctgagacaggcagaggtcattaaaggatcgtggcaacctgtcggtgaccttctgatagattcccttcaagatcatctcgaaaaagtcaaggccctccggggagaaattgcaccccttaaagaaaatgtgtcccatgtcaacgacctggcaagacagcttaccactcttggcatccaactctccccatacaacctgtccaccctcgaagatctgaataccagatggaagctgctccaggtggccgtcgaagatcgggtccgccagcttcacgaagcacatcgagactttggaccagcgagccaacatttcctgtccacctctgtgcaaggtccttgggagagagcaatctcccccaacaaggtgccgtactacattaaccatgaaactcaaactacctgttgggaccatcccaagatgactgagctgtatcagtcacttgcggacctcaacaacgtgcgcttctcagcgtaccggactgcaatgaagctcagaaggctgcagaaggccctttgtcttgatcttctttcgctgtccgccgcatgcgacgctctcgatcaacataatcttaaacagaacgaccagccaatggacattctgcaaatcataaactgccttactaccatttacgacaggcttgaacaggagcacaacaatctggtgaatgtcccactgtgtgtggacatgtgccttaattggttgctcaacgtgtacgacacgggtagaaccggccgtatcagagtgctgtcgttcaagaccggtataatcagcctttgcaaagcacacctggaagataagtatcgctacctgttcaagcaggtcgcatcgagcaccgggttttgcgatcaacggagacttgggctccttctgcatgacagcatacagatccctcgtcagctgggcgaggtggcctcgtttggaggttcgaatattgagccttcagttcgctcgtgtttccagtttgcaaacaataaacccgaaattgaagcagctttgttcctggattggatgcgtctggaacctcagagcatggtgtggctccccgtcctccatcgggtggcggctgctgaaaccgcaaaacatcaggccaagtgtaacatttgtaaagagtgccccatcataggattcaggtacaggtcgcttaagcatttcaactacgatatttgtcaatcgtgcttctttagcggaagagtcgcaaagggacataagatgcattatccaatggtcgagtactgtacccctactacttcgggcgaagatgtccgggattttgctaaagtgctcaagaacaagttcagaaccaaacgctattttgctaagcatccacgaatgggttacctccctgttcaaactgtccttgaaggcgacaatatggaaactgacactatg

SEQ ID NO: 342813 - DNA, 3591 bp, Artificial Sequence
  derived and/or modified sequence
atgttgtggtgggaggaagtggaagattgttatgagagagaagatgtccagaaaaagacgttcactaaatgggtgaacgcccagttttcaaagttcgggaagcaacatattgaaaatttgtttagcgacctgcaggacgggcgccggcttctggacttattggagggactgacaggacaaaaacttccaaaagaaaaggggtccacacgggtgcacgctctaaataatgtcaataaagctttaagggtgctccagaataacaatgttgacctggtgaatattggttccaccgatatcgtggatgggaatcataaactaacacttgggttgatctggaatatcattctccattggcaagttaagaacgttatgaagaatatcatggctgggttacagcagaccaactctgagaagatcctattgtcctgggttcggcaatccacccgtaactaccctcaagtcaacgttatcaacttcactacatcgtggagcgacggtctagccctcaatgctctgattcacagccatcggcccgatcttttcgactggaattctgtggtctgccagcagtctgctacccagagactagaacacgcctttaatattgccagatatcaattggggatcgagaaactgctggatcccgaagatgtcgacactacttatccagacaaaaagtccattctgatgtacatcaccagcctgtttcaagtcctgccgcaacaggtgtctatcgaagccatacaggaggtcgagatgctgcctcgcccaccaaaggtcactaaggaggaacattttcagttgcaccatcagatgcactattcccagcaaatcaccgtgtcattggctcagggctatgagagaacgagttcacccaaacccagatttaaatcctacgcctacactcaggccgcttacgtgactacttctgaccctactcggtcgcccttcccctcccagcatctggaggcaccagaggataaatccttcggctcctctctgatggagagtgaagtgaacctggatagatatcagacagcactggaagaggtgctgtcatggctgctgagcgccgaggacacactccaagctcagggcgaaataagtaacgatgtcgaggtggtgaaagaccagttccatacacatgaggggtatatgatggacctgacggctcaccagggacgcgtgggcaacattttacagcttgggtcgaagctaataggcacgggcaagctgtctgaagacgaggagacagaagtgcaggaacagatgaatctgctaaactcgagatgggagtgtcttcgggttgcttccatggaaaagcagagtaatcttcaccgggtgttgatggacttgcagaatcaaaaattgaaagagctcaatgactggctgactaagactgaggagaggacgcgtaagatggaggaagaaccgctcggcccagatctagaggaccttaagaggcaggttcaacagcacaaggtactccaggaggacttggaacaggaacaggtacgagtaaactcgctaacccatatggtggtcgttgtggatgagagttctggcgaccatgcaactgccgcgcttgaagaacagctgaaagtcctaggtgataggtgggcaaatatctgccgctggaccgaggaccggtgggtgttactgcaggacatactgctgaagtggcagcggctgactgaggagcagtgtctattctccgcttggctctcagaaaaggaggatgctgtaaacaaaattcatacaaccgggttcaaagaccagaacgagatgttaagtagtctacaaaagctggctgttctcaaggcagatcttgagaaaaaaaaacagagcatgggaaagctgtacagtctgaaacaggatctgctctctacactcaaaaataagtctgtcacgcagaaaaccgaagcctggttggacaattttgcacgttgttgggataatctggtccaaaaacttgaaaaatccacagcccaaatttctcaggccgtgactacaacccagccctcgctaacccaaaccacagtgatggagacagtcacaacagtgacgactagagaacagattctcgtcaagcacgcccaggaggaattgcccccccccccacctcagaagaaaagacaaattaccgtggataccttggagaggctgcaggaacttcaagaggctaccgatgaactggatttaaagctcagacaggccgaggtgatcaaagggtcatggcagccggtcggggatctgctaattgactccctgcaggaccacctggagaaagtcaaggccctgcgtggagagattgcccctctaaaggaaaacgtgagtcatgtcaacgacctggcccgacagctgactactctgggcatccagctatccccatataatctgagtacgctggaggatctgaataccagatggaagctgttacaggtggcggtggaagatcgagtgcgtcagctccacgaagcacatcgagatttcgggcctgcgtctcaacatttcctgtctaccagtgtgcagggcccgtgggagagagccatctcacctaataaggtcccatactacattaaccatgagacccagactacctgctgggatcacccgaaaatgacggaactctaccagtctctcgccgatctaaataacgtgaggttcagcgcttaccgcaccgccatgaagttaaggcgcctgcaaaaagcgctgtgcctggatttgctctccctcagcgccgcttgtgacgccctcgatcaacacaatctcaagcagaatgatcaaccgatggatattctgcagatcatcaactgcctgaccacaatttacgaccggcttgagcaggaacataacaatctggtcaatgttcccctgtgtgtcgacatgtgtctgaactggctattgaatgtctacgatactggtaggaccggccggattagagtattgtcatttaaaacgggaatcattagtctctgtaaggcccacttggaagacaaatacaggtatcttttcaagcaggttgcctcgtccacaggtttctgcgaccagcgccgcttggggctactgctccatgactccatccagatcccccgtcaactcggggaggttgcctcctttggaggtagtaacatcgagccttcggttcgcagctgcttccagtttgctaataataagcccgagatcgaagccgccctcttcctggattggatgagacttgagccccagtcaatggtgtggctgccggtcctgcaccgcgttgcggcagctgagaccgctaaacatcaggccaaatgtaatatctgcaaagagtgccccatcatcgggttcagatacaggtcactgaagcattttaactatgacatatgtcaaagctgttttttctcagggcgggtggcgaaaggccataagatgcactaccccatggtcgagtactgcacaccaacaacctccggcgaggacgtgagagattttgcaaaagtacttaaaaacaaatttcgtactaagcggtactttgctaagcatccgcggatgggctacctaccagtgcagacggtgctcgaaggagacaacatggagacagatacaatg

SEQ ID NO: 342814 - DNA, 3591 bp, Artificial Sequence
  derived and/or modified sequence
atgctgtggtgggaagaggttgaggactgttatgaaagagaagacgttcaaaaaaagacctttaccaaatgggtcaatgctcagttttcaaaatttggaaagcagcatattgagaatttattttctgatctgcaggatggccgtagattattggatttattggaggggttaacaggacaaaaacttcctaaagaaaaaggtagcacccgggtgcacgctctgaataatgtgaacaaggcgctcagggttcttcagaacaacaatgttgatttagtcaatatcggttcaactgacattgtcgatggaaatcacaaactgacactcgggcttatatggaatattattctgcattggcaggtcaagaatgttatgaaaaacattatggctggattgcagcaaacaaattctgaaaaaatcctgttatcatgggtccgtcagtccacacgtaattatccccaggtgaatgtaattaattttactaccagctggagcgacggccttgccctgaacgcacttatccatagccacagaccagatctgttcgactggaatagcgtggtgtgccagcaaagtgctacacagcggttagagcatgcctttaacattgccaggtatcaattagggattgagaaattgcttgacccagaggatgtcgatacgacgtatccggataaaaaatctattttgatgtatataacgtctttattccaagtccttcctcagcaggtcagcatcgaagccattcaagaagttgaaatgcttccgagaccgccgaaggttactaaagaagagcattttcagctacaccatcagatgcattatagtcaacagatcaccgtgagtcttgcacaaggttatgaacggacgtcatccccgaaaccgagattcaaatcatacgcttatacgcaagctgcatatgtgacaacatccgaccctacccgatctccatttccgtctcagcatttggaggcgccagaagacaaatctttcggctcatcgttaatggaatctgaagttaatcttgatcgatatcagacagccctcgaagaggtgttgtcttggcttctctccgcagaagacacgttgcaagcacaaggagaaatcagtaatgatgtggaagttgtcaaagatcagtttcatactcacgaagggtacatgatggaccttacagcgcaccaaggccgggtcggaaatatcttgcagctgggctcaaaattgattggaacggggaagttgagcgaagacgaagagacagaagtacaggaacagatgaacctgctgaattctcggtgggagtgtttacgggtagcgtcaatggaaaaacaatctaatttgcatagggtgttaatggatttgcagaaccaaaaactgaaggaactgaacgactggctaactaaaacagaggagcgtacacgaaaaatggaggaggaaccgcttggccctgatctggaggaccttaagagacaggttcaacaacacaaggtgctgcaggaagatctggaacaggagcaagtacgggtcaattcgctgacgcatatggtcgtcgtggtggacgaatcgtccggagatcatgcaacagctgcactggaagaacaattgaaagttttgggagaccgctgggccaacatttgccgatggaccgaggataggtgggttctattacaggatatcctgcttaaatggcaacgtcttacagaagaacagtgtctgttctcggcctggctgtccgagaaagaggatgcggttaataaaattcatacaaccggctttaaggatcaaaatgaaatgttgtctagcctccagaaactggccgttttgaaagcagatcttgagaagaaaaaacagagtatggggaaactgtattcacttaaacaagacctgttatctacactcaagaataaatctgttacccaaaagacagaggcatggctcgacaactttgctaggtgttgggacaatctcgttcaaaaattagaaaagtctacggcccagataagccaagcagttacgaccacgcagccgtcactgacgcagacaactgtgatggaaacagtaactaccgtcacaacccgagagcagatccttgttaaacatgcgcaggaagaacttccaccgcctccgcctcagaaaaaacgccagattacggtagacacccttgaacggcttcaggaacttcaggaagcaacggacgaattagatctcaaactgcgacaagctgaagttatcaagggatcgtggcaaccagttggtgatctcctgatagattcactgcaggatcacctggagaaagtaaaagctctccggggtgagatcgcaccgctgaaagaaaacgtttctcacgtcaacgacctcgcaaggcagctaacaacacttggtatccagttaagtccatacaatcttagcactttagaagatctcaatacacgctggaaacttttgcaggtggcggtagaagatagggtccgtcaacttcatgaagcgcatagagattttggacctgcttcacagcatttcctgtcaacatcggtgcaaggtccgtgggaacgtgcaatttcccccaataaggtcccatattacattaatcacgaaacccaaacaacatgctgggatcatccaaaaatgacggaactatatcaatcgttagctgatctcaacaatgttagattttccgcatatcgtacagcgatgaagctgcggcgtttacaaaaagccttatgcttagatttactttctctaagtgcagcatgtgatgccctagatcagcataacctcaaacagaacgaccagccaatggatatcctgcagattatcaactgtctgacaacgatctatgatcgccttgagcaagagcataataacctggtaaacgtccctctatgtgttgatatgtgtctcaattggttgctgaatgtctacgatactgggagaactggtcgtatcagggtgctttcgtttaagaccggcatcatttcattgtgtaaagctcaccttgaagacaaataccggtatctttttaaacaggttgcgagcagcactggattctgcgaccagaggcgtctcggacttctcttacacgattccattcagatccctcggcagttaggcgaagtagcaagctttggaggctcgaacatcgagccctcggtgcgatcatgttttcaattcgccaataacaagccagagattgaagcagcgttgttccttgattggatgcgcctcgaacctcaatcgatggtatggctgccggttctgcacagagtcgcggctgcagaaactgcaaaacaccaggctaaatgtaacatttgcaaagagtgtccaattattggatttcgatatagatccctgaaacactttaactatgacatatgtcaatcttgtttcttctctggacgtgtcgcaaagggtcataagatgcactatcctatggtcgaatactgtacaccaacgacgtcaggagaggacgtaagagatttcgcaaaagttctgaaaaacaaattccggacaaaacgatattttgctaaacatccgcgtatggggtaccttcctgtccaaacggtactagagggagataacatggaaaccgacactatg

SEQ ID NO: 342815 - DNA, 3591 bp, Artificial Sequence
  derived and/or modified sequence
atgctttggtgggaggaagtagaggattgttatgaaagggaagacgttcaaaaaaaaacgttcactaagtgggtaaacgcccagttctctaagtttggtaaacaacacattgaaaaccttttttcagatttacaggatggtagaagacttctggaccttctggagggtctcaccggacagaaattgcccaaggagaagggtagcactagggtgcatgcgctgaacaatgttaataaagccctcagggtgttgcaaaacaacaacgtggacctcgtaaacattgggagcacggatatcgtcgatggaaatcacaaactgacccttggactgatatggaacatcatcctgcactggcaggtgaagaatgtcatgaaaaacattatggcgggactgcagcagacaaactccgagaagatactgctgtcttgggtgagacaaagcacccgcaattatccccaggtgaatgttatcaattttacaacaagttggtccgatgggctggctttaaatgctctgatccacagccatcgaccagacctgttcgactggaattccgtggtgtgtcagcagtctgcaactcaacggctggaacacgctttcaacatagcaaggtatcaactggggattgaaaaactgctggatcccgaagatgtggacacaacttatccagacaaaaagtcaatattgatgtatatcactagcctgttccaggtgctcccccaacaggttagtatcgaggcaattcaagaggtggaaatgcttcctaggcctccaaaagtaacaaaagaggagcacttccagctgcaccaccagatgcattatagtcagcaaatcactgtgagcctggcccagggctatgagagaaccagctcgccaaagcctaggttcaaaagctacgcctacacgcaggctgcttacgttacaacttcggaccctactcggtctcccttccccagccagcacctggaagccccagaagataaatctttcggatcaagcctcatggaaagtgaagtgaacttggatcggtaccagacagcattggaagaagtactttcatggctgctctcagccgaagacacgctgcaggctcagggtgaaatctcgaacgatgtcgaggtagtgaaggaccaatttcacactcacgaaggatatatgatggaccttacagcacaccagggccgcgtcggcaacatactgcagctgggctctaagctgatcggaactgggaaattaagcgaagacgaagagacagaggtccaggaacagatgaatttgttgaatagtcgctgggaatgcctccgagttgccagtatggagaagcagagtaatctgcacagagttctcatggatctccagaatcagaagctgaaagaactgaatgattggttgactaaaactgaagagagaacaagaaagatggaggaggagccacttggccccgatctggaagatctaaaaagacaggtgcagcaacataaagttctccaagaggacctggagcaggaacaggtgcgggtcaactcgcttacccacatggtcgtggtagtggacgagagtagtggtgaccacgccaccgctgcactcgaggagcagctgaaagtcctgggggatcgctgggccaatatatgcaggtggactgaggatcgctgggtgctactgcaagacatcctgctgaagtggcaaaggctcacggaggagcagtgtctgttcagcgcctggctgtcggagaaggaagatgctgtgaacaagatccatactactggtttcaaagatcagaatgaaatgttgagttccctgcaaaagctggccgttctgaaggcagacctggaaaagaagaaacagagcatggggaaactgtactccctgaagcaggatcttctctccacactgaagaacaagagtgtcacacagaagactgaagcgtggcttgataatttcgcaaggtgctgggacaatctggtgcaaaagctggagaagtcaacagcacagatctcccaggctgtcacgaccacccagccgtcattgacacagacaacagtgatggagactgtcacgaccgtcacaactagagaacagattctggtgaaacatgcacaggaagaactgcctcccccacctccccagaagaaaagacagattaccgtggataccctggagagactgcaggagttacaggaagctactgacgaactggacctgaagctgcgccaagccgaagtaataaagggttcttggcagccagtcggggacctcctgatagatagccttcaggaccatctggaaaaggtgaaggctctccgtggggaaatagctccactcaaggagaatgttagccacgtgaatgacctcgcacgccaactcactaccctgggtatacagctgtcgccctataatctgtcaaccttagaagacctgaatactcgatggaagctgttgcaagtcgctgtcgaagacagggtgcgccaactccatgaagcccatagggatttcgggcctgccagccagcactttctgtccacatcagtccaggggccctgggagcgcgccatcagtccaaacaaagtgccctattatatcaaccacgaaactcaaactacttgttgggatcatcctaagatgacagagctttatcaaagcctggcggatctaaacaacgttcggtttagcgcctatcgaactgctatgaaactgaggcggttacagaaggcgctctgcctggacctgctcagcctgtccgcagcctgcgatgcgcttgaccagcacaacctgaagcagaatgaccagccaatggatatactccaaattatcaactgtttgaccactatatacgatcggttagagcaagaacataataatctggttaacgtgccgctctgtgtcgatatgtgcttgaactggctgcttaacgtgtacgatacaggtagaacaggcaggattcgagttctgtcgtttaaaactggaattatttccctatgcaaagcccacctagaggacaaatacaggtacctgttcaaacaggttgcctcttcaaccggattctgtgaccagcgaagactcggcctgctgcttcacgactccatccagatcccccggcaacttggcgaggtagcctctttcgggggctctaacatcgaaccctctgtccgcagctgtttccagttcgcgaacaataagccggaaattgaggcagcattgttcctggactggatgcgcttagaaccgcagagcatggtctggctgcctgttctgcaccgggtcgcagcagccgaaaccgctaaacaccaggccaaatgtaatatttgtaaagagtgcccaatcatcggttttcggtacaggtctctgaaacactttaattacgatatatgtcaatcatgttttttttctgggagagtggcaaaagggcataaaatgcactaccccatggtggagtattgcacgcctaccacatctggggaagacgtgcgagacttcgctaaagtgctcaagaataagtttcggaccaaacgctactttgccaaacatccgagaatgggctatctgcccgtgcagactgtgctggaaggcgacaacatggaaactgacaccatg

SEQ ID NO: 342816 - DNA, 3591 bp, Artificial Sequence
  derived and/or modified sequence
atgctgtggtgggaagaagtcgaggactgttacgaaagagaagatgtgcagaaaaagacttttactaagtgggtcaacgcccaatttagcaaattcggaaagcaacacattgagaacctgttttccgatcttcaggacgggcgcagattgctcgaccttctggaaggactgaccggccagaaacttcccaaggaaaaaggaagcactagagtgcacgcattgaacaacgtgaacaaggcactgcgcgtgctgcagaataacaacgtggatctcgtgaatattggttccaccgacatcgtggacggtaaccataaactcacgcttggtcttatctggaacattatactgcattggcaggtgaagaacgtgatgaagaacattatggcaggactgcaacagaccaactccgaaaagatcttgctctcgtgggtgagacagagcacgcgtaactacccacaggtcaacgtgataaactttaccactagctggtcggacgggcttgcactgaacgcccttatccattcccacagacctgacttgttcgattggaacagcgtggtgtgtcagcaatcagccacccaacgcctggaacatgccttcaacattgcccggtaccaactcggaattgaaaaacttctggaccctgaagatgtggacactacttatcccgataagaagagcatccttatgtacattacttcgctgtttcaagtcctgccccagcaagtgtcaattgaagcaatccaggaggtggaaatgctcccacgaccgcctaaggtaaccaaagaagagcacttccagcttcatcaccagatgcactactcccagcagattaccgtgtcactggcgcagggatacgaacggactagcagcccaaaaccaagatttaagtcttacgcatacacccaagcggcgtacgtgaccacctcggatccaactcggagccctttcccatcgcagcatcttgaagcacccgaagataagtcgtttggttcgtcactgatggagtcggaggtgaacctggatcggtaccagaccgcgctggaagaagtcctttcgtggctgctgtccgcagaggacactcttcaggcccagggtgagatcagcaatgatgtggaagtcgtgaaggatcagtttcatactcacgaggggtacatgatggatctgaccgctcatcagggcagagttggtaacattcttcagctcggcagcaaactgatcggcactgggaagctgtcggaagatgaagaaactgaggtccaggaacaaatgaaccttctgaactcgagatgggagtgtctccgggtggcatctatggaaaaacagtcgaatctgcatagagtccttatggaccttcagaaccagaagctcaaagaactgaacgactggttgactaaaactgaggaacgcactagaaagatggaagaagagccccttggtcctgatcttgaggatctcaagcggcaagtgcagcagcataaggtgttgcaagaggatctggaacaggaacaggtgagagtgaactccctcactcacatggtggtcgtcgtcgacgaatcttcgggtgaccacgcgaccgcagcacttgaggaacaacttaaagtcctgggagatcgctgggcaaacatttgcagatggaccgaggataggtgggtgctgcttcaggacatactcctgaaatggcaaagactcactgaagaacaatgtctgttctcggcatggctctccgaaaaagaggatgccgtcaacaaaattcataccacgggatttaaggaccagaatgagatgctttcctccctccaaaagctggcagttctgaaggccgatttggagaagaaaaaacagagcatggggaagttgtactcattgaagcaagatctgctctcaaccctgaagaacaagtccgttactcaaaagactgaagcatggcttgataacttcgctagatgttgggataacctcgtgcaaaaacttgaaaagtccaccgcccaaatcagccaggccgtgaccacgacccaaccttccttgacccagacgactgtcatggagactgtgacgactgtcaccacgcgcgaacagatcctcgtgaagcacgcgcaagaggagttgccacccccaccccctcagaagaagagacaaattaccgtggatactcttgagagactgcaggaacttcaagaagcaaccgacgagcttgatctgaagctgcggcaagcagaggtcattaaaggctcatggcaacctgttggtgatctgttgattgatagccttcaggatcatttggaaaaggtcaaagcactcaggggggagatcgcgcctctgaaggagaatgtgtcccatgtgaatgatcttgcccggcagctcaccaccttgggtattcagctgagcccttacaatttgtcgaccctggaagatctcaatacccgctggaagctccttcaagtggcagtggaagatcgcgtgcgccaactccacgaagcacatagagactttggtcctgcctcacaacacttcctttccactagcgtgcaaggtccctgggaacgcgccatttcgcctaacaaggtcccatactacattaaccatgagactcaaactacctgttgggatcatccaaagatgaccgagctgtaccagtccctcgcagacctgaataatgtcagattctcagcataccggaccgccatgaagctgaggcggcttcaaaaggcactttgcctggatctgctctccctttcggcagcgtgtgacgccctcgatcagcataatctcaagcaaaacgatcagccaatggatattctgcaaatcatcaattgtctgaccactatttacgatcgccttgaacaagaacacaataacctcgttaatgtccctctgtgtgtggatatgtgcctgaattggctcctcaacgtctacgatactggtaggactggaagaatccgtgtccttagtttcaagaccggcattatctccttgtgtaaggcacatcttgaggacaagtacagatacctgttcaaacaggtggcatcgagcaccggattttgtgatcaaaggcgtctgggtttgcttctgcatgatagcatccagatccctagacaacttggtgaagtcgcgagctttggaggatccaatatcgagccttccgtcagatcctgctttcagttcgctaacaataaacctgaaatcgaggctgctctgtttctggattggatgaggctcgagccccagtcgatggtctggctgccagtgcttcatcgagtggccgcagcagaaaccgcgaaacatcaggcaaagtgtaatatctgtaaagaatgtcccattattggctttcgttacagatcgttgaaacacttcaattacgatatctgccaaagctgttttttctcgggacgagtcgcgaagggacataagatgcactacccaatggtcgaatactgcactcccactacttcgggtgaagatgtccgtgatttcgccaaggtgcttaagaataagtttagaaccaagaggtacttcgcaaagcacccacgtatgggttatctccctgtccagactgtcctggagggcgacaatatggaaacggacactatg

SEQ ID NO: 342817 - DNA, 3591 bp, Artificial Sequence
  derived and/or modified sequence
atgttgtggtgggaggaggtggaggactgctacgaacgagaggacgtacagaaaaaaacctttaccaagtgggtgaatgcacaattctcgaaattcgggaaacagcacatcgaaaatctcttctccgacctgcaggatggacgcaggctgctggatttgctggagggcctgacaggacaaaagctcccgaaagaaaaaggcagcacccgggtgcacgccctgaacaacgtgaacaaggccctgagagtgcttcagaacaacaacgtagatttagtcaacatcggatccaccgatatagtggatgggaaccacaagctaaccttgggcctgatctggaatatcattctgcattggcaggtgaagaatgttatgaaaaacatcatggccggcctgcagcaaaccaattcagagaagatcctgttgagttgggttaggcagagcacccggaactaccctcaggtcaacgtgattaatttcacaacttcgtggagcgacggactggccttaaacgccctgatccactcacaccgtccagacctgttcgactggaactccgtcgtttgccagcagtcagcgacccagcggctggaacacgccttcaacatcgcccgctaccagctcggtatcgaaaaactgctggaccctgaggacgtcgacacgacctatcccgataagaaatctatcttaatgtatatcacttccttatttcaggtccttccccagcaggtgtccatcgaagccatccaagaggtagaaatgctgccgaggcctccaaaggtgacgaaggaagaacactttcaactccatcatcagatgcattactcacagcagatcacagtttccttggcccaaggatatgagaggacaagtagccccaagccccgcttcaagtcatatgcttatacacaggctgcatacgtcaccaccagtgacccaacccgctcgccctttcccagtcagcacctcgaggccccagaggataagtccttcggctcctccctgatggaatcagaagttaatctggataggtatcagacagcactggaagaggtcctttcctggctcctatccgccgaagacaccttgcaggcgcaaggtgaaataagtaacgacgtggaggtggtcaaagaccagtttcatacacatgagggttacatgatggatctgactgcacaccagggccgcgtgggaaacattctacagctggggtcaaagttgattggaactgggaagctttcagaggatgaagagactgaggtgcaagagcagatgaacctgctgaatagccggtgggaatgtctgcgggtcgcatcaatggagaagcaatctaatctccacagagtgctgatggaccttcaaaatcagaagctaaaggagctgaatgactggctgaccaaaactgaagagcgtacacggaaaatggaagaggaaccactcggtcccgatctggaggatctgaagcggcaggtacagcagcataaagtgctgcaggaggatcttgagcaagagcaagtgagggttaacagtcttacacatatggtggtcgtggtagatgaaagttccggagatcatgccacggccgcattagaggaacagctcaaggtgctcggtgatcgctgggcaaacatttgcagatggacggaagatcgctgggtactgctgcaggatattcttcttaagtggcaaaggctgaccgaggaacagtgcctgtttagcgcctggttgagcgaaaaggaagacgccgtaaacaagatccataccacaggtttcaaagatcagaacgagatgctctccagtcttcagaaactcgctgtcctgaaggccgaccttgaaaaaaagaagcagagtatgggcaaattgtacagtttgaagcaggacttgttgtcgactctgaagaacaagagcgtcacacagaagaccgaggcctggttagacaatttcgccaggtgctgggacaacttggtgcagaaactcgaaaagtccactgcccagatctctcaagccgttactaccacacagccttcattgactcagaccacggtgatggaaacagtgacaactgtcacaactagagaacaaattcttgtgaagcatgcccaagaagaactgcctccgccacccccccaaaagaaacgccaaattacggtggacaccctggaacgactccaagagttgcaagaagccacagatgagctcgatctcaaactccgtcaagccgaagtgataaaagggtcgtggcaacctgtgggagatctcctgatcgactccctccaggatcatctcgaaaaagtgaaggctcttcgaggcgaaatcgcgcctctgaaggagaatgtctcccatgtgaatgatctggccaggcagctgactacccttggcatccaactgagcccttataatttgtctaccctggaggatttgaacacccggtggaagctgctgcaggttgccgttgaggacagagtgcgacaactgcatgaagcccatcgggatttcgggccggcttctcagcactttctttcaactagtgttcagggcccatgggagagagccatcagtcctaacaaagtgccctattatatcaaccacgagacgcagaccacgtgttgggatcaccctaaaatgaccgaactgtatcagagcttggctgatctgaacaatgtacggttctccgcatatcgaacagctatgaagctgcggaggctgcaaaaggccctctgcctggatctgctgtcgctttccgcggcatgtgatgccctggatcagcacaacttaaaacagaacgaccagcctatggatatcctgcagattattaattgcctgacaactatatacgaccgcctggaacaagagcacaacaatctagtcaacgtcccattgtgtgtggatatgtgccttaactggttgctcaacgtgtacgatacgggacgaacaggtaggattagagtactgtcctttaaaacaggcatcatctcactctgtaaagcccacctggaagacaaataccggtacctgttcaagcaagtggcatcttcaacaggcttctgtgatcagaggcgcttagggctgctgctacatgactctattcagattcctaggcagctgggagaggtggcatcattcgggggcagcaatatcgaacccagtgtgaggtcttgcttccagttcgctaacaacaagcctgagatagaagcagccttattcctcgattggatgcggttagagccccagtcgatggtgtggctccccgtcttacaccgggtggccgcagccgaaacagcgaagcaccaggcgaaatgtaatatctgcaaagaatgtcccattatcgggttcagatatcgaagcctgaagcactttaactacgacatatgtcagagctgcttcttttccggacgcgtggctaaggggcacaagatgcactacccgatggttgagtactgtactccgacaacaagcggggaggatgtgcgggattttgccaaggtgctcaaaaacaaatttagaactaaacgttatttcgcaaagcaccctaggatgggttatttgccagttcagaccgtcttggaaggggacaacatggagaccgataccatg

SEQ ID NO: 342818 - DNA, 3591 bp, Artificial Sequence
  derived and/or modified sequence
atgttgtggtgggaagaagtggaagattgttacgaacgggaggacgtgcagaagaaaactttcactaagtgggtgaatgctcagttctcgaagtttggaaagcaacacattgaaaatctgttctccgacctgcaggacggtagacgcttgctcgacctgctggagggactcactggacagaaactgccgaaggaaaagggttcgaccagagtccatgcactcaacaacgtcaacaaggccctgcgcgtcctgcaaaacaacaatgtggatctggtcaacatcggttccactgatatcgtggatggaaaccacaaactcaccctcggtcttatctggaatatcatccttcactggcaagtgaaaaatgtgatgaaaaacatcatggccggcctccaacaaactaactctgaaaagattctcctgtcatgggtgcggcagtcaactcgcaactacccgcaggtgaatgtgatcaactttacgacctcgtggtcagacggactggctcttaacgccctgatccactcacacagacctgatttgttcgactggaactcagtggtgtgccagcaaagcgctacccagcggctggaacacgcattcaatatcgcgaggtaccaacttggaattgaaaaactgctggatccggaggacgtcgatactacttacccggacaagaaatcgatcttgatgtacataacgtcactgtttcaagtgctgccgcagcaggtcagcattgaggccattcaagaagtggaaatgctcccgcggccaccgaaggtgactaaagaggagcactttcaactgcaccaccagatgcattactcacagcaaatcaccgtgagcctggcccagggctacgaacggacttcctcgccgaaacctagattcaaatcctacgcctacacccaggctgcttacgtgactacgtccgacccgacccggtcgcccttcccatcccagcatctggaagccccggaggacaaatcatttggttcgagcctgatggaatcggaagtgaacctcgaccggtatcagactgcacttgaggaggtgctcagctggctgctctcagccgaagatactctgcaagcacaaggagaaatctccaacgatgtggaggtcgtgaaagatcagttccatactcacgaaggctacatgatggaccttaccgcccaccagggccgggtggggaacatcctgcagctcggatcaaagctgatcggaaccgggaaactttccgaggacgaagaaaccgaagtgcaagaacagatgaatcttctgaactcacgttgggaatgtctccgcgtggcgtcgatggagaaacagtccaaccttcacagagtgctgatggacctgcagaaccagaagctgaaggaactgaacgactggctcaccaaaacggaggaacggaccagaaagatggaggaggaaccactcggccctgatcttgaggacttgaagcgccaagtccaacagcacaaggtgcttcaggaggacctggaacaggagcaggtgagggttaattccctgactcacatggtcgtcgtggtggacgaatcgtccggagatcacgcaactgccgccctggaggaacagcttaaagtgctgggcgaccggtgggctaatatctgcaggtggactgaggataggtgggtgctgctccaagatatcctgctcaagtggcagcgcctcaccgaggagcagtgtctgtttagcgcgtggctcagtgagaaggaggatgccgttaacaagattcatacgaccggatttaaggaccagaacgaaatgctctcgtctctgcagaaactggccgtgctgaaggccgatcttgaaaagaagaagcaatccatgggaaaactgtattccctcaagcaagacctcttgagcaccttgaaaaacaagagcgtgacccaaaagaccgaagcgtggctggacaacttcgcgcgctgctgggacaacctggtgcaaaaactggagaagtcaaccgcgcagatctcccaggcggtgactaccacccagccctcactgacccagaccaccgtcatggagacggtcaccaccgtgacgactcgggagcagatcctggtgaagcacgcacaggaggaacttcctccgccgccaccacagaaaaagaggcagatcactgtcgacaccctggagcgccttcaagaattgcaagaggccaccgacgagcttgatctgaaactgcgacaggccgaggtgatcaagggatcatggcagccggtgggcgacctgcttattgactctctgcaggaccatctcgaaaaagtgaaggcactgagaggagaaatcgcacccctgaaagagaacgtgtcccatgtgaatgatctcgccaggcagctcacgaccctcggaatccaactctcgccttacaatctgtccacccttgaggacctgaatacccggtggaagctgctgcaggtcgcagtggaggatcgcgtgcgccaactccatgaggcgcatcgggacttcggaccagccagccagcatttcctttccacttcggttcagggcccctgggagcgtgctatctctcctaataaggtcccgtactacattaaccatgaaacccagactacctgctgggatcacccaaagatgaccgaactgtaccagtcactggccgatttgaataacgtgcgcttctcggcctacaggacggcaatgaagctccgcaggctccaaaaggcgctgtgcctcgatctcctgtccctttccgccgcatgcgatgcattggaccagcacaacctgaagcagaatgaccagcccatggacattctccagattatcaattgcctgactactatctacgaccgcctggaacaagagcacaacaatctggtgaacgtgccgctctgtgtcgatatgtgccttaattggctgttgaatgtgtacgatactggccgcaccggccgcattagagtgctctcatttaagactggaatcatctccctgtgcaaggctcatctcgaggacaagtacagatacctctttaaacaggtggccagctcgacgggcttctgcgaccaacggcgcctcggcctgctgcttcatgattccatccagatcccgaggcaactgggagaagtggcgtcctttggaggctctaacattgaaccaagcgtccgctcgtgtttccaattcgcaaataacaagccggaaatcgaagctgcactgttcctcgactggatgaggctcgagccacagagcatggtctggttgcctgtgcttcatcgcgtggccgccgctgaaaccgcaaagcatcaggccaagtgcaacatctgtaaggaatgtccgatcatcgggtttagataccgctcactcaagcacttcaattacgacatctgccagtcgtgctttttctcgggacgcgtggccaaaggccacaagatgcactacccgatggtggagtactgcactccaaccacttcaggagaagatgtgcgggacttcgcaaaagtgctcaaaaacaaatttcggaccaaacgttactttgccaagcatccgaggatgggatacctcccagtgcagactgtccttgaaggtgataacatggagactgacaccatg

SEQ ID NO: 342819 - DNA, 3591 bp, Artificial Sequence
  derived and/or modified sequence
atgctgtggtgggaggaggtcgaggactgctacgaacgggaagacgtgcaaaagaagacatttacaaaatgggtgaatgcccagttctccaagttcggaaaacagcacatcgagaaccttttcagcgacctgcaagatggtagaagattgttggatttgctcgagggccttaccggacagaaacttccaaaggaaaagggctcaacaagagtgcatgctctcaataacgtaaataaagcactccgggttttgcagaacaataatgtcgacctcgtgaatattgggagcacagatatcgtggatggcaaccacaagttgacgcttggcctgatttggaacattattttgcattggcaggtgaagaacgtgatgaagaacatcatggctggtctgcagcagactaatagtgagaaaatcctcttgagttgggtgagacagagtacaagaaactacccccaggtgaatgtgataaacttcactacctcttggtctgacggcctggcactgaacgctctgatacatagtcatagaccggatctctttgactggaatagcgtggtgtgtcagcagagcgcaactcagcggctggagcacgccttcaacatagcacgataccagcttgggattgagaagctgctggatccagaagacgtagacaccacatatccagataagaaaagcatactgatgtatatcactagccttttccaagtgctgcctcaacaagtgtccatcgaagctatccaagaagtggagatgctcccacggccacctaaggtgacgaaggaagagcactttcagctgcaccaccagatgcactactcacagcagatcacagtgagtctcgcacaaggttacgaaagaacatcctctcctaaaccaagatttaaatcttacgcctacacacaggccgcatacgttactacttctgacccaactagatctccgttcccctcacagcacttggaggctcccgaggacaagtcctttggctcttcactcatggagagcgaggtgaatctggatcgctatcagactgccctcgaggaggtgctgtcttggcttcttagcgctgaggacaccctgcaagctcagggagagattagcaacgacgttgaagtcgtaaaagatcaatttcatacccacgaaggctatatgatggatctcacagcccaccaaggacgggtcggtaatatactgcagctgggatctaagctgatcggtacagggaagcttagtgaagatgaggagacggaggtgcaagaacagatgaacctgctgaactctcggtgggagtgcctccgcgtcgccagcatggaaaaacaaagcaacctgcatagagtcctgatggatctgcagaaccagaaactcaaagagttgaatgattggctgacgaaaacagaggaaagaacaagaaaaatggaagaagagccgctcggccctgatcttgaggatctcaagaggcaggttcaacagcacaaggtgctgcaggaagatctcgagcaggagcaagtgagggtaaactcactgactcacatggtagtcgttgtggatgaatcatctggtgatcacgcgacagccgcattggaggaacagctgaaggtactgggtgataggtgggcaaacatctgccgctggaccgaagataggtgggtgctgctgcaggacattctgcttaagtggcagaggttgactgaggagcagtgtctgtttagcgcctggctgtctgaaaaggaggatgcagtgaacaagatccataccacagggttcaaggatcagaatgagatgctgagttccctgcagaaactcgctgttctgaaggcagacttggagaagaagaaacagagtatgggaaagctgtacagcctgaagcaggatctcttgtctactctgaagaataagtccgtgactcagaaaactgaggcatggctggacaattttgcccgctgctgggacaacctcgttcagaaactggaaaaaagtactgcccagatttcccaggctgtaaccacgacacagccctccctcacacaaactaccgtgatggagacagtgaccacagtcaccacaagggagcagatacttgttaagcacgcccaggaggagctgccccctccaccccctcagaagaagcggcagatcacagtggatacactcgaacgcctgcaggaactccaggaggcaactgatgagctggacctgaagctgaggcaggcagaagtcatcaagggcagttggcagcccgtcggtgaccttcttatcgactcacttcaagaccaccttgagaaggtgaaggccctgcgcggtgagatcgcccctttgaaggaaaatgtctcacatgttaacgatttggcacggcaactgactacgctcggaatccagctcagcccatataacttgtccacgctggaggaccttaacacgcgctggaagttgctgcaagtggccgttgaggatcgggtccggcagctgcacgaggctcatagggactttggccccgcttctcagcacttcctgtccacctccgtgcagggcccttgggaaagagctatcagcccaaataaggtgccatactatataaaccatgagacccagaccacttgttgggatcatccgaagatgactgaactctatcaaagtctggccgatctgaacaacgtcagattcagcgcctaccggaccgccatgaaactccgacgcctccagaaggcgctgtgcctcgatctgctttcactttccgcagcgtgtgacgcactggaccagcataacctgaaacagaacgaccaacccatggacatcctgcaaattatcaattgccttaccaccatttatgaccgacttgaacaggaacacaacaacctggtaaacgtccctctgtgtgtggatatgtgtctcaactggttgttgaacgtttatgacaccggcaggacgggtagaatccgcgtcctgagctttaagacaggcatcatttcactgtgcaaagcccacttggaagacaaatatcggtaccttttcaagcaggtcgcttcctcaacgggattctgcgaccagcgcagactgggactccttctccatgattccatacagataccccgccagcttggcgaggtggcctcctttggaggcagcaatatagaaccatccgtgcgaagttgctttcagtttgccaataacaagccagagatcgaagctgccctgtttctggactggatgaggctggagccgcagtctatggtgtggctgcctgtgctccacagggtagcagccgctgagaccgcgaaacaccaagccaagtgtaatatctgtaaggagtgccctatcattgggttcaggtacaggtcattgaagcactttaactatgacatatgccagagttgcttttttagtggcagggtggccaaaggacacaaaatgcattaccccatggtggagtactgcacgcctacaactagtggtgaggatgtgcgagatttcgccaaagtgctcaagaacaagttccgaactaaacggtatttcgccaaacaccctagaatgggctatctgcccgtgcagaccgttctggaaggcgacaatatggagaccgacacgatg

SEQ ID NO: 342820 - DNA, 3591 bp, Artificial Sequence
  derived and/or modified sequence
atgttatggtgggaagaagttgaagattgttatgaacgtgaagatgtacaaaaaaaaacgtttacgaaatgggttaatgcgcaattttcgaaatttggtaaacaacatatagaaaatctattttcggatttacaagatggtcgacgtttactagatttattagaaggtttaacgggtcaaaaactaccgaaagaaaaaggttcgacgcgtgtacatgcgttaaataatgttaataaagcgttacgagtactacaaaataataatgtagatttagttaatataggttcgacggatatagtagatggtaatcataaactaacgttaggtttaatatggaatataatactacattggcaagtaaaaaatgtaatgaaaaatataatggcgggtctacaacaaacgaattcggaaaaaatattattatcgtgggtacgacaatcgacgcgaaattatccgcaagtaaatgtaataaattttacgacgtcgtggtcggatggtttagcgttaaatgcgttaatacattcgcatcgaccggatttatttgattggaattcggttgtatgtcaacaatcggcgacgcaacgactagaacatgcgtttaatatagcgcgatatcaactaggtatagaaaaattattagatccggaagatgtagatacgacgtatccggataaaaaatcgatattaatgtatataacgtcgttatttcaagttttaccgcaacaagtttcgatagaagcgatacaagaagtagaaatgttaccgcgtccgccgaaagtaacgaaagaagaacattttcaattacatcatcaaatgcattattcgcaacaaataacggtatcgttagcgcaaggttatgaacgaacgtcgtcgccgaaaccgcgttttaaatcgtatgcgtatacgcaagcggcgtatgtaacgacgtcggatccgacgcgatcgccgtttccgtcgcaacatctagaagcgccggaagataaatcgtttggttcgtcgttaatggaatcggaagtaaatttagatcgttatcaaacggcgttagaagaagtattatcgtggctactatcggcggaagatacgttacaagcgcaaggtgaaatatcgaatgatgttgaagtagtaaaagatcaatttcatacgcatgaaggttatatgatggatctaacggcgcatcaaggtcgtgttggtaatatactacaactaggttcgaaactaataggtacgggtaaattatcggaagatgaagaaacggaagtacaagaacaaatgaatttattaaattcgcgttgggaatgtctacgtgtagcgtcgatggaaaaacaatcgaatctacatcgagttttaatggatttacaaaatcaaaaactaaaagaattaaatgattggctaacgaaaacggaagaacgtacgcgtaaaatggaagaagaaccgttaggtccggatttagaagatttaaaacgtcaagttcaacaacataaagttttacaagaagatctagaacaagaacaagttcgtgtaaattcgttaacgcatatggttgttgtagttgatgaatcgtcgggtgatcatgcgacggcggcgttagaagaacaattaaaagttttaggtgatcgatgggcgaatatatgtcgatggacggaagatcgttgggtattactacaagatatactactaaaatggcaacgattaacggaagaacaatgtctattttcggcgtggttatcggaaaaagaagatgcggttaataaaatacatacgacgggttttaaagatcaaaatgaaatgctatcgtcgttacaaaaattagcggtattaaaagcggatctagaaaaaaaaaaacaatcgatgggtaaattatattcgctaaaacaagatctattatcgacgttaaaaaataaatcggtaacgcaaaaaacggaagcgtggctagataattttgcgcgatgttgggataatctagtacaaaaattagaaaaatcgacggcgcaaatatcgcaagcggtaacgacgacgcaaccgtcgttaacgcaaacgacggtaatggaaacggtaacgacggttacgacgcgtgaacaaatactagtaaaacatgcgcaagaagaattaccgccgccgccgccgcaaaaaaaacgtcaaataacggttgatacgctagaacgtctacaagaactacaagaagcgacggatgaattagatttaaaattacgtcaagcggaagtaataaaaggttcgtggcaaccggtaggtgatttattaatagattcgctacaagatcatttagaaaaagttaaagcgctacgtggtgaaatagcgccgctaaaagaaaatgtatcgcatgttaatgatctagcgcgacaattaacgacgctaggtatacaactatcgccgtataatttatcgacgctagaagatttaaatacgcgttggaaattattacaagtagcggtagaagatcgagttcgacaattacatgaagcgcatcgtgattttggtccggcgtcgcaacattttctatcgacgtcggtacaaggtccgtgggaacgtgcgatatcgccgaataaagtaccgtattatataaatcatgaaacgcaaacgacgtgttgggatcatccgaaaatgacggaactatatcaatcgctagcggatttaaataatgttcgtttttcggcgtatcgaacggcgatgaaattacgacgtctacaaaaagcgttatgtttagatttattatcgttatcggcggcgtgtgatgcgctagatcaacataatttaaaacaaaatgatcaaccgatggatatactacaaataataaattgtctaacgacgatatatgatcgtttagaacaagaacataataatctagtaaatgtaccgttatgtgtagatatgtgtttaaattggctactaaatgtttatgatacgggtcgtacgggtcgaatacgtgttctatcgtttaaaacgggtataatatcgttatgtaaagcgcatctagaagataaatatcgttatttatttaaacaagtagcgtcgtcgacgggtttttgtgatcaacgacgactaggtttattattacatgattcgatacaaataccgcgacaattaggtgaagttgcgtcgtttggtggttcgaatatagaaccgtcggttcgttcgtgttttcaatttgcgaataataaaccggaaatagaagcggcgttatttctagattggatgcgactagaaccgcaatcgatggtttggttaccggttttacatcgagttgcggcggcggaaacggcgaaacatcaagcgaaatgtaatatatgtaaagaatgtccgataataggttttcgttatcgttcgctaaaacattttaattatgatatatgtcaatcgtgttttttttcgggtcgagtagcgaaaggtcataaaatgcattatccgatggttgaatattgtacgccgacgacgtcgggtgaagatgtacgagattttgcgaaagtattaaaaaataaatttcgtacgaaacgatattttgcgaaacatccgcgtatgggttatctaccggtacaaacggtactagaaggtgataatatggaaacggatacgatg

SEQ ID NO: 342821 - DNA, 3591 bp, Artificial Sequence
  derived and/or modified sequence
atgctgtggtgggaagaggtggaggactgctacgaacgagaggatgttcagaaaaagactttcaccaagtgggtcaacgcacagttctccaagttcggcaagcaacatatcgaaaaccttttctccgatttgcaagacggccgacgattgctcgacctgctggagggtctgactggtcagaagctgccaaaggagaagggttcgaccagggtccacgccctcaataacgttaacaaggcattgcgcgtcctgcagaacaataatgtggacttggtgaacatcggttctacggacatcgtggacggtaaccacaaattgacccttggactcatctggaacattatcctgcattggcaggtgaagaatgtgatgaagaatatcatggcgggactgcagcaaaccaactccgagaagattcttctgtcctgggtgcgccaaagcaccagaaattacccacaggtcaatgtgatcaactttactacctcgtggtccgacggactcgctttgaatgcccttatccattcccacagaccggacttgttcgactggaactctgtcgtctgccaacagtccgcaactcaacggcttgagcatgcgttcaacattgcccgctaccaactgggtattgagaagctgctggaccccgaggatgtggacaccacttacccagataagaagtccatccttatgtacatcacttcgctgttccaagtgcttccacagcaagtctccatcgaggccattcaggaagtggaaatgcttccacgcccgcctaaagtgaccaaggaagaacacttccagctccatcaccagatgcactattcgcaacaaatcaccgtttcactcgcccaaggctatgagcggacgtcgtcgccgaagcctcgctttaagtcatacgcctacactcaagcggcgtacgtcaccacctccgatccaacccgatctccgttcccgtcccagcacttggaagccccggaagataagagtttcggttcatcactgatggagtctgaagtgaacctggaccgataccaaactgctcttgaagaggtgttgagctggctcctgtcggcggaggatactctccaagcgcagggcgaaatctctaatgacgttgaagtggttaaagaccagttccacacgcatgaagggtacatgatggacctcaccgcccaccaggggcgagtggggaacattctccagctgggatccaaactgatcgggactggaaaactgtcggaggacgaagagactgaagtccaagagcagatgaacctcctcaactccaggtgggaatgcttgcgcgtggccagcatggaaaaacagagcaacctgcatagagtgctgatggacttgcaaaatcagaagctcaaggaactgaacgactggctgaccaagaccgaggagcggactcgcaaaatggaggaggagccgctcggaccggatctggaagatctgaagcggcaggtgcagcagcacaaggtgctgcaggaagatctggaacaggaacaggtccgcgtgaattcactgacccatatggtggtcgtggtggacgaaagctccggagatcacgcaaccgccgcgctggaggaacagcttaaagtgctgggagacagatgggcgaacatctgccgctggactgaggacagatgggtcttgctgcaagatatcctgctcaaatggcagcgactgaccgaagaacagtgtctgttttcagcctggctgtcggagaaggaagatgccgtgaacaagatccatactactggcttcaaagatcaaaatgaaatgctgagctccctgcaaaagctcgcggtgctgaaggcagatctggagaagaagaagcagtcgatgggaaagctgtactcgttgaaacaggatttgctgagtaccctgaaaaacaaatcagtcacccaaaagactgaggcttggcttgataacttcgcgcgctgttgggataacttggtgcagaaactggagaaaagcaccgcacagatctcccaagcagtgaccaccacccagccgtcgctcacccaaactactgtgatggaaaccgtgactacggtaactaccagagaacaaatcctggtgaagcacgcgcaggaggagctgcctccgccgcctcctcaaaagaagaggcagatcaccgtcgacactcttgagcggttgcaggagctgcaggaggccaccgatgagttggatctcaagctcagacaagctgaagtcattaagggctcgtggcaaccagtcggtgatctgctcatcgacagcttgcaggatcacctcgagaaagtcaaggcgctgcgcggcgagatcgcgcctctgaaggaaaacgtgtctcacgtgaatgatctcgctagacaactcaccaccctgggaatccagctctcgccgtacaatctgtccactctcgaggatctgaacactcggtggaaactcctgcaggtcgcggtggaggatcgggtgcgtcaactgcatgaagcccaccgtgatttcggaccggcgtcgcaacacttcctttcaacgtccgtccagggaccctgggaacgcgccatctcgcccaacaaggtcccgtactacatcaatcatgagactcaaacgacttgctgggaccaccctaaaatgactgaactgtaccagtcgctggccgatctgaataatgtgagattttcggcttataggacggccatgaaacttcggcgcctgcagaaggccttgtgcctggatctcctgtcactgtcggcagcgtgcgatgccttggaccaacacaacctgaaacagaatgaccaacctatggacatcctccaaatcatcaactgccttaccaccatctacgatcgcctggaacaggagcacaataatctcgtcaacgtcccgctgtgcgtggatatgtgtctgaactggctccttaacgtgtacgacaccggaagaaccggacggatccgcgtgctcagcttcaaaacgggaatcatctcactgtgcaaagcgcacttggaagataagtaccggtacctcttcaagcaggtggcctcctctaccggattttgtgatcagcgccgcctgggactcctgctccatgactcaattcagatcccaaggcagctgggagaggtggcctcattcggtgggagtaatatcgaaccgtcagtgcgcagctgctttcagttcgccaataacaaacccgagatcgaagctgcgctctttctggactggatgcgcctggagccacagtcaatggtctggctcccggtgcttcatcgcgtggccgcagccgaaacggccaagcaccaggctaagtgcaatatctgcaaagaatgccctatcatcggattcagatacagaagcctgaaacactttaactacgacatctgccaatcgtgtttcttttccggaagagtcgctaagggacacaaaatgcactaccccatggtggagtactgcacgcctacgacttccggggaagatgtccgggacttcgccaaggtccttaagaacaagttcaggaccaagcgctatttcgccaaacacccacgcatgggctacctccccgtgcagaccgtactcgaaggcgacaacatggaaactgacaccatg

SEQ ID NO: 342822 - DNA, 3591 bp, Artificial Sequence
  derived and/or modified sequence
atgctttggtgggaagaagtcgaagactgttatgaaagggaagacgttcagaaaaagactttcacaaaatgggtaaacgcacagttttccaaattcgggaaacaacatattgagaatctctttagcgatcttcaagacggccgccgccttctggacttgctggagggcctgactggtcagaaacttcccaaggagaagggctcaacgcgagtgcatgccttgaataacgtgaataaagcgctacgtgtcctgcagaataataatgtcgacctggtcaacatcggatctactgacatcgttgatggaaaccataaattgacgttagggctgatctggaacattatcctgcactggcaggtgaaaaatgtgatgaaaaatataatggctggtttgcagcagacgaactctgaaaaaatcctgctcagctgggtgcggcagagcactcggaattatccccaggtaaatgtaatcaactttaccacctcctggagcgatggcctggcattgaacgcacttattcatagccatcgacccgacctgtttgattggaattccgtcgtatgccagcagagcgctacacagaggcttgaacatgcttttaatatagcacggtatcagctcggcatagagaagctgctcgacccagaggacgtcgacacaacataccctgacaagaagtcaatcttaatgtacattaccagcctgttccaggtgcttccccagcaggtaagtatcgaggcgattcaagaagttgagatgttgccacgccccccaaaggtgaccaaggaagagcactttcagttgcaccaccagatgcactacagccagcagattacagtgagcctggcacagggctacgaacgcacttcttctcccaagccacgctttaagtcttatgcctatactcaggctgcctacgtcacaacgtccgacccgactaggagcccatttccatcgcagcacctggaagctccggaagataagtccttcggctccagcctgatggaatccgaagtcaacctggatcgctatcagaccgctttagaggaggtcctaagctggttgctgtctgcggaagacaccctccaggcccagggagagattagcaatgacgtcgaggtggtcaaagaccagttccacacacatgaaggctatatgatggatcttactgctcaccaagggagagtgggtaatatcctgcaacttgggtctaaactgatcggcaccggcaaactcagcgaagacgaagagactgaagttcaggaacaaatgaacctgctcaattcccggtgggaatgcctcagagttgcaagcatggagaagcagagcaacttacaccgcgtgctcatggatctgcagaatcagaaactgaaggaactcaacgactggctgacaaagaccgaggaaaggactagaaaaatggaggaggaacccctgggtcccgatctggaggatttgaagaggcaggtgcagcagcataaggtgctgcaggaagacctggaacaggagcaagtacgcgtcaattcactaacacatatggttgtcgtcgtcgatgagtcatcaggggaccacgcaacggccgcgcttgaagaacagcttaaggtgctgggggataggtgggccaacatatgtcgttggacagaggacaggtgggtgctgctgcaggacatcttgctgaagtggcagcgtttgacagaggaacaatgcctgttttccgcttggctttccgagaaagaagacgccgtgaataagatccacacaacaggattcaaggatcagaacgaaatgctgtcttctctccagaaactggcggtgctgaaagcagacttggagaagaaaaaacagtctatgggaaaactctactcccttaaacaggacctactcagcacgctgaaaaataagagcgtcacccagaagaccgaggcatggttggacaatttcgcacgatgctgggacaacctcgtgcagaagctggagaaaagtacagcccagatcagccaggctgttacaaccacacagcccagcttgacgcagaccaccgttatggagaccgtcactacggtgactacacgcgagcagatcctcgtgaaacacgcacaggaagaactgccaccaccacctccccaaaagaagagacagattactgtggacactttggagagactgcaggaactgcaggaggcaacagacgagttagatctgaagctgcgccaggccgaagttataaaaggttcctggcagccagtgggtgatcttttgattgactcgcttcaagaccacctggagaaggtgaaggctttgagaggtgagatagcgcctctgaaggaaaacgtgtctcacgtgaacgacctggctcgacagctcactaccttgggtatccagctgagtccatataacctgagcaccttggaggaccttaatacacggtggaagttgcttcaggttgctgtggaggatagggtgcgccaactgcacgaggctcatcgagattttggtccggcttcacagcactttctcagcacctccgtacagggcccttgggaaagggctatttcacccaataaggtcccctattatatcaatcatgaaacgcagacaacctgttgggatcaccccaagatgacagagctctaccaatcactggcggatctcaacaatgtcagattttccgcctataggaccgccatgaagctgagacgcttacagaaagccttgtgcttggatctgctcagcctgtcggcggcttgcgatgcactggatcagcacaatcttaagcagaatgaccagccaatggacatcctgcagataattaattgtctgacaacaatctatgataggctggaacaggaacacaacaatctcgtcaatgtgcccttgtgcgtcgatatgtgtctgaactggctcctcaatgtgtatgacacaggcaggacagggcgtatccgggtgctgagtttcaaaacaggcatcatttccctgtgtaaggcccacttggaagacaaatacagataccttttcaaacaagtggcgagcagtaccggcttttgtgatcaacggcgactgggtcttctcctgcacgatagcatacagattcctcggcagcttggagaggtcgcgtcctttggcggcagtaacatcgaacctagcgtacgctcttgcttccagttcgctaataacaaacctgagatcgaggccgctctcttcttggattggatgaggttggagccacagtctatggtgtggctgcctgtgctccatcgagtcgctgctgctgaaacggcaaaacaccaggccaagtgcaacatctgtaaggagtgtccaatcataggtttccgctatcgctccctcaaacactttaactatgatatctgccagagctgcttcttctccgggagggttgccaaaggccacaaaatgcactatcccatggttgaatactgcacaccaactacatctggagaagatgttcgggacttcgccaaagttctcaagaacaaattccggaccaagcggtactttgctaaacaccctcggatgggctacctcccggttcagactgttttggagggtgacaacatggagacagataccatg

SEQ ID NO: 342823 - DNA, 3591 bp, Artificial Sequence
  derived and/or modified sequence
atgttgtggtgggaggaggtggaggattgttatgaacgggaggatgtgcaaaagaagacctttaccaaatgggttaatgcccagttctccaagtttgggaaacaacacattgagaacttattctccgaccttcaggatggcaggcgactgctggatctgctggagggcctcaccggccagaagctgccaaaggagaaaggatctacgcgtgtccacgctctaaacaatgtgaataaggccctcagggtgctgcaaaataataatgtggatctggttaacatcggaagcaccgatatcgtggatggaaaccacaagctcacactggggctgatatggaatattattctacactggcaggtgaagaacgttatgaagaacatcatggcggggctacagcagacaaactcagagaagatactgctgtcttgggttcgccagtctactaggaattatccacaggtgaatgtaataaacttcaccacgagttggtcggacgggttggctttgaatgcacttattcatagccacagaccagatttgttcgattggaactctgtggtttgtcagcagtcagcaacgcagagattggagcatgctttcaacattgccaggtatcagctgggcattgaaaagttgctagatcctgaagatgtcgataccacgtatcctgacaagaaaagtatactgatgtacattacctcgctgtttcaggtgttaccacagcaggtctctatcgaggccatccaggaggtggagatgctgcccaggccacctaaagttaccaaggaggagcactttcagctgcaccaccagatgcactactctcagcaaattaccgtatcattagctcagggctatgagaggacatcctcccccaaaccacgctttaaatcatacgcatacacgcaggctgcgtacgtaaccacaagtgatcctacacgatccccctttccctcccagcaccttgaggcccctgaggataaatcctttggcagttccctgatggaaagtgaggttaacctcgatcggtatcagactgctctcgaagaggtcctcagttggctgctctcagcagaggacacgctgcaagcccagggggaaatcagcaatgatgtggaggtggtgaaagaccaatttcatacgcacgagggatatatgatggacttaactgctcaccagggaagagtaggaaacatactccaacttggctcaaagctgataggaacagggaagctcagtgaggacgaggaaacagaagtgcaggaacaaatgaacctcctgaatagccggtgggagtgtttacgagtcgcctcgatggagaagcaaagtaatctgcatcgcgtcttaatggacctccagaatcagaaacttaaggaattgaatgattggctcaccaagacggaagagagaacccggaagatggaagaggagcccctaggtcctgacctggaggacctgaagagacaggtccagcagcacaaagtcctgcaagaggacctggaacaggagcaggtccgagtaaacagcctgacgcatatggtagtggtggttgatgagagttcaggtgaccacgccacagccgccctggaagaacaactgaaggttctgggtgatagatgggctaacatctgtagatggacagaggataggtgggtcttgctgcaggacatcctgctgaagtggcagcgattaaccgaggagcagtgcctgttcagcgcctggctgtccgaaaaggaggacgcagtgaacaagatccacacaaccggattcaaagatcagaacgagatgttgtcgtcgctgcagaagctcgcagttcttaaagcagatttggaaaagaagaagcagtctatgggcaagctttacagcctcaagcaagatttgctgagtactctgaagaataagagcgtgacacagaaaaccgaagcctggctggataatttcgctaggtgttgggataatctcgtgcaaaagttggagaagagcaccgctcagatctcccaagctgtgaccacaacacagccgagtctcactcaaactaccgtgatggagaccgtcactaccgtgacaacacgcgaacagatcctcgtcaagcatgcccaggaagagttgccgccccctcctccccagaagaagcgacagatcacagtcgataccctagagcgcttgcaggagcttcaggaggccacagacgagctcgacttaaagttgaggcaggccgaggttattaagggctcatggcagcccgtgggggatctgctaatcgacagtctccaggaccacctggagaaagtgaaagccttgagaggggagatcgcgcccctgaaagagaatgtttcccacgtgaatgatctggcccggcagctcacaacgctggggatccaactgtccccctataacctttctaccctggaagatttgaatacccgctggaaacttctccaggtggccgtggaagatcgggttaggcagttgcatgaagcccatcgagattttgggcccgccagccagcacttcctatcaaccagtgtgcaaggcccctgggagcgagctatctcccctaacaaggtgccctattatattaatcatgagacgcaaacaacctgttgggaccaccccaagatgacggaactctatcagagtttagcggacctgaataacgtgagattttcagcctaccgtaccgcaatgaagctgagacggctgcagaaagcattgtgcctggatctactgagcttaagcgcagcctgtgatgccctggatcagcacaatctcaaacagaatgatcagccaatggatattctccagatcatcaactgtctcaccactatatacgatcgcctcgagcaggaacataataacctcgttaatgtgcctctgtgcgttgacatgtgtcttaattggctgcttaatgtctacgacacaggccgtaccggtcggattcgcgttttgagttttaaaacaggaattatctccctgtgcaaggcgcacctcgaggacaagtatcgctacctgtttaaacaggtcgcatcttctactgggttctgcgaccaaagaaggctcggcctgctcctccacgattcgatccagattccccgtcagctgggtgaagtggccagctttggcggctctaacatcgagccaagtgtccgcagttgcttccaatttgctaacaacaagcccgaaatcgaggctgcgctgtttctagattggatgaggctagaacctcagtcaatggtgtggttaccagtcctacaccgcgtggcagcagccgagacagccaagcaccaggcaaagtgcaatatatgtaaagagtgcccgataattggctttcgataccgttcactgaagcattttaattatgatatatgccagtcctgttttttttccggacgcgttgccaagggacataagatgcattacccaatggtcgagtattgcacccctacgacatccggggaagatgtgcgagattttgccaaggttctgaaaaacaagtttcggacaaaacgctatttcgccaaacaccctcggatgggctatctaccggttcagaccgtgctggagggagacaacatggagactgataccatg

SEQ ID NO: 342824 - DNA, 3591 bp, Artificial Sequence
  derived and/or modified sequence
atgctctggtgggaagaagtcgaggactgctatgagcgtgaggatgttcagaaaaaaacctttactaagtgggtgaacgcgcagttcagtaaattcggcaaacagcatatcgaaaatttgttctccgacttacaggatggaaggcggctcctagatctgctggagggtctgaccggacagaaactgccaaaagaaaagggctcaaccagagtgcatgccctgaataacgtgaataaagccttgcgcgtgctgcaaaataacaacgtggatctggttaacatcggctcaaccgacatcgtggacggcaaccataaactcaccctgggactgatatggaacatcatacttcactggcaggtgaaaaacgtgatgaagaatatcatggccggtctgcagcagacaaattcagagaagatccttctctcctgggtcaggcagtctacccggaactatccccaggtgaatgtgattaattttactacaagttggagtgacggactcgccctgaacgctctcattcactctcacaggcccgacctctttgactggaattccgttgtctgccagcagtcagccacccagagactggagcacgctttcaatattgccaggtatcagctgggcatcgaaaagctgctggaccccgaggatgtggacactacttatccagataagaagtcgattttgatgtatatcacaagtctcttccaggtcttgccgcagcaggtctctatcgaagccatccaggaagtcgaaatgctcccaagaccacctaaggtcactaaagaggaacactttcagctccatcatcagatgcactacagccagcagatcaccgtgagtcttgcccaggggtacgagagaacgagtagccctaagcctagatttaagagttacgcctatacccaggctgcttacgtcaccactagtgacccaacgcggtctccgttcccaagccagcacctggaggctcccgaagataaatctttcgggtccagcttgatggagtccgaggtcaatttagatcggtatcagaccgcacttgaggaagtgctttcatggcttctgtccgcagaagatacgctgcaggcacagggggagatcagtaatgatgtcgaggtagtaaaagatcagttccatacacacgaaggctatatgatggacttgactgctcatcaaggaagggtgggaaacattctgcagctcgggtcaaaactgatcggcactggaaagctgtccgaagacgaggagaccgaggttcaggaacagatgaacctgctgaactcgcgttgggagtgtttgcgagtcgccagtatggaaaagcagagcaacttgcatcgggtcttgatggatctgcaaaatcaaaaattgaaagagctgaacgattggctcaccaagaccgaagagagaactcgcaaaatggaggaagagccacttggcccagaccttgaggatctgaagcgacaagttcagcagcataaagtactccaagaagacctggagcaggagcaggtgcgagtaaatagcctgactcatatggtggtggtggttgacgagagctccggagaccacgccactgccgctctggaagagcagctgaaagtcctcggcgaccgctgggcaaatatttgccgctggactgaggaccgatgggtactgctccaggatatcctattgaagtggcagcggctgaccgaggaacaatgtttgttttctgcgtggctgtccgaaaaggaggatgctgtaaataagatccacacaaccggatttaaagaccaaaacgaaatgctgtcctctctgcagaaactcgcggtcctgaaagcagatctggagaagaaaaagcagtcgatggggaaattatactctctcaagcaggatctgctcagcaccctgaaaaacaagagtgttacgcagaagacagaggcgtggctggacaatttcgccagatgctgggacaatctcgtgcaaaagttagaaaagagtacagcccagattagccaggctgtgacgaccacccagcccagtctcacccaaaccacagtgatggagactgttacaaccgtgacaactcgtgaacagatactagtaaagcatgcccaagaggaactgccaccgccacctccacagaagaagaggcaaatcactgtggacactttagaaagactgcaggaactgcaagaggctaccgacgagctggatctgaaactgaggcaggctgaagttatcaaagggtcttggcagccagtgggggatctgcttattgacagcctccaggaccatctagaaaaagttaaggctctgaggggcgagatcgcacctctgaaggagaatgtgtctcacgtcaatgacctggcgcggcagttaaccacactgggtatccagctctccccgtataatctctccacactagaggacttgaacactcggtggaagctgctccaggttgccgttgaggacagggttcgacaactgcacgaggcgcatagagacttcgggcccgcttcacagcatttcctcagcaccagcgtccaaggcccatgggaaagggccatcagccccaataaggtaccctattacatcaaccatgagacgcagaccacctgctgggatcatcctaaaatgacggaactataccaatctcttgccgacctaaataatgttcgattcagcgcctataggacagcgatgaaacttaggcgcctgcagaaggccttgtgtctggatttgctaagtctgtccgccgcctgtgacgcgctcgaccaacacaatctgaagcagaacgaccagcccatggacattcttcaaatcatcaactgtctaactaccatatacgatcgcctcgagcaagaacataacaaccttgtgaatgtgcccctgtgcgttgacatgtgcttgaactggctgttgaatgtatacgacacaggacggacgggacgcatccgcgtgcttagcttcaagaccgggattattagtctttgcaaagcccacctcgaggataagtataggtatctattcaagcaagtggcctcttcaacagggttttgcgatcagcggaggttgggccttctgttgcatgattctatccagatcccacgtcagttgggtgaagtagctagttttggcggaagtaatattgagccaagcgtgcgcagttgcttccagttcgccaataacaaacccgaaatagaggccgcgctcttcttagattggatgagactagagccacagtcgatggtgtggctgccagtcctgcacagggtggctgcagcggagactgctaaacaccaggctaagtgtaatatctgtaaagagtgtcccataataggctttaggtataggtcactgaagcacttcaattatgatatctgtcagtcatgctttttcagcggccgagtggcaaaggggcataagatgcactatcccatggtcgaatactgcacccccacaacttctggtgaggatgttcgggacttcgccaaagtgttaaagaataagttccgcaccaaacggtattttgccaagcatccgcgaatggggtacctgcccgtgcagactgtccttgaaggagacaacatggagacggacaccatg

SEQ ID NO: 342825 - DNA, 3591 bp, Artificial Sequence
  derived and/or modified sequence
atgctgtggtgggaagaggttgaggattgctatgagagggaagacgttcaaaaaaaaacctttaccaaatgggtgaacgcccaattctccaagttcggtaagcagcatatcgagaacctgttctctgatttgcaggacggccgtcggcttctggatctgcttgaggggctcacgggacagaaactgcctaaggagaagggaagcaccagagtccacgcgctgaacaacgtgaataaggccttgagagttctgcagaacaataacgttgatttggttaacattgggtcaactgatatagttgacgggaaccacaagttaacccttggcctgatatggaatataatactgcattggcaggtgaagaacgtgatgaagaatataatggcaggcctgcagcagacaaactccgagaagattctcctctcctgggtgcgccagagcacacgtaattacccccaggtgaacgtcattaacttcacaacctcctggtccgatggcttggcacttaatgccttgatacattcccatcggccggatctctttgactggaacagtgtggtgtgtcaacagagtgctacacagcgacttgagcacgcttttaacatagctagatatcagctagggatcgagaaactgctggatcccgaggatgtggatacgacctaccccgacaaaaagtccatcctcatgtacatcacttccttgtttcaggtgctgcctcaacaggtcagcatcgaggcaatccaggaagtggaaatgcttcccagacctcctaaggtgacgaaagaggagcacttccagctgcatcatcagatgcactactcacagcaaattacagtgtccctggcgcagggctacgaacgcacttcctctccaaagccaaggtttaagagttatgcttacactcaagctgcttacgtaacaacctccgacccaacccggtcgccttttcctagccaacacctggaggctcccgaggataaatcttttggctccagtctcatggagtccgaggtgaatctcgatcgctatcagacggcgctggaggaggtcctcagctggttgctgagtgctgaggataccctccaggcacagggtgaaatttccaacgacgtcgaagtggtcaaggatcagtttcatacacacgaagggtacatgatggatctgacagctcaccagggacgtgttgggaatatcctgcagttgggtagtaagctcatcggcacgggaaagctttccgaagatgaggagaccgaggtgcaggagcagatgaaccttctgaattctaggtgggagtgcctaagagtggcttcaatggaaaaacagagcaacctgcaccgggtgttgatggacctccagaatcaaaaacttaaggagttaaacgactggctgactaaaactgaggagagaacacgcaagatggaagaagagcccctaggacccgacctggaagacttgaagcgtcaagtgcagcagcacaaggtccttcaggaggacctcgaacaggagcaggtaagagttaactccctcacacatatggtggttgtggtagacgagagcagcggggaccacgcaaccgcagcccttgaggagcaactcaaagttctgggggaccggtgggcaaacatctgcaggtggacagaggatcggtgggtcttgctccaggacattctgctcaagtggcagcggttgaccgaagagcaatgtctcttttctgcatggttgagcgagaaagaagacgcggtgaacaagatacatacaaccgggttcaaagaccagaacgaaatgctgtcctcactacagaagttggccgtgctcaaggcggacttggaaaaaaaaaagcagagtatgggcaaattgtattcactcaagcaggatctcctgtccactctgaaaaacaaatcagttactcaaaagacagaggcttggctcgacaattttgctcgctgctgggataatctcgtgcagaagttagagaaaagtaccgcccagatatcgcaggccgttaccactacacagccctccttaacccagacaaccgtgatggagactgtgacgactgtgaccactagggaacaaattcttgtcaaacacgctcaggaagagttgccacccccaccaccacagaagaagcgacaaatcaccgtagatacgcttgaaagactgcaggagttacaggaggccaccgacgagctagaccttaagctcaggcaagcggaggtaatcaaaggaagctggcaacctgtgggggatcttctaatagacagcctgcaggatcacctggagaaggtgaaagcgcttaggggcgagattgcacctctcaaggagaacgtctcacatgtcaacgaccttgcacgtcagctaacaacgctgggcatacaactgagtccctataatctctcgacactggaggacctcaataccagatggaaactactacaggttgccgttgaagacagagtccggcagcttcatgaggcccatcgagatttcgggcccgcttcgcagcactttttgtcgacttcagtgcaaggcccctgggagagggccattagcccaaacaaggtgccgtactatataaatcatgagacacaaacaacctgctgggaccatccgaaaatgacagagttgtatcagtctttggcagatctgaataacgtcaggttctcagcatacagaaccgccatgaagttgcgcaggttgcagaaagccttgtgccttgacctcctgtctctgagcgctgcatgtgacgccctcgaccaacataacctaaaacaaaacgaccaacccatggacatccttcagatcataaattgcctgacaacgatctacgatagattggaacaggaacataacaatttagtaaacgtccctttatgtgtggacatgtgtcttaattggctgttaaatgtctatgatactggtaggacgggccggattagggttctctcatttaagacagggatcatctctctgtgcaaagcccacttagaagataagtacagatatctgtttaaacaggtggcctcgtctacggggttctgcgaccagcgcagattgggactcctgctacatgacagcattcagattccgaggcaactcggggaggtcgcatcatttggaggctctaatatcgagccctctgtgcgatcctgcttccagtttgcaaacaataaaccggaaatcgaggctgcactgttcctggactggatgcgactggaaccccaatcaatggtctggctccctgttctgcacagagtcgcggctgccgaaacagctaagcaccaggccaagtgcaatatttgtaaagaatgtccaatcattggtttccgatatagatcgttaaagcattttaactacgacatttgtcagtcttgtttcttctcaggccgggtggctaagggccataaaatgcattatccaatggtggaatattgtacaccaactacaagcggcgaagatgtgagggatttcgccaaggtccttaagaacaagtttcggaccaagcgatatttcgctaagcatccacggatggggtatctacccgtccagaccgtgttagaaggtgacaatatggaaactgataccatg

SEQ ID NO: 342826 - DNA, 3591 bp, Artificial Sequence
  derived and/or modified sequence
atgctgtggtgggaggaagtcgaggactgttacgagagagaggacgtccagaagaaaacttttaccaaatgggtgaacgctcagttctcgaaattcggcaagcaacacatcgagaacctcttttccgatctgcaagacggtcgcagattgctggacctgttggagggactgaccggccaaaagctgccgaaggagaagggttcgactcgagtgcacgccctgaataacgtgaacaaggcacttcgggtccttcagaacaacaacgtggatctggtgaatatcgggtcgaccgacattgtcgacggaaaccacaaattgacccttggactcatctggaacatcatcttgcactggcaggtgaagaacgtcatgaagaatatcatggcaggactgcagcaaactaactccgagaagatcctgctgtcttgggtccgccagagcactcgcaattacccacaagtcaatgtgatcaatttcactacttcttggtcagacggcctcgcgctcaatgctcttattcatagccataggccggacctcttcgactggaactcagtggtctgccagcaatccgccactcagcggctcgaacacgcgttcaacatcgcacgttaccagctgggcattgaaaagctcttggatccagaagatgtggacactacctaccctgacaagaaatcgatcctgatgtatatcacgagcctgttccaggtgctgcctcagcaagtgtccatcgaagcgattcaggaagtggaaatgctcccacggccaccgaaggttaccaaagaagaacacttccagctccatcaccagatgcactattcgcagcagatcaccgtttcgctggcacagggttacgagagaactagctcgccaaagcctcggttcaagagctacgcctacactcaagccgcttacgtgaccacctccgatcccacccgatccccattcccgtcgcagcacctcgaagcaccagaggataagtcattcgggagcagcttgatggaatccgaggttaacctggacagatatcagactgccttggaagaggtcctgtcatggctgttgtcggcggaggacacgctccaagcccagggagagatctcgaatgatgttgaggtggtcaaggatcagtttcacacccatgagggatacatgatggacctgaccgctcatcaaggtagggtgggaaacatcctccagctggggtcgaaactgatcggcactggcaaattgtcggaagatgaggagactgaagtgcaggagcagatgaatctgctcaattcacgctgggagtgcctccgcgtggcgtcaatggaaaagcaatccaacctccatcgcgtgctgatggacttgcagaaccagaagctcaaagagttgaacgactggcttacgaaaaccgaagaaagaaccaggaagatggaggaagagcctctggggccggatctggaagatctgaagcggcaagtccagcaacataaagtgctccaggaagatctggaacaagaacaggtgagagtgaattcgttgacccatatggttgttgtggtggatgagagctcgggagatcacgccaccgcggcccttgaggagcagctcaaggtgctgggggaccgttgggccaatatctgcagatggacggaggatcgctgggtgctgctgcaggacatcctcttgaagtggcagagactgactgaagagcaatgccttttctccgcctggctctcggagaaggaggacgcggtgaacaaaatccacacgactgggttcaaagatcaaaacgagatgctgtctagcctccagaagttggcagtgctgaaggccgatttggagaaaaagaagcaatctatgggaaagctgtacagcctgaagcaagacctgctgtccactctgaagaataagtcagtgactcaaaagaccgaagcgtggctggacaatttcgcgcggtgctgggacaatcttgtccagaagctggaaaaatccaccgcgcaaatatcgcaggccgtcactaccactcaaccttctctcactcaaaccaccgtgatggaaactgtcaccactgtgactaccagagaacagatcctggtgaagcacgctcaagaagagctgccacccccgccgcctcaaaagaaacgccaaatcactgtggacactctggaaagactccaagaacttcaagaggccactgatgaactcgacctgaagttgaggcaggcagaagtgattaagggatcgtggcagccggtcggcgatctgctgattgactccttgcaagatcatctggagaaggtcaaggcgctgaggggagaaatcgcccctctgaaggaaaatgtctcgcacgtgaacgacctcgcccggcagctgaccacgctgggaattcagctctccccgtacaacctgtcaacccttgaagatttgaacacgcgctggaaactgctccaggtcgctgtggaagatagggtccgccaattgcacgaagcgcaccgggattttggacctgcctcccagcacttcctgagcacttccgtgcagggcccgtgggagagggccatctccccgaataaggtgccgtactacattaatcacgaaacccagactacgtgctgggatcaccccaagatgacggagctgtaccagtccctggcggatctgaacaacgtgcgcttctcggcctaccgcacggcgatgaaactccgacgccttcagaaggcgctgtgcctcgatctcctgtctcttagcgccgcgtgcgatgctctggaccagcacaacctgaagcagaacgaccaaccgatggacatactgcagatcatcaactgcctcactactatctacgacagactggagcaggagcacaacaatcttgttaatgtgcctctctgcgtggacatgtgcctcaattggctgctcaatgtttacgataccggtcgcactggacggatccgggtgctgagctttaagaccggaatcatctccctgtgcaaagcgcatctggaggataagtatcgctacctgttcaagcaggtcgcatcctccaccggcttctgtgaccaacggagactgggactgctcctgcatgactccattcagatccctcgacagctgggagaagtcgctagctttgggggcagcaacatcgaaccgtcggtgcggtcctgttttcaattcgcaaacaataagccagaaatcgaagcagccttgtttctggattggatgcgcctcgagccgcagtcaatggtctggctccccgttcttcatagggtcgccgccgccgaaaccgcgaagcatcaagcgaaatgcaacatctgtaaggaatgtcccatcattggtttccgctacagaagcctgaaacactttaactatgacatttgccaatcatgcttcttctctggcagagtcgcaaagggtcacaaaatgcattacccgatggtcgaatactgtactccgacgacctcgggagaagatgtgcgcgacttcgctaaggtcctcaaaaacaagtttcgaaccaaacgctacttcgccaagcatcctcgcatggggtacctgcctgtgcaaaccgtgctggaaggggataacatggaaaccgacacgatg

SEQ ID NO: 342827 - DNA, 3591 bp, Artificial Sequence
  derived and/or modified sequence
atgctttggtgggaagaggtcgaggactgctacgagcgggaagatgtgcagaaaaaaacttttactaagtgggtgaatgctcagtttagtaagttcgggaagcaacacattgaaaaccttttctcggatcttcaggatggccggcgcctgctggacctactggaggggctgacaggccagaagctgcctaaggagaaagggtccacacgcgtgcacgcactaaacaatgtaaacaaggctctgagggttctgcagaataataacgtggacttggtaaacattggtagcaccgacatcgttgatggcaaccacaaactgacactgggcctcatctggaacatcatcctgcactggcaggtgaagaacgtgatgaagaatataatggctggcctgcaacaaacgaactctgagaaaattttgttgtcctgggtgcgtcagagcacgaggaactatcctcaggtgaatgtgataaatttcacaaccagctggagtgatgggctagctctgaacgccctgattcactcccaccggccagatctgtttgattggaattcagtcgtctgccaacagagcgcaactcaacgtcttgaacacgccttcaatatagccaggtaccagctcggcatcgagaaactccttgaccccgaagatgtggacacgacgtatccagataagaagtctatcctgatgtatatcacttcccttttccaagtgctcccccagcaggtaagcattgaggccattcaggaggtcgagatgctgccaaggccaccaaaggtaacaaaggaggaacactttcagctgcatcaccagatgcattattcccaacaaatcacggtaagcctggctcagggttacgagcgcacttcgtcccctaagcctagatttaagtcctacgcttacacacaagcggcctacgtgaccacttctgatccaacaaggtcaccctttccttcccagcatctagaggcgcctgaggacaagtccttcggctcgagtcttatggagtcagaagttaacctcgaccggtaccaaactgccttggaggaggtgctatcctggcttctcagtgcggaagatactctacaggcccagggcgaaatatccaatgacgtggaggtggtgaaggatcaatttcacacccacgagggctatatgatggatctgaccgcccatcaggggcgggtgggcaatattctgcagctagggtctaagctaatcgggacgggaaaactctcagaagacgaagaaacggaagtgcaggaacaaatgaacctgcttaatagcagatgggaatgtcttagggtagcctcaatggagaagcagagtaatctgcaccgcgttctcatggacctccagaatcagaagttgaaggagctgaatgattggcttacgaaaaccgaggagcggaccaggaaaatggaagaggagcccctcggcccggacctggaggatctgaaacgtcaggtgcaacagcacaaggtcctgcaggaggacttagaacaggagcaggttcgcgtgaacagcttaactcatatggttgtggtggtagatgaaagctccggagaccacgccaccgccgccctggaagaacagctcaaggtgctcggggaccgatgggccaatatctgtcgttggacggaggaccgctgggtcctgcttcaggatatcctgcttaagtggcagcggctcacagaggagcagtgccttttttctgcttggttatcggaaaaagaagatgccgtgaacaagatacataccactggcttcaaggaccagaacgagatgctctcatcattacaaaagctggcggtactgaaggctgaccttgaaaagaagaagcaaagtatgggtaaactttatagtcttaagcaggaccttctttctacactcaagaacaaaagcgtcacccagaagacagaggcatggttggacaattttgcgcggtgttgggacaaccttgtgcagaagctggagaagtctaccgcccaaatttcccaggccgtgacgaccactcagccctctttaacccagactacagttatggaaactgtaacgactgtcacaacccgagagcagattttggttaagcacgcacaggaggaactgcctccgccgccgcctcaaaaaaaaaggcagatcacagtagacactctcgaaaggctgcaggagttacaagaagccaccgatgagctggaccttaaactgagacaagctgaagtgatcaaggggtcttggcagcccgttggggatttgctgattgattcgttgcaggaccacttggagaaggtgaaggccttaaggggggaaatcgctccactgaaagaaaacgtctcccacgtgaacgaccttgctcgacaactgacaactcttggaattcagctctcaccttacaaccttagcacactcgaagacctcaacactcggtggaaattgctgcaggttgccgtcgaggatcgggtgagacagcttcacgaggcccaccgcgacttcggacccgctagtcagcactttctgtctacatccgttcagggaccatgggaacgggccatctctcccaacaaagtcccctactatataaatcacgaaacgcagacaacatgctgggatcaccctaagatgaccgagttgtatcaatcactggcagaccttaacaatgttcggttttctgcttacaggaccgccatgaaattaaggcgactccagaaggccctctgtctcgacctgctgtctctttctgctgcctgcgacgcactggatcagcacaatctgaaacagaacgaccagcctatggacatcctgcagattattaactgcctgactacaatctacgaccgattagaacaggagcacaacaacctggtgaacgtgccactgtgtgtcgacatgtgcctgaactggctgctcaacgtctacgacacaggccgaactggaagaatcagagtcctctcattcaaaacgggaatcatcagcctgtgcaaggctcatctggaggacaaatatcggtacctgtttaagcaagtggcctctagtactggattttgcgaccaaagacggctggggctcttacttcacgactccatacaaatcccacgccagctgggagaggttgcgagcttcggcggtagcaacatcgaaccaagcgttcgcagctgctttcagtttgcaaataataagccagaaattgaggcggcgttattcctggattggatgcgccttgaacctcagtccatggtgtggctgcctgtgcttcaccgcgttgccgcagcagagacagccaaacaccaggctaaatgtaacatctgcaaagaatgtcccatcattgggttccgctatcggtcactgaaacacttcaactacgatatctgccagagctgcttcttttccggccgcgtagccaaaggacacaaaatgcactatccaatggtggaatattgcacgcccacaacctctggggaggatgtaagagattttgcgaaggtgctcaagaacaagtttaggactaaaaggtatttcgcgaagcatccacggatgggctacctgccggtacaaacagttctagagggggacaatatggagaccgacacaatg

SEQ ID NO: 342828 - DNA, 3591 bp, Artificial Sequence
  derived and/or modified sequence
atgctgtggtgggaggaggtggaggattgctacgaaagggaggacgtccagaaaaagactttcacgaagtgggtgaacgcccaattttcgaaatttggtaaacaacatatcgaaaacttgttttcggacctccaggacggcagacggctgctggaccttcttgaaggactgactggacagaaactcccaaaggaaaagggatcgactcgcgtccacgcgctcaataacgtgaataaggccctgcgcgtgctgcaaaacaacaacgtcgacctggtgaacatcggctccaccgacatcgtcgatggaaaccacaagctgaccctcggactgatctggaatatcatcctgcattggcaggtgaagaacgtgatgaaaaacattatggctggactccagcagactaattcagagaaaattctcctctcatgggtgcggcaaagcacccggaattacccgcaggtcaacgtgatcaacttcactacctcgtggtcagacggactggccctgaacgcacttatccactcccacaggcctgacctgttcgactggaactcagtggtctgccagcaatcagccacccagagactcgaacatgcgtttaacatcgcacggtaccagctggggatcgaaaagctgctggacccagaggacgtggataccacctaccctgacaaaaagtccatcctgatgtacattaccagcctgttccaggtgctcccgcaacaggtgtctatcgaggccattcaggaagtcgaaatgcttcctagaccaccgaaggtgacgaaagaggagcacttccaactgcaccatcagatgcattactcgcaacaaattaccgtgagcctggctcaaggatacgaaaggacctcctcccccaaaccgcggttcaagtcctacgcctatactcaggctgcatacgtgaccacctcagatccgacgcgctccccgttcccgtcacagcatctggaagcaccggaggataagtcattcggatctagcctgatggagtcggaggtcaatttggatcggtaccaaacggccctggaagaggtgctgtcgtggctcctgtcggccgaggatactcttcaggcgcagggcgagatctccaacgacgtagaagtggtcaaggaccagttccacacccacgagggatacatgatggacctgacggctcatcagggccgagtcggaaatatcctgcaactggggtcgaaacttattggtaccggaaaactgtcggaagatgaagagactgaagttcaggagcagatgaatctccttaattcgaggtgggagtgtctgcgcgtggcctcaatggagaagcaaagcaatttgcatagggtgttgatggatctgcaaaaccagaagctgaaggaactgaacgactggctgaccaaaactgaggaacggacccgaaagatggaggaggagccgctcggaccggacctggaagatctcaagcggcaggtgcaacagcacaaagtcctccaggaggatctggaacaagaacaagtgcgcgtcaacagcctgacccatatggtggtggtcgtggatgaatcatccggcgaccatgccaccgcagccctggaagaacaactgaaggtcctgggcgatagatgggcgaatatctgtcgctggaccgaggaccggtgggttcttctgcaagacatcctcctgaaatggcagcgcctgaccgaagaacagtgcctgttttccgcctggctgagcgagaaggaagatgctgtcaacaagatccacactaccggtttcaaagatcagaacgagatgctgtcgtcactgcaaaagctcgcggtcctgaaggctgatctggagaaaaagaagcaatcgatgggtaaactttacagtctcaagcaggatctgctcagcaccctgaagaataagtccgtgactcaaaagaccgaggcctggctggacaatttcgctcggtgttgggacaacctggttcaaaagctcgaaaagtcgaccgctcaaatctcacaggccgtcactaccacccaacctagcctgactcagaccacggtcatggaaaccgtcactaccgtgactaccagggaacagattctcgtgaagcacgcccaggaggaactgcccccgccgccaccgcaaaagaaacggcaaatcaccgtggacactctggagcgcctgcaggagctgcaggaagctacggatgaactggacctgaagctgcgccaggcggaagtgattaaaggctcgtggcagccagtcggagatctgctgatcgactcactccaagaccacctggagaaggtgaaggctctgcgcggcgagatcgctccgctgaaggaaaacgtctcacatgtgaatgatcttgcacggcagttgactaccttgggaatccagctttccccctacaatctcagcacgcttgaagatctcaatacgcgctggaagctgctccaggtggccgttgaggatcgggtgagacagctccatgaagcgcatagggattttgggcctgcctcgcagcacttcctgtccacctccgtccagggaccgtgggagcgggccatctcacctaacaaagtgccgtactatatcaatcacgagactcagactacctgctgggatcaccccaagatgactgaactgtaccaaagccttgccgacctcaacaacgtccggttttctgcgtaccgcactgctatgaaactgaggaggttgcaaaaggccctttgcctggatttgctgtccctctcggccgcatgcgatgctctggaccagcacaacctcaagcagaacgaccaaccaatggatattctgcaaatcatcaattgcctgactacgatctatgatcgcctggaacaggaacacaacaacttggtaaacgtgcctttgtgcgtggacatgtgtctgaattggctgctgaatgtgtacgatacgggacgcactggaaggatcagggtcctgtcgttcaagaccggcatcatctccctgtgcaaggctcacctcgaggacaagtatcgctacttgttcaagcaggtggcaagctctaccggcttctgcgatcagagacgcctcggcttgttgctgcacgactcaattcaaatcccgcgccagctcggagaggtggcgagtttcggcggctcaaatatcgagccatccgtgcggtcctgcttccaattcgctaataacaagcctgagatcgaagccgcgctgttccttgattggatgcggctcgagcctcagtctatggtgtggctgcctgtgttgcatcgggtcgcggccgcagagactgccaagcatcaagcaaagtgtaacatatgcaaggagtgcccgatcataggatttcgctacagatcattgaagcactttaactacgacatctgtcagtcctgctttttcagcggccgggtggctaagggacataagatgcactacccaatggtggagtactgcactcctaccactagcggagaggacgtccgcgactttgccaaggtgctcaagaacaagttcaggactaagcggtacttcgcaaagcatccgaggatgggatacctcccagtgcagactgtcctggagggcgataacatggaaaccgacacgatg

SEQ ID NO: 342829 - DNA, 3591 bp, Artificial Sequence
  derived and/or modified sequence
atgctgtggtgggaagaagtggaagactgttacgaacgtgaagacgtgcagaagaaaacatttaccaagtgggtgaacgcacagtttagcaaatttggtaaacagcatatagagaacctattcagtgatctacaggatggccgaaggctgctggatctgctggagggactgactgggcagaagctgcccaaagagaagggctctactagagtacacgctctgaacaacgtcaacaaggctctgcgtgtgcttcagaataacaatgttgatctggtgaacatcggaagcacggacatagtggatgggaatcataaactgaccctgggcctcatctggaacatcattctgcattggcaggtgaaaaatgttatgaagaacatcatggcagggctccagcaaacaaacagcgaaaaaatcctgctctcctgggtgcggcagtccactagaaactatccccaggtaaacgttatcaacttcacaacttcctggtccgatggcctcgccttgaacgccctcattcactctcacaggcctgatctgttcgattggaatagtgtagtttgtcaacagtctgccacccagcgtctggaacacgcattcaacatcgccaggtatcagttggggattgagaagctgttagatcctgaggacgtggacacaacctaccctgacaaaaagagcatcctcatgtatatcaccagtttgttccaggtcctgcctcagcaggtaagcatcgaagcgatccaggaagtggaaatgctgccccgaccacccaaggtgaccaaggaggagcatttccagctgcaccatcagatgcattactcgcagcagattacagtgagtctggcccagggctacgaacggacttcatctccaaagcctagatttaaaagctacgcctacacgcaagcagcctacgttaccacttcagatcctacccgatcccctttccctagtcagcacctcgaggcgcccgaggacaagagctttggcagcagccttatggaaagcgaggtgaatttggaccgctaccagacagccctggaagaagtgttgtcctggttgttgtccgcagaggatacactgcaggcccagggagaaatttccaatgatgtggaggtcgtaaaagatcagtttcacacacacgagggctatatgatggacttgaccgcccaccaggggcgcgtgggcaacatcctacagctgggctccaagttaatagggacgggcaaactgagcgaagacgaagaaacagaagtgcaggagcagatgaatctgctcaattccaggtgggaatgcctcagggtagcttctatggaaaagcaaagcaatctccatcgtgtactaatggatcttcagaaccaaaaactcaaagaactcaacgactggctcactaaaactgaggaacgcactagaaaaatggaagaagagcctttgggcccagacctagaggacctgaaacgccaggtgcagcagcataaagtcctccaagaggatcttgagcaggagcaagtccgggtgaactccttaacccacatggttgttgtggtcgatgaatccagcggtgatcatgctaccgccgccctggaagaacagctgaaggtcttgggggatcgctgggcgaatatatgcagatggacagaagaccggtgggtcctcctccaagatatactgctcaagtggcagcgactcacagaagagcagtgtctcttctcagcttggctttccgagaaggaggatgccgtaaataaaatccacaccactggttttaaagaccagaatgaaatgttatcttcactgcagaaactagctgttctaaaagccgatctggaaaagaagaagcaatccatggggaagctgtatagtctcaaacaggatctgctgtcaacactgaaaaataagagcgtcacccagaagacggaggcgtggctagataatttcgcaaggtgctgggataacctggtccagaagctggagaaatctacagcccagatttcgcaggctgtcaccacaacacagccatctctcacccaaacgactgttatggagaccgtgactactgtgacaactcgggagcagatcctggtgaaacatgcccaggaggagctgccacctcctcccccccagaagaaacggcagatcacagttgacacacttgagagactgcaagagttacaggaggcaacggatgagctggacctgaagctgcgacaggccgaggtgatcaaaggttcttggcagccagtcggggacttactaatcgatagcctgcaagaccacctagagaaggtcaaggcgctccgtggcgagatagcaccgttgaaagaaaacgttagccacgtgaacgatttagcgaggcaattgacgaccctgggtattcagctatccccctataacctttctacactcgaagatctaaacacccgctggaagttgttgcaggttgctgtggaggatcgggtgcgccagctgcacgaggcgcaccgcgattttgggcctgctagtcagcacttcttgagcacgagcgttcagggaccttgggagcgggctatctcaccaaataaagtgccttattacattaatcacgagacgcaaacaacctgctgggatcacccaaagatgacagagttgtatcaaagcctggctgacctgaacaatgtccgcttctccgcctatagaaccgccatgaagctacgcagactgcagaaagccctgtgtttagacctgctgtcactgtctgctgcttgcgacgccctggatcagcacaacctgaaacagaacgatcaacctatggatattctgcagattatcaactgccttactacaatctacgacaggttggagcaggagcacaacaacttggtgaatgtgccactctgtgtggacatgtgtctaaattggcttttgaatgtttatgataccgggcggaccggccgcatccgagtgctgtctttcaagacaggcatcatttccctctgtaaggcccacctagaagataaatatcggtacctctttaagcaagtggcttcttccactggtttttgtgatcagagacggctgggcctgttgctgcatgactcaatccagattcccagacagttaggagaggtggcctcctttggcggtagtaatattgaaccatctgtgcgatcctgtttccagttcgccaacaacaaacccgaaatagaagctgctctgtttctggactggatgagactggaaccccagtccatggtctggctccctgtgttgcatagggtggcagctgcggaaactgctaagcaccaggcaaagtgcaatatctgtaaagagtgtcctatcatcgggttcaggtaccgctccctcaagcactttaactacgatatctgccagagttgctttttcagcggccgagtggcgaagggccacaaaatgcattaccccatggtggaatattgcacacctacaacatccggggaagatgtgcgggacttcgctaaagtgctcaagaacaaattcaggactaagcgctatttcgctaagcaccccaggatggggtatctacctgtgcagacagttcttgagggcgacaacatggaaaccgatactatg

SEQ ID NO: 342830 - DNA, 3591 bp, Artificial Sequence
  derived and/or modified sequence
atgctgtggtgggaggaggtcgaggattgctatgaacgtgaagacgttcagaaaaaaacttttacgaagtgggtgaacgctcagtttagtaagtttggcaagcagcatatagagaacctctttagcgacctgcaggatggccggaggctgctggacttgctcgagggcctcactgggcaaaagctccccaaggagaaagggtctaccagggtgcatgcgctgaacaatgtcaacaaggcccttcgcgtgctccagaataacaacgtggatctggtgaatatcggctctactgacatagtcgacggaaatcacaagcttaccctgggcctaatttggaacattattctccactggcaggtaaagaacgtcatgaaaaacatcatggccggattgcaacaaactaatagcgagaagatacttctgtcttgggtgcgtcagtcaaccaggaactacccccaggtcaatgtcattaatttcacgacctcgtggagcgacggcttggccttgaatgcactgatccattctcatcgacccgatctgttcgattggaacagtgtggtgtgtcagcagagtgccacccagaggctagaacacgcattcaatatcgcccgctatcagctgggcatcgagaagctgctcgatcccgaggatgttgacacgacgtatccagacaaaaagagcattctcatgtacatcacatcactgtttcaagtcctcccacagcaagtttctattgaggctatccaggaggttgagatgctgccccgaccacccaaagtgaccaaggaggagcattttcaactccaccaccagatgcattattcccagcaaataaccgtttcactagcccaggggtacgagcgtacgagttctcctaagcctagattcaagagctatgcatacactcaggctgcctatgtcacaacttccgatcctacacggagcccttttcctagccagcacctggaggcccctgaggataagtccttcgggtcaagtttgatggaatctgaagttaacctggatagatatcaaaccgccttagaagaagtactttcttggctgctatcggccgaggacactctccaggcccagggcgaaatctctaacgacgtcgaagtggtcaaggaccaatttcacacgcacgagggatacatgatggatcttacagctcaccagggccgcgtgggtaatattctgcagttaggttctaagttgatcggcactgggaaactttctgaggacgaagaaacagaagtgcaggaacagatgaacctcctcaattccagatgggaatgtctacgcgtggcaagcatggaaaaacagtccaacctacaccgcgtcctgatggacttgcagaatcagaagctcaaagaactgaatgactggctcaccaaaaccgaggaaagaactcgcaaaatggaggaggaaccccttggacccgatctagaggacctcaaaagacaggttcagcagcacaaggttcttcaagaggacctcgagcaggagcaagtgagagtgaatagcttgacccacatggtggtcgttgtggatgagtcctccggtgatcatgcaaccgcggcattggaggaacagctgaaagtgctaggcgatcgctgggcaaacatttgccgctggactgaggaccgatgggtcttgttgcaggatatactcttaaagtggcagcggttaaccgaggaacagtgcctatttagcgcatggctgtctgagaaagaagacgcggtgaacaagattcatacaacaggattcaaggaccagaacgagatgctcagttctctccagaagttggctgtgttaaaggcagacttagagaaaaagaaacagtctatgggcaaactgtacagcctgaaacaagacctgctgagcaccctgaagaacaaatccgtcacccagaagacagaggcctggttagacaacttcgctagatgctgggataacctcgtgcagaaactcgagaaatcgacagcccaaatatctcaggctgtgacaacgacgcaacccagtttgactcagacgacagtgatggaaacagttaccactgttacaactagagaacagatcctagtcaagcacgcacaagaagagctccctcctccccccccacagaagaaaagacaaatcacagtcgacactctagaaaggctgcaggagcttcaggaggcaaccgacgagcttgatctgaagctgcggcaggcggaagtgataaaggggagttggcagccggtgggcgaccttttgattgattctcttcaggaccatctggagaaagtcaaagcgctccggggcgagatcgcaccgctaaaagaaaacgtgtctcacgtcaacgatcttgcccgccagctgaccacgctaggtatccagctgtcaccctataacctcagcaccttggaggacctgaacaccagatggaaattattacaggtggcggtggaggatcgtgttagacagctacacgaggcacaccgcgactttggcccagcatctcaacattttctgtccacctcggtgcaagggccgtgggagcgagcaatttctcccaacaaagtgccctactatatcaaccatgaaacccagaccacctgttgggaccaccctaaaatgactgaactgtatcagagcctggcggacctgaacaatgtgcgattttcagcctatcgaaccgctatgaagttacgcaggcttcagaaagcgctgtgcttagatctcctgagtctgtctgctgcctgcgatgcccttgaccagcacaacttgaaacagaatgaccagcctatggatattcttcagattattaactgcctgactacgatttacgaccgattggagcaggaacacaacaatttggtgaacgttcctttgtgcgtggacatgtgtctgaactggctcttgaatgtgtatgacactggccgaaccggccggattagagtgctttccttcaaaaccggcatcatatctttatgtaaagctcacttggaagacaaatacaggtacctgttcaaacaggtcgcctcaagtaccggcttttgtgatcagaggcgccttggtttgctcctacacgactcaattcaaattccgagacagctgggggaggtggcgtcattcggggggagcaacattgagccttccgtccggtcctgttttcagtttgcgaataataagcctgaaatagaagccgctctgttcctcgattggatgcgactcgaacctcagagtatggtgtggttgcccgttttgcaccgtgtggcagccgcagagacagcgaagcaccaagccaagtgtaatatatgcaaggagtgccccattattggattccggtacaggtccctcaaacattttaactatgacatatgtcagtcttgcttcttctcaggacgggttgccaagggtcataagatgcattacccaatggttgagtactgcacccctacaacttctggggaagatgtaagagacttcgccaaggtgctcaagaacaaattccggaccaaaagatatttcgctaagcatccccgcatgggctacttaccagtgcagaccgttctggaaggagataacatggaaacagataccatg

SEQ ID NO: 342831 - DNA, 3591 bp, Artificial Sequence
  derived and/or modified sequence
atgctatggtgggaggaggtggaagactgttacgagcgtgaggatgtgcagaagaagacttttaccaagtgggtgaatgcccagttttcgaagtttggcaaacagcatattgagaacttgtttagcgatctgcaagatggtcgacgattgctggatctcctcgagggcctgacaggccaaaagctgcccaaggagaagggctcgacgcgcgtgcacgccctaaacaacgtgaataaggctctgcgcgtcctgcaaaataacaatgttgatcttgttaatatcggttcgaccgacattgtggacggaaatcacaaattaacactgggcttgatttggaacatcatactacactggcaggtgaaaaacgtgatgaagaatattatggctggcttgcagcagacgaactcggaaaagatattactgagttgggtgcgccaaagtacgcgcaactacccccaggtcaacgtgattaacttcacaacctcgtggtctgatggcctggctctgaacgctctgatccatagccaccgccctgacctgttcgattggaattccgtagtgtgccagcaatctgccacccagcgcctggagcatgcctttaacattgctcgctatcagctgggcatcgagaagttactggaccctgaggatgtggataccacctaccctgataagaaaagcatattaatgtacattacgtccctgttccaggtcctgccacagcaggtgtccatcgaggccatccaagaagtggagatgctgccgagaccgccgaaggttacgaaagaggaacattttcaactgcaccatcaaatgcactattcacaacagatcacagttagcctggctcagggctacgagcgcacaagttcccccaagcccaggttcaagtcatacgcatatacccaagctgcctacgttacgacctccgaccccacccgcagcccctttccgagtcagcatctggaggccccggaggacaagtccttcggatcctcgttaatggagtcggaagtgaatctggaccgctaccagacggcccttgaagaggtcctcagttggctgttgtccgcagaggacaccttgcaggcccagggcgaaatttccaacgacgtggaagtcgtaaaggatcaattccacacgcatgaggggtacatgatggatctcacggcacaccagggaagggtaggtaacatcctccagttgggcagcaaactgattggtaccggaaagctgtcggaggacgaggagaccgaggtacaggagcagatgaacctccttaatagtcgctgggagtgcctgcgggtggctagtatggagaaacagtccaatctccacagggtgctaatggacttacagaatcagaagctgaaggagctgaacgattggctgaccaagacagaggagcgcacgcgaaagatggaggaggagcctctggggcccgatttggaggatctgaagcgacaggtacagcaacataaggtcctgcaagaagatttggaacaggagcaagtgcgcgtaaattcccttacacacatggtggtggtggtggacgagagttcgggcgatcatgccaccgctgccctggaagagcaattgaaggtgctgggcgaccgctgggctaacatttgtcgttggacggaggatcgctgggtcctgctgcaggatattttgttgaaatggcaacgtcttaccgaagagcagtgcttgttcagcgcttggctgtccgagaaggaagacgcggtcaacaagatacatactacaggatttaaggatcagaacgagatgctctcgtccctgcagaagctggcggtccttaaggctgacctggagaaaaagaagcaatcgatgggcaagctctattcacttaagcaggacctattgtccacactgaaaaataagtcggtgacgcagaagaccgaggcgtggttagacaacttcgcacgctgctgggacaatcttgtacaaaaattggaaaagtcgaccgcgcaaatatcccaagctgttacgacgacccagccctccctgacgcagactaccgtgatggagaccgttactacagtgacgacgagggaacaaatcctagtaaaacacgcccaggaagagctgccccctcctccaccacagaagaaacgccagatcaccgtggataccctcgagcgactgcaggagctgcaggaagctacggacgagctcgatctgaagttacgccaggccgaagttatcaagggctcgtggcaaccagtgggtgacctactaatcgactccttgcaggatcatctggagaaggtcaaagcccttcggggagagatcgccccgctgaaagagaatgtgtcgcatgtgaacgatttggcacgtcaactcacaacattaggaatccagctgtctccctataatctgtcgaccttggaagatctgaatacccggtggaagttgctacaggttgcggttgaggatcgggtccgccagctgcatgaggcccaccgtgacttcggaccggcgtctcagcactttctcagcacctctgtacagggcccctgggagcgcgccattagccccaacaaagtgccttattacataaaccacgagactcagaccacctgctgggatcatcccaaaatgacggagctttaccagtcgctggccgatctgaacaatgttaggtttagtgcctaccgaaccgcaatgaagctgcggcgccttcaaaaagcactgtgcctcgatttattgtccctgtcagccgcgtgtgatgctctggaccagcacaacttgaagcagaacgaccagcctatggacattctgcagatcatcaactgccttactactatctatgatcgactcgaacaggaacataataacctggtgaatgtcccactgtgtgtcgatatgtgccttaactggctgttgaacgtctatgataccggccgcaccggtagaattcgagtcctgagcttcaagacaggaattatctcattgtgcaaagcccacttggaagacaaatatcggtacctgtttaagcaagtggcttcctccacgggcttctgcgaccagcgacggctgggtctcctacttcacgactcaattcagatccctaggcagcttggcgaggtggcgtccttcggggggtctaatatagaaccaagcgtacgctcctgcttccagtttgcaaataacaagccggaaattgaggccgccctgtttctggattggatgcgcttggagccgcagtctatggtttggctgcccgtgctgcaccgcgtggcagccgccgaaaccgccaagcaccaagccaaatgtaatatatgtaaagagtgccccattattggcttccgatatcgatccctaaagcatttcaactacgacatctgccaatcctgcttcttttcaggccgcgtcgccaaaggacataagatgcattaccctatggttgagtattgcactcccaccaccagtggtgaggacgtacgggactttgcgaaggtcttgaagaacaagttccgaacgaagcgatactttgcgaagcatcctagaatgggctacctcccggttcagaccgtcttggaaggagataacatggaaacagatactatg

SEQ ID NO: 342832 - DNA, 3591 bp, Artificial Sequence
  derived and/or modified sequence
atgctgtggtgggaggaagttgaggactgctacgaacgggaagatgtgcagaaaaagacctttactaagtgggtgaacgctcaattctctaaattcgggaagcagcacatcgagaacctgttttcggatctgcaggacggacgccgtctgttggacctgctggaaggactgactggccagaagttgccgaaagagaagggttctacccgcgttcacgccttgaacaacgtgaataaggcgctgcgcgtcctgcagaacaataatgtggacctcgtgaacatcggatccaccgacatcgtggacggaaatcacaaactgactctgggcctgatttggaacattatcctccactggcaggtaaagaatgtcatgaaaaacatcatggccgggctgcaacaaactaactccgaaaagatcctgctgtcgtgggtgagacaatcgactcgcaattatcctcaggttaatgtgatcaacttcactacctcgtggtctgatgggctggcactgaatgccctgatccattcgcaccgcccagacctgttcgattggaattcggtggtgtgccagcagtcggcgacccagagactcgaacacgctttcaatatcgcgcgctaccagctgggaatcgaaaagctgttggacccggaggacgtggacacgacctacccggacaagaagtcgatcctgatgtacattacttcgctgtttcaggtgctgccacagcaagtgtccatcgaggcaatccaagaagtcgaaatgctccctaggcctcccaaggtgaccaaggaggaacacttccaactccatcaccagatgcactacagccagcagatcactgtgtcattggcacagggttacgagcgcacctcctcgccaaagcctaggttcaagagctatgcatacactcaagcggcctatgtaaccacgagcgacccgaccagatccccgttcccgtcacaacatctggaggcaccggaggacaagagcttcggatcgtcgctcatggagtccgaagtgaacctcgacagataccagactgccctggaggaggtcttgtcttggcttttgtcggcggaagatactctgcaagcgcaaggggaaatctcaaatgatgtcgaggtggtgaaagaccaattccatacccatgagggatacatgatggatcttacggctcaccagggaagggtgggcaacattcttcagcttggatctaagctgattggaaccgggaagctgtcggaggacgaggaaactgaagttcaggaacagatgaatctcctcaacagccggtgggagtgcctccgagtggcatctatggagaagcagtcgaacctccaccgggtcttgatggatctgcaaaatcagaaactgaaagaacttaatgactggctcaccaagactgaagagagaaccaggaagatggaggaggagccgttgggaccggacctcgaagatcttaagcggcaggtgcagcagcacaaggtgcttcaggaggatctcgagcaagaacaggtgcgggtcaactcactgacgcacatggtggtggttgtcgacgagtcgtctggagatcatgccactgccgctctcgaagagcaactcaaggtccttggcgatagatgggccaacatttgccgctggactgaagatcggtgggtgctgctccaagatattcttctgaagtggcagcgcctgaccgaagagcagtgcctgtttagcgcatggttgtctgaaaaggaagatgccgtgaataagatccacaccaccggattcaaagatcaaaacgaaatgctgagctcactgcaaaagctcgctgtgctgaaagcagatttggagaagaagaaacagtcgatgggaaaactgtactccctgaaacaagatctgttgtcaacccttaagaacaagtccgtgactcagaaaaccgaagcctggctcgacaatttcgcgcggtgctgggacaacctggtccaaaaactggagaagtccaccgcccaaatcagccaggcggtcactactacccagccgagcctcacgcagaccactgtgatggaaaccgtgactactgtgaccaccagggagcaaatcctcgtaaagcacgctcaagaagagctgccgcctccgccaccgcagaagaaacggcaaatcaccgtcgacactctggagcgcttgcaggagctgcaagaggctacggacgagctggatctgaagctccgccaagccgaagtgatcaaaggctcatggcagccagtcggagatctccttattgacagcctgcaggatcacctggagaaggtgaaggccctcaggggcgagatcgccccactcaaggaaaacgtcagccatgtgaacgatctcgcacggcagcttaccacccttggcatacagctgagcccgtacaacttgtcgactctggaggacttgaacactcggtggaagttgcttcaagtggctgtcgaagatcgcgtcagacagctgcatgaagcacatagagacttcggaccagcatcacaacactttctctccacttccgttcaaggcccctgggaacgagccatcagcccgaacaaagtgccatactacatcaatcacgaaacccagacgacgtgctgggaccaccccaagatgaccgagctctaccaaagcctggcagatttgaataatgtgcgcttttctgcgtacagaaccgctatgaaactccgccggcttcagaaggccctgtgcctggaccttctcagcctctccgcagcctgtgacgctctggatcagcataacctgaaacagaacgaccagccgatggacatcctgcagatcatcaattgtctgactaccatctatgaccggttggagcaggaacataacaacctggtcaacgtcccgctgtgtgtcgatatgtgtctgaactggctcctgaacgtgtacgacacgggtcggaccggtaggatccgcgtgctgtccttcaagactgggatcatctcactgtgtaaggcgcatctggaggacaaatacagatatctctttaagcaagtcgcctcgtccaccggattctgcgaccagcggcgactgggtttgctgctgcatgacagtatacagatcccaagacaactcggtgaagtggcttccttcggcggtagcaatattgagccgagcgtgcggtcctgttttcaatttgccaacaacaagcctgaaatcgaagcggctctcttccttgactggatgcggctggaaccgcaatcaatggtgtggcttccagtgctgcaccgcgtggccgcagcggagacggctaaacaccaggccaagtgcaacatctgcaaagagtgcccaattatcggatttcgataccggtcactcaagcatttcaactacgacatttgccagtcctgcttcttctctggaagggtcgcgaaggggcacaaaatgcactacccgatggtcgaatactgcaccccaactacttcgggagaggacgtgagggacttcgcaaaggtcctcaagaacaagttccgtacgaagcggtacttcgcgaagcatcctagaatgggctacttgccggtgcaaactgtgctggaaggagacaacatggaaactgacaccatg

SEQ ID NO: 342833 - DNA, 3591 bp, Artificial Sequence
  derived and/or modified sequence
atgctgtggtgggaggaggtggaggattgttacgagagggaagatgttcagaagaaaacgtttaccaagtgggtaaacgcgcaattctcaaagttcggcaagcagcatatcgaaaacctcttttccgatctgcaggatggaaggcgtttactcgacctgctcgaaggactgaccggccagaagctgcccaaagagaaaggcagcacaagggttcatgcattgaataacgtgaataaagctctccgtgtactgcagaacaataacgtggatctggtgaatatcggtagcacagatattgttgatggaaaccataaactgaccctcggactgatctggaatattattctgcactggcaggtgaaaaacgttatgaagaatattatggccggcctacagcagacgaatagtgagaagattttgctatcatgggtcagacaatccacaagaaactacccccaggtcaatgtcatcaacttcactacatcttggtcagatggactcgccttgaacgccctcatccacagccacaggcccgatctcttcgattggaatagcgtcgtgtgtcaacagtccgctacccagcgcttggaacatgccttcaatatcgccagataccagctgggcatcgaaaagctcttggatcccgaagacgtcgacacgacatacccagataaaaagtccatcctaatgtacatcacctcgctgttccaagtgctgccccagcaggtatcgatcgaagcgatccaggaagtggagatgttgccccggcctccaaaggtgacgaaggaagagcatttccagcttcaccaccagatgcattactctcaacaaatcactgtgagcctggcccagggatatgagcgcacgtcctccccaaaaccacgcttcaaaagctacgcatacacacaggcagcctacgtcacaacaagcgatccaacccggagcccattcccttcccagcatctggaggcaccagaggacaagtccttcgggtcttctctaatggaatcagaggttaatctggatcgataccaaacggccctggaagaagtactgagttggcttctgagcgcggaggacacgttgcaggcccagggggagatctccaacgatgttgaggtagttaaagatcaatttcatacacacgagggttacatgatggatttgaccgcccatcagggcagggtcgggaacattctgcagttaggatcaaagctcatcgggacaggtaaactgagcgaggatgaggagactgaagtgcaggaacagatgaacctgttgaactcaaggtgggaatgcctgcgcgtggcatcaatggaaaagcaatccaatctgcacagagtgctgatggatcttcagaatcagaagttaaaggagctcaacgactggctcacaaaaaccgaagagaggacccgcaagatggaagaggaacctctgggtcctgacctggaggatctaaagcggcaagtgcagcagcataaggtgttgcaggaggatctggagcaggagcaggtgagagtgaactccctgacacatatggtggtagtcgtggacgagtccagtggggatcacgccaccgccgccctggaagaacagctgaaagtactcggcgacaggtgggctaacatatgtcgctggaccgaggataggtgggtcctgcttcaggatatcttactgaagtggcagcgactcaccgaggaacagtgcttgttttcagcctggttgtctgagaaagaggatgcggtcaataaaatacacacgacaggcttcaaggaccagaacgagatgctctcctccttgcagaaactcgccgtgttgaaggcggacctggagaaaaaaaaacagtcaatgggcaaactttacagtctgaagcaggatctcttgtccacgctgaaaaacaagtctgtcacccagaagacggaggcctggctggataactttgccagatgctgggataacctggtgcaaaagctggaaaagtccacggcccagataagtcaggccgtcaccaccactcagccctcacttacacagactacggttatggagacagttactaccgttaccactagggagcagattctggtgaagcacgcccaggaagaacttccaccacccccgccgcagaaaaaacgccagatcactgtggatacactcgaaagactccaggaactccaggaggccaccgacgagctggatctgaagctgcgacaggctgaggtaatcaaaggctcatggcagcccgtcggagacctcctaatcgactccctgcaggatcatctcgaaaaggtgaaggcgctgcggggagagatcgcgccgcttaaagagaacgttagccacgtcaatgacctagcccggcaattgaccactctaggaattcagctttccccgtacaatctgtcgaccctcgaggatctgaatacccgctggaaactgctgcaggtcgcggtggaagatagagttagacagctccatgaggctcatcgagacttcggcccagcctcccaacacttcctctccaccagcgtccaagggccgtgggagcgggccatctctcccaacaaggtgccctattacattaaccacgagactcaaactacctgctgggaccaccccaaaatgaccgaactttatcagagtctcgcggatctgaataacgtgcgattctcggcctacagaaccgccatgaagctccggaggctgcaaaaggcgctgtgccttgatctgctgtcactgagcgccgcttgcgacgctcttgatcaacacaacctcaagcaaaacgatcagccgatggacattctccagattatcaattgcctgacaaccatttacgaccgattagagcaggagcataacaatctggtcaacgtgcctctgtgtgtcgacatgtgcctgaactggttgctcaacgtctatgacactgggaggaccggccgtatccgtgtgctgagctttaagaccgggatcatcagcctgtgtaaggcccacttagaggacaagtatcgttacctctttaaacaggtggcatcttcaacagggttttgtgatcagcgcaggctgggtctgctgctgcatgactccatccaaatcccgaggcagctgggcgaggtggccagtttcggcggctctaatatcgagccatccgtccgaagctgcttccagttcgccaataataagcccgagattgaggcagccctgttccttgactggatgcggctggaaccgcagtcgatggtatggctccccgtcttacatagggtggcagccgctgagaccgctaagcatcaagcaaagtgcaacatttgcaaagagtgtccaattatcggattcagatatcgcagcttgaagcattttaactacgacatatgccagtcttgttttttttccggccgtgtggccaagggccataaaatgcactaccctatggtggagtattgcaccccaaccacgagtggggaggatgtcagggacttcgcaaaggtgctcaaaaataagttcaggaccaagcgctattttgctaagcaccctcgaatgggctatttgccggtacagaccgtcctggagggtgataatatggagaccgatacgatg

SEQ ID NO: 342834 - DNA, 3591 bp, Artificial Sequence
  derived and/or modified sequence
atgctgtggtgggaggaggtcgaggactgttacgagcgagaggatgtgcaaaaaaagaccttcaccaaatgggtcaacgcacaatttagcaagttcggaaaacagcatattgagaatctgttctcagatctccaggatgggagacgactgctggatttgctggaggggctgacaggccagaaactcccaaaagagaagggctccactcgagtgcacgctctgaacaatgtgaataaggcgttgcgcgttctccagaataacaacgttgacttggtgaatatcggatccacagacatcgtggacgggaatcacaagctgaccttaggcctgatttggaatataatactgcactggcaggtcaaaaacgtgatgaaaaacataatggcaggcctgcagcagacaaactcagagaaaatcttattgtcatgggtcagacagtccactcgtaactatccccaagttaatgtgattaactttaccacaagttggtctgacgggctggccttgaacgccctcatccatagccaccgccccgacctgtttgattggaatagtgttgtctgtcagcaatcagccacccaacggctggagcacgctttcaacatcgcccgatatcagctgggtattgaaaaactgctggacccagaggacgtagacacaacatatcccgacaaaaaaagtatcctaatgtacatcactagcttgttccaggtcctcccacagcaggtcagcatcgaggccattcaagaagttgagatgctcccacgcccgccaaaagtaacaaaggaggaacactttcagttacaccaccagatgcactatagtcaacagattacagtgagcctcgcacaaggttatgaaagaaccagctctcctaagcctaggtttaagagctacgcctacactcaggccgcatatgtgacaacctcagatcctacaaggagccctttccccagccagcacctggaagcaccagaggacaagtcctttggttcgagcctcatggagagtgaggtgaatctggatcgctatcagacagctctcgaagaagtcctgtcgtggttgctatctgccgaggacacattacaggcacagggggagatcagcaatgatgtcgaggtagtcaaggatcaattccatactcacgaagggtatatgatggacctcacagcccaccagggccgagtggggaacatcctccagctgggatccaaactaattggtactgggaaactttctgaggatgaagagacagaggtgcaagagcagatgaaccttctaaacagcaggtgggaatgcctgcgcgtggcctctatggaaaaacagtccaatttacaccgcgttttaatggatttgcagaaccaaaaactgaaggagctgaatgattggctgactaagacagaggaacgtacacggaagatggaagaggaacctctgggtcctgacctggaggacctcaagaggcaagtccaacagcacaaggtcctgcaggaagatttagagcaggaacaagtccgggtgaactctctgacacacatggtggtcgttgtcgacgaaagcagcggggatcacgctactgccgcgctagaagaacagcttaaagtgctgggagaccgatgggctaacatttgcagatggaccgaggaccgctgggttctgctacaggatatcctcctgaagtggcagaggcttactgaggaacaatgcctgttctctgcctggctcagtgaaaaggaggatgccgtcaacaaaatccataccaccggttttaaagaccagaatgagatgctcagcagtctgcaaaaactagctgttcttaaggccgacttagaaaaaaaaaaacagagtatggggaaattatactcactcaagcaggacctgctttccaccctgaagaataaaagcgttactcagaaaacagaggcttggctcgacaattttgcccgttgttgggacaatctggttcagaaactggagaagagcacagcccaaattagtcaggccgttactaccactcagccgagtctaacccagacgactgtgatggagaccgtaactaccgtaaccacacgcgaacaaattcttgtcaaacatgctcaggaggagctaccaccaccaccaccacagaaaaagcgtcagataaccgttgacaccctggaacgactgcaggagctgcaggaggcaaccgatgagctcgatctgaagttgagacaggcggaagtgattaagggatcttggcagcctgtaggggacctgttaatcgactctctgcaggaccacctggaaaaagtgaaggctctccgaggcgagatcgctcctctcaaggagaatgtgtcccatgtaaacgacttagctcggcagcttacaaccctaggcattcagctgagcccatataatctgtcaaccctggaggatctcaacacaaggtggaaactcctgcaagtcgccgtggaagatagggtgaggcagctccacgaagcccacagagatttcggaccagcgtctcagcacttcctgtccacttcagtgcagggtccgtgggagcgggcgatttcgcctaacaaagttccatattacataaaccatgagacccagaccacctgttgggatcatccgaagatgactgagctataccagtcattggctgatctcaacaatgtgcggttctccgcgtatcgtacggccatgaaactgcggcggctgcagaaggcgctgtgtctggatctcctgtcactatccgctgcctgtgacgcactcgatcagcataatctaaaacagaatgaccaaccaatggatattttacaaattattaactgtttgacaacaatctatgatagattagaacaggagcataacaatcttgtgaacgttcctttgtgcgtggacatgtgtctgaactggttgctgaacgtgtacgacaccggacgaacaggcagaattcgggtccttagctttaagactggaataatatctctgtgtaaagcccacctggaggacaagtaccggtacctgtttaaacaggtggccagctccacaggattctgtgaccagaggagactaggccttctgctgcacgactctatccagatcccacgccagttaggcgaggtcgcttccttcggcgggtcaaacattgagcctagcgtgcgctcttgttttcaattcgcgaataacaagccagagattgaggctgccctgttcctggattggatgaggttagaaccgcagtccatggtctggttacctgtgttgcacagagtcgccgcggcagagaccgctaagcatcaggcgaaatgcaacatttgcaaagagtgtccaatcatcggattcagataccgcagtttgaaacattttaattacgacatttgtcagagttgttttttcagcgggcgggttgcaaagggccataaaatgcactacccgatggtggagtattgcaccccaaccacctctggagaggacgtgcgcgactttgcgaaagtgctaaaaaacaaattccgcaccaagagatactttgccaaacaccctagaatgggttatctcccggttcagaccgtgttggaaggggataacatggaaaccgatacaatg

SEQ ID NO: 342835 - DNA, 3591 bp, Artificial Sequence
  derived and/or modified sequence
atgctctggtgggaggaggtcgaggattgctatgagcgggaagatgtgcagaaaaagactttcaccaaatgggttaacgctcaattctccaaatttggcaagcagcatatagaaaatcttttctccgacctccaggatggccggcgcctacttgatctcctcgaaggccttactggtcagaagctcccaaaagaaaaagggtcaacgcgggttcatgctctcaataacgtaaacaaagctctacgcgtgttacagaacaacaacgtagatctggtgaatattggctcaacagatattgtggatggaaatcacaaacttacgttgggccttatctggaatattatactgcactggcaggtaaaaaacgtgatgaagaatattatggccggcctgcagcaaacgaactccgagaaaatcttgctgtcctgggtccgacagagtaccaggaattacccacaggttaatgtaatcaacttcacaacctcctggagcgatggccttgctttaaatgcactaattcattcacacagaccagatctgtttgactggaatagcgtggtgtgtcagcagagtgcaacgcagagactggaacatgcctttaatattgctagatatcagttgggcatcgagaaactgctggaccccgaagacgtggatactacatacccggataagaaatccattcttatgtacatcaccagtctgttccaggtgctcccccagcaagtgtctattgaggcaatccaagaagttgagatgctgccccgcccccctaaggtgactaaggaagaacattttcagctccaccaccagatgcactactcccaacagattacagtgtcgttagcccaagggtacgagcgcacctcgtcaccaaagccacgattcaagtcttatgcgtatacacaggctgcatacgtcaccacaagtgaccctacaaggagcccttttccttcacaacacttggaagcaccagaagataagtccttcggtagctcacttatggagtcagaggtgaacttagatagataccagactgctcttgaggaagtgctcagctggctgttatcagctgaagatacactacaggctcagggtgagattagcaacgacgtcgaagtggtaaaggatcaattccatacccacgaaggatacatgatggatctcactgcccaccaagggcgagtgggaaatatcctccaattaggttccaagctgataggcaccgggaaactcagcgaagatgaggaaactgaggtgcaggaacaaatgaatcttctcaactctcgatgggaatgcctgagggtggccagcatggagaaacagtcaaatctccaccgggtgctcatggacttgcaaaaccagaagttgaaagagctgaacgattggttgaccaagacagaagaaagaacaaggaaaatggaagaagagccgctcggcccggacctcgaagatttgaagcgccaggtacagcagcacaaggttctccaggaggacttagaacaggaacaggttcgagtgaatagtctcacccatatggtggtggtcgtggatgagtcctctggcgatcatgccaccgcagctcttgaggagcagttaaaggtgctcggcgaccgctgggcaaacatttgccgctggactgaagacagatgggtcctgctgcaggacatcctgttaaagtggcaacggctgacagaagagcaatgtctgttcagcgcctggctgagtgaaaaggaagatgcagttaacaagatccacaccaccggctttaaagatcagaacgagatgctgagtagtctacagaaactcgccgtgctcaaggctgatcttgaaaagaagaagcagagtatgggcaagctgtatagtctaaaacaggacttgctgagtactcttaaaaacaagagcgtcactcagaaaacagaggcctggctggacaatttcgctagatgctgggacaacctggttcagaagcttgagaaaagtaccgctcagatctcacaggcagttacaaccacgcagccaagccttacccaaacgacggtgatggaaaccgtgactaccgtcactacaagagagcaaattctggtcaaacacgcccaagaggagttgcctccgccaccccctcagaagaagaggcaaataacagtggatacactcgagcgactgcaggaactgcaggaagccactgatgagctcgatttgaagttgcggcaggctgaggtcattaaagggtcctggcagccagtgggggaccttttaattgattccctgcaagatcatctggagaaagtcaaagctttgaggggagagatcgcccccctgaaagagaacgtttcgcacgtgaacgacctggccagacagctcacaaccctcggcatacaactctctccatacaacctctcgacactggaggacctcaatacacgctggaagttgcttcaggtagccgtggaagatcgcgtgcggcagctccacgaagcccacagggactttggcccagcaagccagcatttcctgagcacgagcgttcaggggccatgggagcgggcaatttcaccaaacaaggttccttattatattaatcatgaaactcagaccacgtgttgggatcatcccaaaatgacagagctatatcagtccctggcggatctgaacaacgtgcggtttagtgcctatcgtaccgcaatgaaattgaggcgtcttcagaaggccttgtgcctggatctcctgtctctaagtgcggcctgcgatgcacttgaccagcacaatttgaaacagaacgaccagcccatggatatcctgcagatcataaactgcttgaccacaatttacgatagactcgagcaggaacataacaatctggtgaacgtgcccttatgcgttgacatgtgtttgaactggctcttgaacgtgtacgacacaggccgtactggaaggatccgggtcctcagtttcaagaccgggatcatctctctgtgcaaggctcatctggaagataagtatcggtatctgtttaaacaagttgcttcttctactggcttctgtgaccagcgcaggctcggactgttactgcacgacagcattcaaatccctcgccagcttggcgaggtggcaagcttcggtggctctaatattgagcccagcgttcgatcatgttttcagtttgcaaataataaaccagaaattgaggcagcactgttcctcgattggatgagattagaacctcaaagtatggtttggctcccagtgttgcacagagtcgctgctgcggagactgcgaagcatcaagctaagtgcaacatatgtaaggagtgccccatcatcggattcagataccgctcgcttaaacatttcaactatgatatctgtcagtcatgctttttctccggccgtgtggcgaaagggcacaaaatgcactaccccatggtggaatactgtacaccaacaacaagcggcgaggatgttcgtgattttgccaaggtactgaaaaataaatttcggactaaaagatacttcgctaaacaccctagaatgggatatttgcccgttcagaccgtactcgagggcgacaacatggaaacagataccatg

SEQ ID NO: 342836 - DNA, 3591 bp, Artificial Sequence
  derived and/or modified sequence
atgctttggtgggaagaggtcgaagattgctacgaaagagaagatgtccagaaaaagacctttactaagtgggtgaatgcgcaatttagcaagtttggtaaacaacatattgagaatctttttagcgatctgcaagatggaaggagacttctcgatctgcttgaaggattgactggacagaaactgccgaaagaaaagggttcgactcgagttcatgcgcttaacaatgtcaataaggcactgagagtgctgcagaacaataacgtcgatctggtgaatatcggatcaactgatatcgtggatggtaaccataagctgactctgggattgatatggaacattatcttgcactggcaagtgaagaatgtgatgaagaacatcatggcaggactccaacaaaccaacagcgagaagattctgctctcctgggtgcgccaatcaactaggaattatccacaagtcaatgtcataaactttactacgagctggtcagacggactcgctctgaacgcactcattcactctcaccgtccagatcttttcgattggaatagcgtcgtgtgtcagcaatccgccacccagcgccttgaacatgcattcaatatcgcgagataccagcttggaatagaaaagctgctcgacccagaagatgtggacactacctaccctgataagaagtcgatactcatgtacattacctcgctgtttcaagtgcttccacagcaggtcagcatcgaagcaattcaagaagtggagatgcttccaagaccacctaaggtcaccaaagaagagcactttcaacttcatcatcagatgcattacagccaacaaattaccgtctctctggcccaagggtacgagagaactagcagccctaagcctcggttcaagagctacgcttatacccaagcagcatacgtgaccacctccgacccaactcgatcgccatttccttcgcagcatcttgaagccccagaggataaatcattcggatcctcgcttatggaatcagaggtgaaccttgacagataccaaaccgcacttgaggaggttctttcatggcttttgtcggccgaggatactcttcaagcgcaaggagaaatttcaaacgacgtcgaagtggtgaaggatcagtttcatacccatgagggttatatgatggacctcaccgcacaccagggtcgggtgggaaacatactgcaactgggttcgaagctgattggtaccggaaaactctcggaggatgaagaaaccgaggtccaggaacagatgaacctgctcaactcgcggtgggagtgtctgagagtggcgtcaatggagaagcagtcgaatcttcaccgcgttctgatggatctgcaaaatcagaagctgaaggaacttaacgactggcttactaaaaccgaagaaagaaccaggaagatggaagaagaaccactcggtccggatcttgaagatctcaaacggcaagtgcagcaacataaggtcctccaagaggatttggaacaggaacaggtgagagtcaatagcctgacccacatggttgtggttgtggatgagtcatccggagatcacgctaccgccgcactggaagaacaactcaaggtgctgggtgaccggtgggccaacatctgccgatggaccgaggacagatgggtgctgcttcaagacatcctgcttaagtggcaaagactgaccgaagaacaatgtcttttttccgcatggctttcagagaaggaggatgcggtgaacaagattcatactaccggttttaaggatcagaacgagatgctctcctcccttcaaaagttggcagtgctgaaggcagatctggaaaagaaaaagcaaagcatgggcaagctgtactctcttaagcaagacctcctgtccactctgaagaacaaatccgtgacccagaaaaccgaggcatggctggacaacttcgcacggtgctgggacaatctggtccaaaaactcgaaaagtcgaccgcacagatcagccaagccgttacgaccactcaaccttcccttactcaaaccaccgtgatggagactgtcaccactgtgactactcgggaacagatactggtgaagcatgcacaggaagagctcccgcccccgccacctcaaaagaagaggcagattacggtcgatactcttgaaaggctccaggagcttcaagaagcaactgacgaactcgacctgaagctgcgccaagctgaggtcatcaaaggttcgtggcaacctgttggggatcttctcatcgactcccttcaagatcacctcgagaaggtcaaggctctgaggggagagatcgcaccactcaaagaaaatgtgtcgcacgtgaacgacctggcaagacaacttactacgctcggcattcagctgtccccttacaatctctcaactctggaagatttgaacactcgttggaagttgcttcaggtggcggtggaagatagagtgcgacagcttcacgaagcacatagagacttcggccccgcatcgcaacatttcctttcgacttcagtgcaggggccttgggagagagcaatctcgccgaacaaagtgccctactacattaatcacgaaactcagaccacttgttgggatcatccaaagatgaccgagctttaccaatcgctcgccgatctcaataacgttagattctcggcatacagaactgcgatgaaactccgtaggcttcaaaaggctctctgtctggacctgttgtccctgtcagcggcgtgtgacgcactggaccagcataacctcaaacaaaacgatcagcctatggatatactccagatcataaactgcctgactactatttacgataggttggaacaagaacacaataacctggtcaacgtcccgctctgtgtcgatatgtgccttaactggctcctcaatgtctacgataccgggcgcaccggccggatcagggtgcttagctttaagaccggaataatctccctgtgcaaggcacaccttgaagataagtaccgatacctgtttaagcaggtggcaagctcaacgggtttctgtgatcagcggaggctggggcttttgctgcacgactctattcaaattcctcgtcagctgggagaggtcgcctcctttgggggttccaacatcgaaccttcggtgcgcagctgcttccaatttgccaacaacaaaccagaaatcgaggccgccctctttctcgactggatgagactggagcctcagtctatggtgtggcttcctgtgcttcatcgggtcgccgctgcagaaaccgcaaagcatcaggcaaagtgtaacatctgtaaagaatgccctattatcggattcaggtaccggagccttaaacatttcaactacgatatctgtcagagctgttttttcagcgggagggtggccaagggccataagatgcattaccctatggtggaatactgtactcctaccacttccggagaagatgtcagagattttgcaaaggtgctgaagaacaagtttaggactaaacgatacttcgctaagcacccgcgaatgggctacctgcctgtgcaaactgtgctcgaaggggataacatggagactgatacgatg

SEQ ID NO: 342837 - DNA, 3591 bp, Artificial Sequence
  derived and/or modified sequence
atgctctggtgggaagaagtggaagattgttacgagcgagaagatgtgcagaaaaagacctttacgaagtgggtgaatgcgcaattttcaaagtttggtaagcaacatatagagaatctgttctccgatttgcaagacggccggcggttgctggaccttcttgaaggacttactggccagaaacttccaaaggaaaaaggatccaccagggtgcatgcacttaacaacgtcaacaaggcgcttcgagtcttgcagaataacaacgtcgacctcgtgaacattggatccacggatattgtggatgggaaccataaacttacgcttggacttatctggaacattattctgcattggcaagtcaagaacgtgatgaagaacatcatggcagggttgcagcaaaccaattcggagaagattctgctttcctgggtccgtcagtccaccagaaactacccacaagtcaatgtgattaacttcaccacgagctggtcggacgggcttgcacttaatgcacttatacattcccatcggccggatctgtttgactggaatagcgtggtctgccagcaatcagccactcagagattggaacacgcctttaacatcgcaagataccagcttggcattgaaaagttgctcgaccctgaggatgtggacactacttacccagataagaagtcgatcctcatgtacattacctccctgtttcaagtgcttccccaacaagtgtccattgaggcgatccaagaagtggagatgctgccacggcccccaaaggtgactaaagaagaacatttccaactgcaccaccagatgcactactcacagcagattacggtgagccttgcacaggggtacgaaagaacctcatcacccaagccgcgatttaagtcctacgcttacacccaggcagcatatgtgactacgtcggatcccaccaggtcgccattcccttcacaacatctcgaagcacctgaagataaatcctttggctccagccttatggaatccgaagtcaaccttgataggtaccaaaccgcccttgaagaagtgttgagctggctcctttcggcagaagatacccttcaagcccaaggtgagatttcaaatgatgtggaggtggtgaaggaccagtttcatacccacgaaggttacatgatggacctgaccgcacaccagggaagggtgggaaatatccttcaactgggttcgaagctcatcggaacggggaagctctccgaagatgaagaaacggaagtgcaagaacagatgaaccttcttaatagcaggtgggagtgcctgcgcgtggcatcgatggaaaagcaatcaaacctccatagggtgttgatggatctgcagaatcagaagctcaaggagctcaacgattggcttaccaagaccgaagagcgcacccgtaagatggaagaagaacctctcggaccagacctggaagatctgaagaggcaggttcagcagcataaggtcctgcaggaagatctcgaacaggaacaagtgcgtgtgaattctctcacccacatggtggtggtcgttgatgagtcgtcgggagatcacgccactgcagcactggaagaacagctgaaggtgcttggagatcgctgggcaaacatttgtaggtggaccgaggataggtgggttttgcttcaagatattctgctcaagtggcagagacttactgaagagcagtgtcttttctccgcctggctgtctgagaaggaggatgccgtgaacaagattcatactaccggcttcaaggatcaaaacgaaatgctctcgtcccttcaaaagctggcagtcttgaaggcggacctggagaaaaagaagcaatcaatgggaaagctgtactcgcttaaacaagatcttctctccaccttgaagaacaagtccgtcacccaaaagactgaagcatggctcgacaactttgcgagatgctgggataacctggtgcagaaacttgaaaagtcgactgcccaaataagccaagcagtgaccactactcagccatccctgacccaaaccactgtgatggagacggtaaccaccgtgaccactagagaacaaattcttgtgaagcatgcccaagaggaactgccacctcctccacctcagaagaagcgccaaatcaccgttgataccctggagagactgcaggagctgcaggaagcgactgatgaactggatctgaagctcagacaggcagaggtgataaaaggctcgtggcagcctgtgggcgatctcctgattgattcgcttcaggaccatctcgaaaaagtgaaagcgctgcgaggtgaaatagcaccactgaaagaaaacgtgtcccatgtcaatgatctcgcacgccaacttaccaccctgggaattcaactctccccatacaacctttcgaccctggaggatctgaataccagatggaagctgctgcaggtggccgtggaagatcgagtgcgccaacttcatgaagcacaccgtgattttggacctgcatctcaacactttctcagcacttcggtgcaggggccttgggaacgggccattagccccaacaaagtcccttactacattaaccatgaaactcaaaccacctgttgggatcatcctaagatgactgaactttaccaatcactcgctgatctgaataacgtccggttttccgcgtacagaactgctatgaaactgagacgcctgcagaaggccctctgtctggacctcctgagcctcagtgcagcatgcgatgcgctggatcaacataacctcaagcagaacgatcaaccaatggacattcttcagatcattaactgtctcaccactatctacgaccggttggagcaggagcataacaatctggtgaatgtgcctttgtgtgtggacatgtgtctcaattggctgcttaacgtctacgatactggtcgcaccggacgtatccgcgtgctgagcttcaagacgggcatcatttccctttgcaaggcacatcttgaagataagtaccgctacctgtttaagcaagtcgcaagctctactggattctgcgatcaacggagactggggctgcttctgcatgactcaatccaaatccctagacaactgggagaggtagcatccttcggaggaagcaacatcgaacccagtgtccgttcctgtttccagtttgcaaacaataagcctgagattgaagccgccttgttccttgattggatgagactggaaccacagtccatggtgtggctgcctgtgctgcaccgggtggcagcagcggaaacggcaaagcatcaagccaagtgtaacatttgtaaagagtgtccgattatcggttttcgttacagatccctcaaacactttaactacgatatttgtcagtcatgttttttctccggacgagtcgcaaaaggacataagatgcactaccccatggtggaatactgcactccaaccacttcaggggaagatgtgagggatttcgcaaaggttctcaaaaacaagttccgcaccaagcgttacttcgccaagcatcccagaatgggatacctgccagtgcaaactgtacttgagggtgataacatggaaaccgatacgatg

SEQ ID NO: 342838 - DNA, 3591 bp, Artificial Sequence
  derived and/or modified sequence
atgctgtggtgggaggaagtggaggattgctacgagagggaagacgtccagaaaaagacattcactaagtgggtcaatgctcagttctcaaagttcggaaaacagcatatcgagaatcttttttcagatctacaggacggccgccgattgcttgacctgctggaggggctaactggccaaaaattgcctaaagagaaagggtccacacgcgtgcacgccttgaacaacgtcaacaaagccctccgagtgctgcagaataataatgtggatctggtgaacatcgggagcacggatatcgtcgatgggaatcacaagctgacattgggcttgatctggaacatcatcttgcattggcaagttaaaaatgtgatgaagaacatcatggcgggcctgcagcagaccaattcagagaagatcctcttgagttgggtgcgccaatctaccagaaattacccccaagtgaacgttattaacttcaccaccagctggagcgacggactcgccctgaacgccttgatacactctcacagacccgacctctttgattggaatagtgtggtgtgtcaacagtctgccacgcagcggttggaacatgcctttaacattgctaggtatcagttagggatcgagaagctgctggatcccgaggacgtcgacaccacttatccagataaaaagagcatactgatgtacatcacttccctgtttcaagtgctcccccagcaggtatcgatcgaagctatccaagaggtggagatgctcccccgcccaccaaaggtgacaaaggaggagcattttcagttgcatcaccaaatgcattacagccaacaaatcacagtaagcctggcacagggttacgagcgaacaagcagcccgaaacctcgatttaagagctatgcatatacccaggcggcgtacgtaacaacctctgaccccacgagaagtccttttccaagtcagcacctcgaagcacctgaggataaatcgtttggctcatccctgatggaatccgaagtcaacttagatagataccagactgctctcgaggaagtcctgtcgtggctcctttctgctgaagacactttgcaggcgcagggggaaatatctaatgacgtggaggtggtgaaggaccagttccatacccatgagggatacatgatggacctcaccgcacaccagggacgggtcggtaatatacttcagctcgggtctaaactgattgggaccggtaagctttctgaagatgaagaaacagaagtgcaggagcagatgaatctcctcaattctcgatgggaatgtctaagagtggcttctatggagaagcagagcaacttacatcgagtgctcatggatctgcagaatcaaaagctgaaggagttgaatgactggctcaccaagaccgaggaacggaccaggaagatggaagaggagcccctgggtcccgatctcgaggacttaaaacggcaggtacaacagcataaggtcctgcaggaagacttagagcaggaacaggtcagagtaaatagcttaactcacatggtggtggtagtggacgaaagctctggcgaccacgccactgccgccctcgaagaacagcttaaggtgttgggagaccggtgggcaaacatatgccggtggactgaggaccgttgggtactactacaggacattctgctgaaatggcagagactcaccgaggagcagtgccttttctctgcttggttgtccgagaaggaagatgctgtgaataagatccacacgacgggattcaaggatcaaaatgaaatgctcagctctctgcagaaactggctgttctaaaagctgatctggaaaagaagaaacaatctatgggaaagctgtacagcctgaagcaggaccttctcagtactctcaagaataaatctgtgacccaaaagaccgaagcttggctggacaacttcgcccggtgttgggacaacctggtgcagaaactcgagaaatcgacagcccaaattagtcaggctgttacaacgacacagccatcattgacccagacgaccgtcatggaaacagtgaccaccgtgaccacacgcgagcagattctcgtgaagcatgctcaagaagaactgccccccccccccccacagaaaaaacgccagatcacagtagacaccctggagcggctgcaagaactccaggaggccactgacgaacttgatctgaaactaaggcaagctgaggtgattaagggtagctggcaaccggtgggagatctcctgatagactcccttcaagatcacctagaaaaggttaaagctctccgcggtgaaatcgcacctcttaaagagaacgtgtctcatgtcaatgatctggccagacagctgaccaccctaggtatccagctgtcaccatataatttaagcactctcgaggacctcaacacccggtggaaattactgcaggttgccgtggaggaccgagtgcggcaactgcacgaagcccatcgggatttcggtccggctagtcagcacttccttagtacgagcgtgcagggtccctgggaacgcgcaatatccccgaataaggtcccgtattatattaatcacgagactcagaccacatgttgggaccacccaaaaatgacagagctgtaccagtccctggctgacctcaacaacgtgaggttttcagcctaccgaaccgcgatgaaactacgtaggctgcagaaggcactttgcctagatctgctgtccctctccgccgcatgcgacgctctggaccagcataaccttaagcagaacgaccagcccatggatattctgcagatcattaactgcctgaccaccatctacgacaggctggaacaggagcacaacaaccttgtcaacgtacctctatgcgtagacatgtgtctaaattggctgttgaacgtttacgatacgggcaggaccggtcggatcagggtgctgtcatttaagactggaattattagtctgtgcaaagcgcatctggaagataagtacaggtacctttttaagcaggtggcttcttctacgggcttttgcgaccagagacggctaggtctcttactgcacgacagtattcagatccctcgccagctgggcgaagtggcatcgttcgggggatcaaatatcgaacctagcgtccgcagctgctttcagtttgcaaacaacaagcccgagatcgaagctgcactttttctggactggatgcggctcgagccccagagtatggtgtggcttcccgtgctacatagagtggctgccgcagaaacagctaagcaccaggcaaaatgcaatatatgtaaggagtgtccaataatcggcttccgatatagaagcctgaaacactttaattacgatatttgtcagagctgttttttcagtgggcgagttgctaaggggcacaagatgcactatcctatggttgaatactgtacaccgacgacgagtggcgaagacgtgcgggactttgccaaagttctcaaaaacaaatttaggacaaagcgatatttcgctaagcatccccgtatgggatatctgccagttcagaccgtgctcgagggtgacaacatggaaaccgacacaatg

SEQ ID NO: 342839 - DNA, 3591 bp, Artificial Sequence
  derived and/or modified sequence
atgctgtggtgggaagaagtcgaggactgctatgagcgcgaagatgtgcagaagaaaaccttcaccaagtgggtgaatgcgcagttttccaagttcggtaagcagcatattgaaaacctgttctctgaccttcaggacgggagaaggctgctggacctgctggaaggactgaccggccaaaagctgcccaaggagaagggaagcacgagagtccacgccctcaataacgtcaataaagctctgcgggtgctccaaaacaataacgtcgatctggtcaacatcggatccacggacatcgtcgacggcaatcacaagctgaccctcgggctcatttggaacatcatcctgcattggcaggtgaagaacgtgatgaagaacatcatggccggactgcaacaaacgaattccgaaaagatattgctgtcgtgggtccggcagtccactcgcaactacccgcaagtgaacgtcatcaatttcaccacgtcgtggtcggatggcctcgcgctgaacgctctcatccactcacaccggccggacctcttcgactggaattcggtcgtctgtcaacaatcggccactcaacgcctggagcacgccttcaatatcgcaagataccaattgggtatcgagaaactccttgaccctgaagatgtcgacaccacctacccggacaagaaaagcatcctcatgtatatcactagccttttccaagtcctgccgcagcaggtttccattgaagccatccaagaggtcgaaatgctgccgcgcccgcccaaagtgaccaaagaagagcacttccagctgcaccaccaaatgcattactcccaacagatcactgtctcccttgcgcagggctacgagcgcacctccagccctaagccgcggttcaaatcgtacgcctacacccaggccgcctacgtgaccacctcggaccccacgcggtcgccgttcccatcccagcacctggaggcgcccgaggacaagtcatttggatcatcccttatggagtcagaagtcaatctggaccggtaccaaactgcgctcgaagaggtgctgtcgtggctgttgtccgccgaagataccctccaagcccagggagaaatctccaatgatgtggaggtggtgaaggatcagttccacacccacgagggctacatgatggacctgactgcgcatcaggggagggtgggaaatatccttcagctcggcagcaagctcatcggcactggaaaactgagcgaggacgaagaaactgaagtccaggaacagatgaatcttcttaattcgcgctgggaatgtctgcgcgtcgcatccatggaaaagcaaagtaatctgcaccgcgtcctgatggatctccagaatcagaaactgaaggaactgaatgactggctcactaaaaccgaggagcgcaccagaaaaatggaagaagaaccactcggaccggacctcgaggaccttaaacggcaagtccagcagcataaagtgctccaagaggatcttgagcaggaacaggtgcgcgtgaactcccttacccatatggttgtcgtggtcgacgagagctccggagatcacgcaactgccgccctggaagagcagctcaaagtgttgggcgaccgctgggcgaacatttgccgctggactgaagatcggtgggtcctgctgcaagatatcctcttgaaatggcagcgcttgactgaagaacagtgcttgttttctgcatggctttcagagaaggaagatgcagtcaacaaaatccacactaccggattcaaagatcagaacgagatgctgtcctcgttgcaaaaactggctgtcctgaaagctgatctggagaagaagaagcagagcatggggaagctgtactcactgaagcaggaccttctttcgaccctcaagaacaaatccgtgacccagaaaaccgaagcatggctggacaactttgccagatgctgggataatctggtgcagaagctcgagaagagcaccgcgcagatctcgcaggcagtcaccactacccagccttccctgactcaaacgacggtgatggaaactgtgactaccgtcaccactcgcgagcagatcctggtgaaacacgcccaggaagaactgccccctcctcctccacagaagaagaggcagattactgtggacaccctggaacggttgcaagaactccaagaggctactgacgaactggatctgaagctcagacaagcggaagtgatcaagggatcgtggcaaccggtgggagatctgctgatcgattccctgcaggaccatcttgagaaggtgaaagcgttgaggggcgagatcgctcccttgaaggagaacgtgtcccacgtcaacgatctggctcgccagctgactacgcttggaatccagctgtcgccgtacaacctgtccacgttggaggatctcaacactcgttggaagctgctccaagtggcagtggaagatagagtgagacagctccatgaagcccacagggacttcggcccagcttcgcaacacttcctgtcgacctcggtccaaggaccatgggagcgcgcgatctcacctaacaaggtgccctactacattaatcacgaaactcaaactacttgctgggaccatccgaaaatgactgaattgtaccagtctctggcggacctgaataacgtccggttctcggcataccggactgcaatgaagctgcgccgcctgcagaaagcactgtgcctggacctcctgagcctgtcggcggcgtgcgatgcccttgatcaacacaacctcaagcagaatgaccagccaatggacatcctgcagatcatcaactgcctgaccactatctacgaccgcttggagcaggaacacaataatctggtgaatgtgccactctgcgtggacatgtgtctcaattggctcttgaatgtgtatgatacggggcgcactggccggatcagagtgctgtcattcaagaccggaatcatcagcctgtgcaaagcgcacctggaggataagtatcgctacctgttcaagcaggttgcttcgtcaaccggcttttgcgaccagaggcgcctggggctgctgctccacgactcgatccagatccctcggcaactcggggaggtggcttcgttcggaggtagcaacatcgagccatcggtgcgctcatgtttccaatttgctaacaataagcccgagattgaagccgccttgttcttggactggatgcggctggaaccccagtccatggtgtggctcccggtgctgcatcgtgtggccgctgccgagactgcaaagcaccaggccaaatgcaacatctgcaaggagtgtccgataatcggcttcaggtacaggagcctgaagcacttcaactacgacatttgccagtcctgtttcttttccggtcgcgtcgcgaaaggacataagatgcattaccccatggtggaatactgtactccgaccacctcgggcgaggacgtgagggatttcgcaaaggtcctgaagaacaaattccgtaccaagcgctacttcgctaaacatccacggatgggctacctgccggttcagaccgtcctggaaggagataacatggaaaccgacactatg

SEQ ID NO: 342840 - DNA, 3591 bp, Artificial Sequence
  derived and/or modified sequence
atgctctggtgggaggaagttgaggactgctacgaacgtgaagatgttcagaagaaaacgttcacaaagtgggtcaatgcccagtttagtaaatttggaaaacagcacatcgaaaatttgttctcggaccttcaggatggtcgacgtcttcttgatctattggaaggactgaccgggcaaaagcttcccaaggaaaagggttcgacgcgtgtacatgcacttaacaatgttaacaaggcattgagggtcttacaaaacaacaatgtggatctggtaaacataggttctacagacatcgtagacggaaaccataagttgactctcggactcatctggaacattatcctccattggcaagtgaaaaacgtgatgaagaatattatggccggtttgcagcagactaactctgagaagatcctcttgagctgggtcaggcagagtacacggaactacccccaggtcaacgtaattaattttacgacttcatggtccgacggactggctctgaacgccctgatacattcccatcggccggatctattcgattggaactctgtagtctgtcagcagagcgctacgcaaagactggaacatgcgtttaacattgcgcggtaccagctagggatcgaaaagcttcttgatccggaagatgtggatactacttatcccgacaagaagagtattttgatgtacataacctctctgtttcaagtcctacctcagcaggtgtccattgaggcaatccaggaggtcgagatgctacctcgtccgccaaaggttacgaaagaggaacatttccagttgcatcatcaaatgcattactcgcagcagatcacggtctcactagctcagggatacgaacgcaccagcagccctaagccacgctttaagagctatgcgtacacccaagcagcctatgtcactacgagtgatccaactcgttctccattccccagccagcacctggaggcacctgaagataaatcttttggttcttcgttgatggagagcgaagtcaatttggataggtaccagaccgcgctcgaggaagttttgtcatggctcctcagtgctgaggacactctgcaggcccaaggtgagatatctaatgatgtcgaggtagtgaaggaccagttccatactcatgaggggtatatgatggacttgaccgcacaccagggtcgggttgggaatatcctgcagctgggaagcaagctaatcggtacaggtaagctatctgaagatgaggaaacagaagtgcaggagcagatgaacctgcttaactcccgttgggaatgcctacgggttgcatcaatggaaaagcaaagcaatctacatcgagtccttatggatttgcaaaaccaaaaacttaaggaacttaatgattggttgacgaagactgaagagcgtacacggaagatggaggaagagcctctgggaccagatcttgaagatctaaaacgccaggttcagcagcacaaggttttgcaggaggacttggaacaagagcaggttcgcgtcaactccttgacgcatatggttgtcgtcgttgacgagtcttcaggcgaccatgcgaccgcggcgctggaggaacaactaaaggttctgggtgaccgttgggctaatatctgtcgatggaccgaggaccggtgggtcctgctacaggatatcctattgaagtggcagagactgaccgaggagcagtgcctcttttcggcttggttatctgagaaggaagacgctgttaacaagatccacaccacagggttcaaggatcagaatgagatgttaagctcacttcagaaacttgctgtcctaaaggctgacttggaaaagaagaagcagtccatgggaaaactttattccttgaaacaagacttgctctcaacattgaagaacaagtcagttacgcaaaaaaccgaagcctggctcgataacttcgcccggtgctgggataacctagttcaaaaactggaaaagtccacggcacagatttctcaagccgtaacgacgacccagcctagtctaactcagacgacagtgatggaaacagtgacgactgtgaccacccgtgagcagatcctggtgaaacacgcccaggaggagttgccccctccacctccccagaagaagcggcagattaccgttgatacccttgagcgtcttcaggagttacaagaggcaactgacgaactcgacctgaagctccgacaggcagaggtaattaagggctcctggcaacctgttggcgacctcctcatagacagcctccaagatcatcttgagaaggttaaagcactgcggggcgaaattgcgccactgaaggagaatgtcagccacgtcaatgatctcgcgcgccaactcacgactcttgggatccaactctctccttataacctatcaactctggaggacctgaacactcggtggaagcttcttcaggttgctgtggaagacagggtgcgacagcttcacgaggctcaccgagacttcggtccagcgtcccaacactttctttccacgagcgtccagggtccgtgggagcgtgctataagtcccaataaagtgccctactacataaaccatgaaacccagacgacctgttgggatcacccgaaaatgacagagttatatcaatcattggccgatttgaacaatgttcgcttctcggcttatagaaccgcgatgaaacttagacgactccagaaggctctatgtctcgacctattgagtctatccgccgcctgcgacgcgctagaccaacacaacctcaaacaaaacgaccaaccaatggatattctgcagatcatcaactgcctgaccaccatatacgatcggttggagcaagaacataataacctggtgaatgtccccctctgtgtggacatgtgcctaaattggcttctgaatgtctatgacaccggtcgcaccggacgcatccgtgtactctcctttaagacaggtatcatcagtctctgtaaagctcatctggaggacaagtatcgctacctgttcaagcaagtagcatcttcgacaggtttctgtgaccagagacgtttaggacttctcctccatgacagtattcagatcccacgtcagcttggtgaagtggcatctttcggaggctctaatatagagcctagcgtgcgcagttgcttccaatttgccaataataagcctgaaatcgaggccgccctctttctggactggatgagactggagccacaaagtatggtctggcttccggtcctccatcgggtggcggcagcggaaaccgcaaagcatcaagccaagtgtaacatttgcaaggagtgccctattattggcttcagataccggtcgctgaaacatttcaattacgatatatgccaatcctgtttcttcagcgggagggttgctaagggacataagatgcactaccctatggtggaatattgcactcccacgacttcgggtgaggatgttcgcgacttcgccaaggtcttgaagaacaagtttcgcacgaagagatacttcgctaagcatccacgcatggggtatctccctgttcagaccgtcctcgagggagataatatggagacggataccatg

SEQ ID NO: 342841 - DNA, 3591 bp, Artificial Sequence
  derived and/or modified sequence
atgctgtggtgggaagaagtggaggattgttacgaaagggaagatgtgcagaaaaagacttttaccaagtgggtcaatgcacagttctccaagttcggaaagcaacacattgaaaatcttttctccgacctccaagatggccgccggcttctggacctgctcgaaggtttgactggtcagaagttgccaaaggaaaaaggatcgaccagagtccatgctcttaacaacgtgaacaaggccttgagggtgctgcaaaacaacaacgtggacctcgtgaatatcggctcgacggatattgtggatggcaaccacaagctgactctgggcctcatctggaacatcatcttgcactggcaggtcaagaacgtgatgaagaacattatggccgggctgcagcagactaacagcgagaagattcttttgtcctgggtgcgtcaatccacgagaaattacccgcaggtcaacgtgattaactttactacgtcttggtccgacggactggcccttaatgcactcatccattcgcacagaccagacctgtttgattggaattccgtcgtgtgtcagcagtcggcgactcagcgtctggagcacgccttcaatattgcccggtaccagttgggaatagaaaagctgctcgacccggaggatgttgataccacctacccagataagaaatcaatcctgatgtatatcacctcgctcttccaagtgcttcctcagcaagtatcaattgaagctattcaagaagtggaaatgctccctagacctccgaaggtcaccaaggaggaacatttccagctgcatcatcaaatgcattactcgcagcaaattactgtgtcgctggcacagggttacgaaagaacgtcgtcgcctaagccccggttcaagtcgtatgcatacactcaagcagcatacgtgaccacctcggatcctactcggtcccctttcccttcccaacatctggaggcaccagaagataagagctttggttcctctttgatggagtcggaggtgaacttggatagataccaaaccgcgctcgaagaggtgctttcctggttgctcagcgccgaagataccctgcaagctcaaggtgaaattagcaatgatgtcgaagtggtgaaggatcaattccacactcacgaaggttacatgatggacctcaccgcacatcaaggaagggttggaaatatcctgcaactcggctccaagctcattggcaccggtaaactttcggaggacgaggaaacggaagtgcaagagcagatgaatctgcttaacagccgatgggagtgtcttagagtcgcgtcgatggaaaaacaatcaaatcttcatcgtgtgcttatggacctgcaaaaccaaaaacttaaggagcttaacgattggctcaccaaaaccgaagaacgaactcgcaagatggaggaagaacctcttggtcctgaccttgaggaccttaagaggcaggtgcagcagcataaagtgctgcaagaagatctcgagcaagagcaggttcgcgtgaatagcctcacgcatatggtcgtggtggtggacgaatcatcgggggaccacgcaaccgctgcacttgaagagcaactgaaggtgcttggagataggtgggccaacatttgtcgctggactgaggatcgatgggtgttgctccaagatattcttctcaagtggcaacgacttactgaagaacagtgcctcttcagcgcctggctgtccgagaaggaagatgccgtgaacaaaattcacactaccggattcaaggaccaaaacgagatgctttcttcgctgcagaaactcgccgtgcttaaagcggatcttgagaagaagaagcagtctatgggaaaactgtattcacttaagcaggatctgttgtctaccttgaaaaacaagtccgttacgcaaaaaactgaagcctggctcgataacttcgcccgttgctgggataacctcgtccaaaagctggaaaagtccacggctcaaattagccaagcagtcaccaccacccagccatcactgacgcaaacgactgtgatggaaactgtgactaccgtcaccacgagggaacagatattggtgaagcatgcccaagaggaacttcctccacctcctccacaaaagaaacggcagattactgtcgataccctggagcggctgcaagaacttcaggaggcaaccgatgaactggatctgaagctccggcaagccgaagtgatcaagggatcgtggcagccagtcggtgaccttctgattgactcccttcaagatcatctggaaaaagtaaaagcactgcgcggggaaatagcaccgcttaaggagaacgtttcccatgtgaatgatctggcaagacaactgaccaccctggggatccaattgtcgccttacaacctgtcaaccctcgaagatcttaacacccgatggaaacttcttcaggttgcagtcgaggaccgggtgcggcagctgcatgaggcacatagagactttggacccgcatcccagcatttcctgtcgacctcggtccaagggccatgggaaagggcaatctccccaaacaaagtcccatactacattaaccatgaaacccaaaccacctgttgggaccatcctaaaatgactgaactttaccagtcgctggcagatctgaacaatgtgagatttagcgcgtacagaaccgccatgaaactgcgtcgacttcagaaagctctgtgtctggatctcctcagcctgagtgcagcgtgtgacgcactcgaccaacataacctcaaacagaatgaccagcccatggacattctgcagatcattaactgcctgactactatctacgaccgcctggaacaagaacacaacaacctggtgaatgtgcccctttgtgtcgatatgtgccttaattggctgctgaacgtctacgataccggacggaccgggaggatcagagtcctgtcatttaagacggggataatcagcctctgtaaggcacacctggaagataagtaccgttatctgtttaaacaagtcgcatcatcaaccggattctgtgaccagagaaggctgggtttgctcctgcatgattcaattcagataccacgccaactgggagaagtggcctccttcggaggttcgaacatagaaccctccgtccgttcctgtttccagttcgcaaacaataagcctgaaatcgaggcggccctttttctggattggatgagacttgaaccccagagcatggtgtggctcccagtcttgcaccgcgtagcagccgccgagactgcaaagcatcaggccaagtgtaacatttgtaaagagtgtcctatcatcggctttagatacaggagcttgaagcatttcaattacgatatctgccagtcatgcttcttttcgggtagagtagcaaagggtcacaagatgcactatcccatggtggagtactgtactcccacgactagcggtgaagatgtccgcgactttgccaaagtcttgaagaataagtttaggactaagcggtactttgcaaagcaccctcggatggggtacctgcccgtgcagactgtcctggagggagacaatatggaaactgataccatg

SEQ ID NO: 342842 - DNA, 3591 bp, Artificial Sequence
  derived and/or modified sequence
atgctctggtgggaggaggtggaggactgctacgagcgggaagatgtgcagaagaaaactttcactaaatgggtgaacgcgcaattttcgaagttcgggaagcaacacatcgagaatcttttctcagatctgcaagacggacgcagactgctggacctgcttgaaggtctgaccggacagaaactcccaaaggaaaaggggtcaactcgggttcacgcgctgaacaatgtgaacaaagcgctgcgggtgcttcaaaacaacaacgttgacctggtcaatataggatcgacggacatcgtcgatggaaaccacaagctgactctgggtttgatctggaatatcatcctccactggcaagtgaagaatgtgatgaagaatatcatggctgggcttcagcagactaattctgagaagatcctgctgagctgggtgaggcaatccactcgcaactaccctcaagtcaacgtcatcaatttcactacctcgtggtcagacggactggccctcaacgctctcatccactcacaccggccggacctgtttgactggaactccgtggtgtgccagcagtcagcgactcaacgcttggaacacgctttcaacattgcgagataccagctcggtatcgaaaagctcctggacccagaggatgtggatacgacgtatccggacaaaaagtccatccttatgtacatcacctcattgttccaggtgcttccacagcaggtttcgatcgaagcaatccaagaggtcgagatgttgcctcggccgccgaaagtgaccaaagaggaacacttccagctccaccatcagatgcactactcccagcagattaccgtgtccctggcgcagggatacgagagaacctcgagccctaagccacggttcaagtcgtacgcctacacgcaagcggcctacgttactacctcggatccgacccgcagccctttcccctcgcaacatctggaagctcccgaagataaatcgttcgggtcgagcttgatggaatccgaagtgaatttggaccgctaccagactgcactggaggaggtcctgagctggctgctgtcagctgaggacacgctgcaagcccagggcgagatctcgaatgacgtcgaagtggtcaaggaccagttccacactcatgaaggatacatgatggaccttactgcccaccagggcagagttggtaacatactccagttgggatcgaagctcatcggaaccggaaaactctccgaagatgaggaaaccgaagtgcaggaacagatgaacctccttaactcaaggtgggaatgcctcagagtcgcatcgatggaaaaacaatccaatttgcatcgcgtgcttatggatctccagaatcagaaactgaaggagctgaatgattggctgactaagaccgaggagcggacgcggaagatggaggaggaaccgctggggccggaccttgaggatctgaagaggcaggtccaacagcacaaagtcctccaagaagatctcgaacaagagcaggtgagggtgaattccctgacgcatatggtggtcgtcgtggacgaatctagcggcgaccacgccaccgccgcgcttgaggagcaactgaaggtgctgggcgaccggtgggcaaatatctgccggtggactgaagataggtgggtgttgctccaggacattctgctgaagtggcaacggctgaccgaagagcagtgcttgttttcggcgtggctctccgagaaggaagatgccgtgaataagattcacaccaccggctttaaagaccaaaacgaaatgctgtcgagccttcaaaagttggccgtgctgaaagccgatctcgaaaagaagaagcagtcaatgggaaagctctattctctcaagcaggacctgctgtccactctgaagaacaaatctgtgacgcaaaagaccgaagcatggctcgacaactttgctcgctgctgggataacctcgtccagaagctggagaaaagcaccgcacagatatcgcaggctgtgacgaccactcagccatccttgactcagaccactgtgatggaaaccgtcactaccgtgactacccgggagcaaatcctggtgaagcatgcgcaagaagagctgccgccacctccgccccagaagaagcgtcagatcactgtggacactctggagcgacttcaggagctgcaagaagcgactgacgaattggacctgaagctgcgccaggccgaggtgatcaaaggatcgtggcaaccggtgggagatctgctgatcgactcgctgcaggatcatcttgaaaaagtcaaggcgctcagaggagaaatcgccccgcttaaagaaaatgtgtcccacgtgaacgacttggctcgacagctcactactctgggaattcagttgtcgccttacaacctctccacccttgaagatctcaacactagatggaagctcctccaagtggctgtggaggatcgcgtgaggcagctgcacgaggcccatcgcgatttcggcccagcatctcagcatttcctgtcgacgtcggtccagggcccgtgggagcgggcaatcagccctaacaaagtgccatactacatcaatcatgagacgcagactacttgttgggaccacccaaagatgaccgaactgtatcaaagcctggccgacttgaacaacgtgcgcttctcagcctaccgcaccgccatgaagctgcggaggctccagaaagcgctgtgtcttgatctcttgtcactctcagcagcatgcgacgcactggaccagcacaatctgaagcagaacgaccaaccgatggacattctccagattatcaactgcctgaccactatctacgatcgcctggaacaggagcataacaatttggttaacgtcccgctgtgcgtcgacatgtgcctgaattggctgttgaacgtctacgatactggccgcaccggacgaatccgggtgctctcctttaagaccggaatcatcagcctctgcaaagcgcatctggaagataagtataggtacctgttcaagcaggtggccagcagcaccggcttctgcgatcagagacggctgggattgctcctgcacgattctattcagatacccagacaactgggggaggtcgcatcctttggaggttcaaacatcgaaccgtctgtccggagctgtttccagtttgccaacaataagcccgaaatcgaagcggcactgttcctggattggatgcggttggagccacaatcaatggtgtggttgccggtgctgcacagagtcgccgcagctgaaaccgccaagcatcaagccaagtgcaacatctgcaaagaatgcccaatcatcgggtttcgctaccgctcactcaagcactttaactacgatatctgccaaagctgtttcttctcgggacgggtggctaaaggccacaagatgcactacccgatggtggagtactgtacgcccactacctccggcgaggacgtgcgggactttgcaaaggtgctcaagaataagttccgcacgaagaggtacttcgctaagcatcctcggatgggatacctcccggtgcaaactgtccttgaaggagacaacatggaaaccgatacgatg

SEQ ID NO: 342843 - DNA, 3591 bp, Artificial Sequence
  derived and/or modified sequence
atgttatggtgggaagaagtggaggattgctacgagcgtgaggatgttcaaaaaaagactttcacaaaatgggtcaacgcacaattcagcaaattcggaaaacaacatatcgaaaacctcttctccgacctccaggacggccggagattactggatctgctcgaaggcctgactggccaaaaactgcctaaggagaagggatccacaagggtccatgccctcaacaacgtcaacaaagccctgcgggtgctccagaataataacgtggacctggtcaacatcggctccacagatatagtggatggtaatcacaaattgaccctgggcttaatctggaacatcatcctccactggcaggtgaaaaatgtgatgaagaatattatggctggcttgcaacagacgaattctgaaaagatcctgctgtcctgggtgcgccagagcacacgtaactatccccaagttaatgtcatcaacttcaccacttcatggtccgacgggctggccttgaacgcactgatacacagccaccgacccgatctttttgattggaactcggtggtgtgtcagcagagcgccactcagaggctcgagcatgcctttaacattgcaaggtatcaactcggcatagagaagctgctggacccagaagatgtcgataccacttatcctgacaaaaaaagcatactaatgtatatcaccagcctgtttcaggtcttgccccagcaggtctccatagaggcaatccaggaagtggagatgcttccaaggcccccaaaagttacaaaagaggaacatttccagttacatcatcagatgcactatagccagcaaattaccgtctccctagctcagggctatgaaagaacatcctcacctaagcctagattcaagtcctacgcctatacgcaggccgcttacgtgaccactagcgatccgacccgatctccatttccctcccagcacttagaggcaccagaggacaagagtttcggttcatccctgatggaatccgaagtcaatttagacagataccagaccgctctggaggaagtactctcctggctgctgtcagcggaagacaccctgcaggctcagggagaaataagtaacgatgtggaagttgtcaaagaccagttccatactcatgagggatacatgatggacctgacggcacaccagggccgtgtgggcaatatcctacagctgggatcaaaattgatcggaacaggaaagctctccgaagatgaagaaactgaagtccaggaacaaatgaatttgctgaattcacgctgggagtgtctccgggtggcctccatggagaagcagagtaacctccaccgcgttctcatggatcttcagaatcagaagctcaaggaactcaacgactggcttaccaagacggaggagcgtacccgcaaaatggaggaagaacctctgggacctgacctggaggatctgaagaggcaggtccagcagcataaagtacttcaagaggatctcgaacaggagcaggttcgggtcaatagcctgacccacatggttgtggtcgtggacgagagcagcggggatcacgcaacagccgctttggaagaacaactaaaagtcctgggcgaccggtgggctaacatatgccgctggactgaggatagatgggtgttgcttcaggacattctgctcaagtggcagcgcctgacagaggagcagtgcctgttctctgcctggctgtctgaaaaagaggatgctgttaataagatccatactacgggtttcaaggatcagaacgaaatgctgagctctcttcagaagctagctgtgctaaaagctgatctggaaaagaagaaacaatccatgggcaaattatactcactgaaacaagaccttctgtctactctgaaaaataagagcgtgactcaaaaaacggaagcctggctagataactttgcccggtgttgggataatctggtacaaaagctggagaagagtactgcccagatatcccaggcagtcactaccactcaaccttcacttacgcaaacgactgtgatggagaccgtcacgactgtgaccaccagagaacaaattttggttaagcacgctcaggaggaactcccacccccgcctccacagaagaaaaggcaaattactgtggacacacttgagcgtttgcaggaactgcaggaagccacggacgaacttgacctcaaactgcggcaagccgaggtcataaagggctcttggcagccagtcggtgacctcctaattgattcccttcaagatcaccttgaaaaggttaaggcattgagaggcgaaatcgcacctctaaaagagaatgtaagccatgtgaatgatctggcccgccaactaacaacactcggcattcagctttccccttataatctgagtaccctggaggatctgaacactcgctggaagctgctgcaagtggccgtggaggatagagtaaggcagcttcacgaagcgcacagagattttggaccagcttcacagcatttcttgtcaacatcagtccaggggccatgggaacgtgctatctcacctaataaggtgccatactacatcaatcatgaaacccaaacaacctgctgggatcatcccaagatgacagaactgtaccagagtctggctgatctgaataacgtgaggttcagcgcctatcggacggcaatgaagctgagacgcctgcagaaggctctctgtctggatctgctcagcctatcagcggcttgtgacgccttggaccagcataaccttaagcaaaatgaccagccaatggatatcctgcagatcattaattgcctcaccaccatctacgacagactggagcaagaacacaacaacttggtgaatgtaccattgtgcgtggatatgtgcctgaattggctgttgaacgtatatgatactggccgcacaggacgaatcagggtgctctcttttaagacaggaatcatctctctgtgcaaggcacacctggaggacaagtaccgttacctgtttaagcaggtcgctagcagcaccggattctgtgatcaacgacggctcggtctgctcttacacgactcaattcagattccacggcagctgggagaagtggcctcctttgggggcagtaacattgagccatctgtcagatcttgtttccagttcgccaataataaacctgaaattgaggcagcgctgttcctggattggatgcggttggagccccagagtatggtgtggcttcccgtgctgcaccgcgtggcggcagccgagacagcaaaacatcaggccaagtgcaacatttgcaaggaatgccctataattggtttccggtatagatcccttaagcattttaactatgatatatgccaaagttgtttcttctctgggagagtagctaagggacataaaatgcactatcccatggttgagtattgtactccaactaccagcggtgaggatgttagggacttcgcaaaggtgttaaagaacaagttccgcaccaaaaggtacttcgccaaacatcctcggatgggctatctgcccgtgcaaacggtgctggagggcgacaatatggaaacggacaccatg

SEQ ID NO: 342844 - DNA, 3591 bp, Artificial Sequence
  derived and/or modified sequence
atgttgtggtgggaggaggttgaggactgttacgagagggaagacgtgcaaaagaagaccttcacgaagtgggtgaacgctcagttcagtaaatttggcaagcaacacatagagaaccttttctccgatctgcaggacggtagacggctactagacctcctagaagggctcactggccaaaagctccccaaagagaaaggaagtacccgagtgcatgcacttaacaatgtaaataaagccctgagagtgctgcagaataacaatgttgatcttgtcaacattggctccacagatatagtggacgggaaccataagttaaccttggggctgatatggaatattatcctccattggcaggtgaagaatgttatgaaaaacattatggcagggctgcagcaaaccaatagtgagaagattctgttatcttgggtgagacagagcacacgtaattatcctcaggtgaacgttattaattttacaacatcctggtccgacggcctagcactgaacgccttaatccacagtcaccgcccagacctttttgactggaactcagttgtctgtcagcagtctgccacgcagaggcttgagcatgcattcaacattgccaggtaccaactgggaatcgagaagctgctggatcctgaggatgtggatacgacttatcccgataagaaatctattctcatgtacatcacgtccctatttcaggtgctgcctcagcaagtgtctatcgaagccatccaggaggtggaaatgctgcccaggcctcctaaggtcacaaaggaggagcactttcagctgcaccaccagatgcactatagccagcaaataacggtctcgctagctcagggttacgagagaacatcgtccccaaagccgcgatttaagagctatgcttacacacaagcagcatatgtcactacatccgaccccactcgatcccccttcccttcacagcacttagaggcccctgaagataagtcgtttggctctagccttatggagagtgaggtaaacctcgatcggtatcagactgcactggaggaagtgctttcttggctgctgagtgcagaagatactctgcaggcacagggggagattagtaatgatgtggaagtggtaaaagatcagttccacactcatgaggggtacatgatggatctcactgcccaccaggggcgggtcgggaacatcttgcagttgggaagtaagctgataggcactgggaagttgtctgaggacgaagaaacagaagtgcaagagcagatgaacctcctgaactcccgctgggagtgtctgcgagtagcctctatggagaaacagagcaatctgcaccgtgttttaatggacctgcagaatcaaaagctgaaggagctcaacgactggttgacaaagacagaggaacggacccggaaaatggaggaagaacccctgggtcccgacttagaggatttgaaacgccaggtgcagcagcacaaagtgctgcaggaagacttggaacaggagcaggtccgagtgaactcactgacccatatggttgtagtggtcgacgagagctccggagatcatgctaccgctgccttggaggagcagctcaaagtgttaggggacaggtgggcaaacatttgccgctggaccgaagataggtgggtgttgctccaggatattctgctgaagtggcagaggctcaccgaggaacagtgtctgttctccgcatggctttctgagaaagaggacgcggtgaataaaattcacaccaccggcttcaaagatcagaacgaaatgttgagttccctgcagaagttagcagtcttaaaagccgacttggagaagaaaaaacagtccatgggcaaactgtattctttaaagcaggatctactgtcaaccctgaagaataaatctgttactcagaagaccgaagcttggcttgataactttgcccggtgctgggataacctcgtccagaaacttgagaagagcaccgctcagatatctcaggcagtgactaccacacaaccatcactgacccaaactacagtcatggagaccgtgacaaccgttacaacccgcgagcaaatcctggttaaacacgcacaagaggaactaccgccaccaccgccacagaaaaagaggcagatcactgtcgatacgctcgaacggttgcaggaactgcaggaggccaccgatgaactggacctgaagctgaggcaggctgaagttatcaagggatcctggcagccagtcggggatctgctgattgacagtctgcaagaccacctggagaaggtcaaggcactaaggggcgaaatcgcccccctcaaggagaatgtgtcacacgttaacgacctggcgcggcaacttaccacactgggtattcaactgagcccatacaacctgtccaccctcgaggacctgaatacacgctggaaactgctgcaagttgccgtggaagatagagtgcgacaactacacgaggcacatagagactttgggccagccagccagcatttcctctcaacaagcgtgcaaggcccatgggaacgtgccatctcacccaataaagtcccgtactacataaaccacgagacccaaacaacatgttgggatcaccctaaaatgaccgagctgtatcagtccctggcggatttgaataacgtccgtttcagcgcctaccggactgcgatgaagttaaggcggctgcagaaagcactgtgtctggacctcctctctctcagcgccgcctgtgacgcacttgaccagcataatcttaaacagaacgaccagcccatggacatcctacagatcataaactgtcttacaactatctacgaccggcttgagcaggagcacaataatctagtcaacgtgcctttatgtgtggatatgtgtctgaattggcttctgaacgtgtacgacacaggtcgcacgggcagaatcagggtgttatcattcaaaacgggaatcatctctctctgtaaggctcacctagaggacaagtatagatatctcttcaagcaggtcgcatcgtccaccggattttgtgaccagaggcgattggggctcctgctccacgattctatacagatcccacgacagttaggagaagtggccagcttcggtggctcaaacatcgagccatcggtgaggtcatgctttcaatttgccaataataagcccgagattgaggcggcactttttctcgattggatgcgcctggagccccagtctatggtatggttacctgtgctgcaccgcgtcgccgctgctgagacagccaaacaccaggcaaaatgcaacatttgtaaagaatgccccattatcggattcaggtatagatctttaaaacactttaactatgacatctgtcagtcctgtttctttagcggcagagttgctaagggtcacaaaatgcactaccctatggtcgagtactgtacccctactacatcaggcgaggatgtgcgcgattttgctaaggtcctgaagaacaagttcagaactaagcgctattttgctaaacacccccgcatgggctatcttccagtccagaccgttctggagggtgacaatatggagacagatacaatg

SEQ ID NO: 342845 - DNA, 3591 bp, Artificial Sequence
  derived and/or modified sequence
atgctttggtgggaagaagtggaagattgctatgagcgcgaagatgtgcaaaagaaaacgtttaccaagtgggtcaatgcgcagtttagcaagtttggtaagcagcatatcgaaaacctcttttccgatctccaggatgggcggcggctgcttgatcttctggaaggtctgactggacaaaaactgccaaaggaaaagggttcgactagagtgcatgctctgaataatgtcaacaaagctcttagggtgcttcagaataacaacgttgatcttgtcaatataggtagcactgatattgtggatggaaaccacaaactcactttgggtctgatatggaacattatcctccattggcaagtgaagaacgttatgaaaaacatcatggcgggacttcaacaaaccaactcagaaaagatacttctgtcctgggtgagacagtctactagaaactacccccaagtcaatgtgattaacttcaccacttcctggtccgatgggctggcactcaatgcgcttattcactcgcatagaccagacttgtttgattggaactccgtggtctgccagcaaagcgcaacccaacgtctggaacatgcatttaacatcgcacgataccaacttggtatcgaaaagctgttggaccccgaggacgtggataccacctaccctgataagaaatcaatactcatgtacataacttccctgtttcaggtcctcccccagcaagtcagcattgaagccatacaagaagtggaaatgctgccccggccacccaaagtcactaaagaggaacattttcaactccatcatcaaatgcactacagccaacagatcaccgtgtccctcgcacaagggtacgagcgtacttcgtcgccaaaacctagatttaagtcctacgcctacacgcaggcggcatacgtcaccacttcggatcctaccaggtcccctttcccgagccaacatctggaagcacctgaggacaaatccttcggctcgagcctgatggaatccgaggtgaacctggatcgttaccagaccgcactggaagaagtcctgtcttggctgttgagcgctgaggacaccctccaagcacaaggcgaaatttcgaacgacgtggaagtcgtgaaggatcaattccatacgcatgaaggctacatgatggacctgaccgctcatcagggacgagttggtaacattctgcagttggggtccaaactcattgggactggtaagttgtcagaggacgaagagactgaggtgcaagagcaaatgaacttgctcaattcgaggtgggaatgtctgagagtcgcatcgatggagaagcagtcgaacttgcatcgggtcctgatggacctccagaaccagaagctgaaggagttgaacgattggctgaccaagacggaagaacgcacccgtaaaatggaagaagaacctctgggccctgacctggaagatctcaaaagacaagtccaacaacataaggtgttgcaggaagatctcgagcaggaacaagtcagagtgaactcgctgacccacatggtggtcgtggtcgatgagtcctcgggggatcatgccaccgccgcacttgaggagcaacttaaggtgctgggtgatcgctgggcaaacatctgccggtggaccgaagatcggtgggtgctcttgcaagatattctgcttaagtggcagcgtctgactgaagaacagtgtcttttcagcgcatggcttagcgaaaaggaggatgcggtgaacaagatccacacgacgggatttaaggatcagaacgaaatgctgagctctctgcagaaactggcagtccttaaagcagatctcgagaagaagaagcaaagcatgggtaaactctattccctcaagcaagatctgctttccactctcaaaaacaagtcagtcactcaaaaaaccgaagcgtggctcgacaacttcgcaagatgttgggacaacctggtccaaaagctcgaaaagtccaccgcccaaatatcccaggccgtcaccactacccagccatcgctcactcagactactgtcatggaaaccgtcactacggtgactaccagagaacagatccttgtgaaacacgcccaggaagaacttccaccacctccaccacaaaagaagaggcaaataactgtcgacactcttgaacgcctgcaggagcttcaggaggcaaccgatgaactggatctgaagctgcggcaagcggaagtgattaagggatcctggcaacccgtgggtgaccttcttattgactccctgcaggaccacctcgaaaaggtcaaagcattgagaggggaaattgcacctctgaaggaaaatgtgtcgcatgtgaacgatctggcgcgtcaactcacgactcttggaatccagttgtcgccttacaatctgtcgacccttgaagatcttaacaccagatggaagctccttcaggtggccgtggaagatcgagtgagacaacttcatgaagcccacagggattttggcccagcatcgcaacactttctgtccactagcgtccaaggtccatgggaaagggcaatctccccgaacaaggtcccttactatatcaaccacgagactcaaactacttgttgggatcatcctaagatgacggagctgtaccagtcactggcggatctgaacaatgtgcggttttccgcatacagaaccgcaatgaagctgcgtagactgcaaaaggcactgtgtctggatctgctgtcgctctccgcagcctgtgatgcactcgatcagcataaccttaagcagaacgaccagcccatggatattctgcagatcataaactgtctcaccaccatctacgatagactggaacaggaacataacaatctggtgaatgtgcccctttgtgtggatatgtgcctgaactggctgctgaacgtgtacgataccgggaggaccggtcgcatcagggtgctgtcgttcaaaaccggaattatctccttgtgtaaggcccaccttgaggacaaatatcgttaccttttcaagcaagtggcttcatcaaccggattttgtgaccaacgtagactggggcttctgttgcatgattcaattcagattcctcgacagctgggtgaagtggcatcgttcggagggtcgaatattgagccgtctgtgagaagctgttttcagttcgccaacaataagccagaaattgaagcagcgctgtttttggattggatgcggcttgaaccccaatcaatggtgtggctgccagtgctccaccgggtggctgcagctgaaaccgcaaaacatcaagcaaagtgtaacatctgcaaagagtgcccaattatcggatttcggtaccgatcactgaagcactttaactatgatatttgccagtcgtgttttttctcaggcagagtcgcaaagggccacaagatgcactacccaatggtggagtactgtaccccaaccacttccggtgaagatgtcagagattttgccaaggtgctgaagaacaagtttcgaactaaacgttactttgctaagcatcctcgcatgggatacctgcccgtgcagaccgttctcgaaggcgacaatatggaaaccgacacgatg

SEQ ID NO: 342846 - DNA, 3591 bp, Artificial Sequence
  derived and/or modified sequence
atgctgtggtgggaagaggtagaggactgttatgagagggaagacgtccagaagaaaacttttacgaagtgggtgaacgcacagtttagtaagttcggcaaacagcacattgagaatctgttttctgatctgcaggatgggcgacggctcctagatctcctggagggactgactggtcaaaagctgcctaaggagaagggatccacgcgtgtccatgctttaaacaatgtgaataaggccttacgtgttctccagaataataatgtagatttggtaaacatcggaagcactgatatcgttgatgggaaccataagctgacgctgggcctgatttggaacatcattctgcactggcaggtgaagaatgtgatgaaaaacatcatggcgggattgcaacagacaaacagcgagaaaattttgttgagttgggtgagacaatcaaccagaaactacccccaggttaacgtgataaatttcaccacaagttggagtgatggattagcgctgaacgcattgattcacagccacaggccggatctgtttgattggaattccgtagtatgccagcagagcgcaactcagcgcctggagcatgcttttaatatcgcaaggtaccaactgggcattgagaaactgctcgacccagaggacgttgatacaacctaccccgacaagaagagcattctgatgtacataacgtccctgtttcaggtcctcccacaacaggtgtcaatcgaggctatccaggaggtcgaaatgctaccaagaccaccaaaagtgactaaagaggagcacttccagctccaccatcagatgcactactcccagcagatcacggtctctctggctcagggctacgagaggacatcctctccgaaacctaggtttaagagttatgcttacacacaggccgcctatgtgacaacgagcgatcccacaaggtccccctttcctagccagcacctggaagccccagaagacaaatcttttggcagttccctgatggagtcagaggtcaatctcgatcggtaccagactgcattggaggaggttttgtcctggctcctgagcgccgaggacactctccaggcccagggagaaataagcaatgatgtggaagttgtcaaggatcagttccatacccatgaggggtacatgatggacctgacagcacaccagggaagggtggggaacattctgcaactggggagcaaattgattggcaccggtaaattgtctgaggatgaggagacagaggtccaagagcagatgaatctactgaattcaagatgggagtgcctcagagtcgcatcaatggaaaaacagtcaaaccttcatagggtgctgatggacctccaaaatcagaagttgaaggaactgaacgactggctaactaaaaccgaggagcgtaccaggaaaatggaggaggaaccactgggccctgatctcgaagacctcaagcgccaggttcaacagcacaaggtccttcaggaagatctcgagcaagaacaggtgcgggtcaacagccttactcacatggtggtggtggtagatgagtcctcaggcgatcacgccaccgcagcgctggaagaacagctaaaggttctgggggaccgttgggccaacatttgccggtggactgaggatagatgggtcctgctgcaggatattcttctcaaatggcaacggctaacagaagagcagtgcctctttagtgcctggctctcggaaaaggaagacgccgttaataagattcacaccaccggatttaaggaccagaatgagatgctttcatctcttcagaaactggctgtgctaaaagccgatcttgaaaagaagaagcagtctatgggcaagttgtactcactgaaacaagatctcctctccaccctgaagaacaaatcagtaacccagaaaaccgaagcctggcttgacaacttcgccagatgttgggacaacctggtacagaagctggaaaagtctaccgcccagatatctcaggcagtcactactactcaacccagcctcacccagactacggtcatggaaactgtgaccactgtgaccactcgggagcagatcttggtgaaacatgcgcaggaagagctgccccctccaccaccccagaaaaagcgtcaaatcacagttgacacactcgagcggctgcaagaacttcaggaagcaacagacgagctggatctgaagctgcgccaagctgaggtgattaaaggatcatggcagcctgtgggagacctgcttatcgactctctgcaggatcatctggaaaaagttaaggcactgaggggtgagatcgcacctctcaaggagaatgtcagccatgtgaatgatctggcacgacagctcacaacacttggcatacagctttctccctacaatctctctactctggaggacttgaataccagatggaaacttttacaggtcgccgtggaagaccgggttagacagttgcacgaggctcaccgagacttcggccctgcgtctcagcattttctgtccactagcgtgcagggcccatgggaaagggccatttctcctaacaaagtcccatactatataaatcacgagacccagactacctgttgggaccaccccaagatgactgaactgtaccagagcctcgccgacctcaataacgtcagattctcagcatatcggactgccatgaagctccgtaggctacaaaaggcgctctgtctagatctgctgagtctgagtgcagcctgtgacgctttggatcagcacaaccttaagcagaacgaccagcctatggatatcctgcagatcatcaattgtttaacaacaatctacgatagactagaacaggagcataataatctcgtgaacgtgccactctgcgtcgacatgtgtctgaactggctgctgaacgtatacgacactggccgaaccggtagaatccgcgtgctgtcattcaaaaccggcatcatttctctttgcaaagcgcacttagaggacaagtaccggtacctgttcaaacaggtcgcttctagcaccgggttttgcgatcaaagaaggttaggcctcctcttgcacgattcaatccagattccaaggcagctcggtgaggtggcatccttcggaggctccaatattgagccgagtgtgagatcatgctttcagttcgccaataacaagcctgaaatcgaggctgcattgttcctcgactggatgcgtttggaaccccaatctatggtttggctgcccgtgctacacagggtagccgctgccgaaactgccaagcatcaggccaagtgcaacatctgcaaagaatgccctattatcggtttccggtacagaagccttaagcactttaattacgacatctgccaaagctgtttcttcagcggcagagtcgcaaaaggccacaaaatgcattaccctatggtggagtactgcacccctactaccagcggagaagatgttcgcgattttgcaaaagtgctgaagaacaaattcaggacgaagaggtatttcgcaaaacaccctcgcatgggatatctgcctgtccagactgtgcttgagggcgacaatatggagacggacacaatg

SEQ ID NO: 342847 - DNA, 3591 bp, Artificial Sequence
  derived and/or modified sequence
atgttgtggtgggaggaggtcgaagactgctacgaaagggaagacgttcaaaaaaagacttttactaaatgggtgaatgctcagttttccaagtttggaaaacagcacatcgagaacttgttctccgacctgcaggacggcaggcgcctcttggacctgttggaaggtttgacaggtcagaagctgcctaaagagaagggatccactagggtgcacgctcttaataacgtgaacaaagccctcagggtgcttcagaataataacgtggatttggtgaacatcggaagcaccgatattgtcgacggtaaccacaagctgacactgggactcatttggaatattatactccactggcaggtcaagaatgtgatgaagaatatcatggccggtttgcagcagaccaatagcgagaagattctcctgtcatgggtgcgccagtctactaggaactatccccaggtgaacgtcattaactttaccacctcttggtctgacggcctcgctctgaacgcacttatccattcccatagacccgatttgttcgactggaattctgttgtgtgccagcagtctgcaacccagaggcttgagcacgcttttaatatcgctcgttaccagctgggtatcgaaaagctgttggaccccgaagatgtcgataccacctaccccgataagaagtccatcttgatgtatatcaccagtctcttccaagtgcttccccagcaagtgtccattgaagctattcaagaagtggagatgctgcccaggccacctaaggtaactaaagaagagcatttccagcttcaccatcagatgcactatagccaacagattaccgtttctttggcccagggatacgagcgcaccagctctcccaagccaagattcaaatcctacgcctacacccaagctgcctacgtaactacctccgaccctacaagatctccatttccaagtcagcacctcgaagcccccgaggacaagagttttggaagttcactcatggaatccgaggtgaacctggacaggtaccaaactgctttggaggaggttctttcctggctgttgagcgcagaagacaccctccaggcccagggtgaaatttctaacgatgttgaagttgtcaaggaccagttccacacccatgagggctacatgatggatctcactgcccaccaaggcagggttggcaacattttgcaattgggcagtaagctgattggtactggcaagctgagtgaagatgaagaaaccgaggtgcaggagcagatgaatctcctcaactcacgctgggagtgcttgagagttgccagcatggagaagcaaagcaacctgcaccgcgttttgatggacctgcaaaaccagaagttgaaggagctcaacgactggctgaccaagactgaggagagaactagaaaaatggaagaagagccactgggccctgatcttgaggacctgaaaaggcaggtgcagcaacacaaagtactgcaggaagacctggagcaggagcaggtccgcgtcaatagccttacccacatggttgtggtcgtcgacgagagctcaggcgaccatgctactgctgccctcgaagaacagttgaaggtgcttggtgaccgctgggccaatatatgtaggtggaccgaagatcgctgggtactcctgcaggacattcttctcaagtggcagcgcctcaccgaagagcagtgcctttttagcgcatggctgagcgagaaggaggatgccgtcaacaaaattcatacaaccggatttaaggaccagaacgaaatgctctcttcactccaaaagcttgctgtcctgaaggccgatttggagaagaaaaaacagtctatgggtaagctgtattccctgaagcaggacttgctcagcaccctgaagaacaagagcgtgacacagaagaccgaggcttggctggataacttcgccagatgctgggataatctggtccagaagctggagaaatcaaccgcacagatctcacaggctgtaacaactacccagccaagcctgacccagaccacagtgatggagacagtgacaactgtcaccactagggagcagatccttgtgaagcacgcccaggaggaactgccccccccccctccacagaagaagcgccaaattaccgtggacactctcgagagattgcaagagctccaggaagcaaccgacgaattggaccttaaactccgtcaggcagaagtgattaaaggtagttggcaacctgtgggagatctgttgattgacagtctccaggaccacctggagaaggtgaaggccctgagaggtgaaatagctcctctcaaagagaatgtgtcacacgttaacgatttggccaggcagttgaccacactcggcatccagctcagcccctacaatttgtccactctggaagatctcaacactcgctggaagctgcttcaggtagcagttgaggaccgcgtaagacaacttcatgaggcacaccgcgacttcggacctgcctctcagcactttctctcaaccagtgtgcagggcccctgggaacgtgccatttcaccaaacaaagtcccctattacattaatcatgagacccaaaccacttgctgggaccatcccaagatgactgagctttaccaatccctggcagacctgaacaacgtgcgcttttccgcctacagaaccgcaatgaaactgaggaggcttcagaaggccctctgcctggatctcctgagcctgtccgccgcctgtgacgccctggaccaacacaacctcaaacaaaatgaccagcctatggatatacttcaaatcatcaattgtctcactaccatatacgatcgcctcgagcaagagcacaacaaccttgtgaatgtccctctgtgtgtggacatgtgcctgaattggctgctcaacgtctacgacaccggacgcacaggtcgtatccgcgtgttgagcttcaagactggtatcatctctctgtgcaaggcccatctcgaagataaatatcgttacctctttaagcaggttgctagtagcacaggtttctgtgaccagaggaggttgggactgctgctgcacgacagtatccagatccctaggcagttgggtgaggtcgcctcttttggaggctcaaacattgaaccaagtgtacgctcttgtttccagtttgcaaataacaaacccgaaattgaggccgcactgttcttggactggatgagactcgagccacaatccatggtgtggcttccagtcttgcacagagtggctgcagcagaaactgccaagcaccaggcaaagtgcaacatctgtaaggagtgccccatcattggttttcgctacaggtccctgaaacatttcaactacgacatctgccagtcatgttttttctccggtagagtcgcaaagggtcacaaaatgcattatcccatggtggagtattgcactcccacaacaagcggcgaagacgtccgcgacttcgcaaaagtgcttaagaacaagttccgcaccaagagatactttgcaaaacatcccagaatgggatatctgcccgtccaaactgtcctggagggagataatatggaaaccgatactatg

SEQ ID NO: 342848 - DNA, 3591 bp, Artificial Sequence
  derived and/or modified sequence
atgctttggtgggaagaagtggaggactgttacgaacgtgaggatgtgcaaaagaaaacgttcaccaagtgggtgaacgcacaattttccaagttcggtaagcaacatattgagaacttgttctccgaccttcaagatgggagacgattgctggatctccttgagggactcactggtcagaagctgccgaaagagaaaggtagcacccgcgtgcatgcactgaataatgtcaacaaggcgctgagagtgctgcaaaacaataatgtggatcttgtgaacatcggatcgaccgacatcgtggatggaaaccacaagctgaccctcggactgatctggaacattatcctccattggcaggtcaagaacgtgatgaagaacattatggccggccttcaacagaccaattccgaaaagattctcctgagctgggtgcgccaatcgaccaggaactaccctcaagtgaacgtgattaactttactacctcctggtcagacggtcttgcgctgaacgcactcatccattcgcaccggcctgaccttttcgattggaattccgtggtttgtcagcaatcagctactcagcggctcgaacatgcattcaacatcgcaagataccaactgggtattgagaaattgttggatccagaggacgtggataccacctacccggataagaagtccattctcatgtacattacttcgctctttcaggtgctccctcagcaagtcagcatagaagcaatccaagaagtggaaatgcttccccgtccgccaaaggtgacgaaggaagaacatttccaactccatcaccagatgcactattcacaacaaattaccgtgtcgctcgcacagggatacgaacgaacctcgagccctaagcctaggttcaagtcatacgcatacacgcaggcagcctacgtcacgactagcgatcccactaggtcgcctttccctagccagcacctggaggcgcctgaagataaatcgtttggcagttcactgatggaatcagaagtcaatctggatcgttaccaaaccgccctcgaagaagtgctgtcctggctcctgtcggcggaagatactctgcaagcgcaaggagaaatttctaacgacgtggaggtggtcaaggaccaattccacacccacgaaggatacatgatggacctgaccgcacatcaaggaagagtggggaatattctccaactcggatcaaaactcatcggcacgggaaagctcagcgaagatgaggaaactgaagtgcaagagcagatgaacctcctcaactctaggtgggaatgtctcagagtggcatctatggaaaaacagtccaatctccatagggtccttatggatcttcaaaaccaaaagctcaaggaacttaacgactggctcactaagaccgaggaacggacccgcaaaatggaagaggagcctttgggtcctgacctcgaagatcttaagcgacaggtgcaacagcataaagtccttcaagaagatctggaacaggaacaggtgagggtgaattcccttacccacatggttgtggtggtggacgaatcgagcggcgaccatgcaaccgctgcgctcgaagagcaactgaaggtcctgggcgatagatgggcaaacatttgtagatggaccgaagatcgatgggtgctgctgcaagacattctgttgaagtggcaacgccttactgaagaacagtgcctgttctcggcatggctgtccgaaaaggaagatgcggtgaacaagatacataccaccggatttaaggatcaaaatgaaatgctgtcaagccttcaaaaacttgccgtgctgaaggcagatctcgagaagaaaaaacaatcgatgggcaaactgtactcgctgaaacaggatctgctgtccaccttgaaaaacaagagcgtgacgcagaaaaccgaagcatggcttgacaatttcgcaagatgttgggataatctggtccaaaagttggaaaagtcaactgcacagatcagtcaagcagtcactaccacccagccctcacttactcagaccaccgtgatggaaaccgtaaccaccgttaccactagagagcagattctcgtcaagcatgcacaagaagaacttcctcctccacctcctcagaagaagcggcagattactgtggatacccttgagcgcctccaggaactccaagaagcaaccgacgaacttgacctgaagctccgccaagcagaagtgattaagggatcatggcagcctgtcggggacctgctgattgattcacttcaggaccatctcgaaaaggtgaaagcacttagaggggagattgcacctctgaaagaaaacgtgtctcatgtgaacgatttggcgcggcagctgactacccttggcattcaactctccccttacaacctgtccactctggaggatctgaacactcgatggaagctcctccaggtggccgtcgaagatagggttcggcaactccatgaagcacatcgggactttggtcccgcctcccaacactttctctcgacctcagtgcaaggaccctgggaaagggcaatctcacctaataaggtgccttattacattaatcacgagactcagaccacttgttgggatcatccaaaaatgaccgagctgtaccagtccctggcagaccttaacaacgtgcggttttccgcataccggactgcaatgaaacttcggcggcttcaaaaagcactgtgtctggatctcctgtcactttccgcagcttgtgacgctttggatcaacacaatttgaagcagaacgaccaaccaatggatattctgcagatcattaactgtcttactaccatttacgatagactggaacaggagcacaacaacctggtgaacgtcccgctttgcgtggatatgtgtctcaactggctcctgaatgtttacgatactggacgcacgggaagaattagagtgctctccttcaaaactggtatcatttcactttgtaaagcgcatttggaggacaagtatagatacctgttcaaacaggtggccagctccactggattttgtgaccaacgtcgactcggcctgctgcttcatgactccatccaaataccccgccaactgggtgaagtggcatcgtttggaggatcgaatatagaacctagcgtccgaagctgttttcagtttgccaacaacaagccggaaattgaagcagcattgtttcttgattggatgagacttgaaccacaatcaatggtctggttgccagtccttcatagagtggctgcggccgaaactgccaaacaccaggcaaagtgcaacatttgtaaagaatgccctatcataggctttaggtaccgatccttgaagcatttcaactacgatatatgccaatcgtgtttcttttctggacgagtcgccaaggggcacaaaatgcattaccctatggtggagtactgtacccctactacttcgggagaagatgttcgcgatttcgccaaggtactgaagaataagtttcggaccaagagatacttcgctaagcatccaaggatgggttacctccccgtgcaaaccgtccttgaaggagataacatggaaaccgataccatg

SEQ ID NO: 342849 - DNA, 3591 bp, Artificial Sequence
  derived and/or modified sequence
atgctctggtgggaagaggtcgaggattgctacgagagagaggatgtgcaaaaaaaaactttcactaaatgggtgaacgctcaatttagtaagttcggcaaacagcatatagagaacctgttttccgatctgcaggacggacgccgcctgcttgaccttttggaaggcctgaccggccaaaagcttcccaaggagaagggctccacgcgagtccacgcactgaacaatgtgaataaagctctccgggtgctgcagaataacaatgttgatctcgtgaatatcggctccacagatatcgtggatgggaaccacaagctgactctgggcctcatatggaacataatactgcactggcaggtgaagaatgtgatgaagaatatcatggccggactccagcagacaaatagcgagaagatcctgctcagctgggtaagacagtcaacacgaaactaccctcaagtgaatgtgatcaactttactacatcctggtcagacggactggcccttaatgctcttattcactctcaccggcctgacctttttgattggaattctgtcgtatgccaacagtccgcaacccagcgactggagcacgcattcaatattgctcggtaccagttgggaattgagaagttgttggacccagaagatgtggataccacctaccccgacaagaagagcattctcatgtatattacgtccctttttcaggtgctccctcagcaggtgtcaatagaggctatccaggaggtcgaaatgctgcctcggccccccaaggtcacaaaggaggagcactttcagttgcatcaccagatgcattacagtcagcagatcaccgtctcactggcgcagggctacgaaagaacatcttcacccaagcctcggttcaagtcttacgcctatactcaagccgcctatgtaacgacctctgatcccaccagaagtccctttccatcccagcacctggaagcccctgaagacaagtcctttggatcttctctgatggaatctgaagtcaaccttgaccgctaccaaacagctcttgaggaggttttgtcctggctgctgagcgctgaagacacgctgcaggcgcagggggagatatcaaatgacgtggaggtggtcaaagaccagttccacacccacgaaggttacatgatggacttgacggcacaccagggccgcgtcggtaacattctgcagctgggtagcaaactgattggaaccggaaagctgtcagaagacgaggaaacggaggtgcaggagcaaatgaatcttttgaactcccgctgggaatgtttgcgcgtcgccagcatggagaagcagtccaatttgcatcgcgtcctgatggacttgcagaatcagaaacttaaggagctcaatgactggctgaccaaaacagaagagaggacgaggaagatggaggaggaacccctgggccctgacctcgaagatctgaagcgccaggtgcagcagcataaagtgctgcaggaagatcttgagcaggagcaggtccgcgtcaactccttgacacatatggtggtcgtcgttgacgagtctagcggtgaccatgcgacagccgctctggaagagcagctgaaggtgctcggcgatagatgggccaatatctgccggtggacagaggataggtgggtgctgctgcaggacatcctgcttaaatggcagcggctcacagaggagcagtgtctgttcagcgcatggctgtcagagaaagaagatgccgtcaacaagattcacacgacaggctttaaagaccagaacgagatgttgtccagtctgcagaaacttgccgtgctgaaggcggatcttgaaaaaaagaagcagagcatggggaaactctactccctgaagcaggacctcctctctaccttgaagaataagtctgtgacccagaagactgaggcgtggctcgataattttgcaaggtgctgggataacctggtacagaaactggagaaaagcaccgcacaaattagccaagcagtgaccacaacccagccctctctcacacagaccacagtgatggaaacggtgaccactgtgaccacacgggagcagatcctggtgaagcacgctcaagaggagcttcctcctcccccccctcagaagaagcgacagataaccgtcgataccctcgagcggttgcaagaactgcaagaggcaacagacgaactggatctgaaactgcggcaggctgaggtcatcaagggaagttggcagcctgttggagatctccttattgatagcctgcaggaccacctggagaaggtgaaagccttgcgcggtgagattgcccccttgaaggagaatgtgtctcacgtcaacgatctcgctaggcaactcacgacactggggattcagctgagcccttacaatctgtcaacattggaggacctgaataccaggtggaaactgttgcaggtggcggtggaggatagagtcaggcagctgcatgaagcgcaccgcgacttcggaccagcatctcagcacttcctgagcacgagcgtgcagggaccatgggagcgagcaatctcccctaacaaagtaccctactacatcaatcacgaaacacaaaccacttgctgggaccatccgaaaatgaccgagctgtaccagtctttggccgatctcaataatgttagatttagcgcataccgcacggcaatgaagctgagacgactgcagaaagccctgtgtctggatctcctctccttgagcgccgcctgcgatgcactggaccagcacaacctgaaacagaatgaccagccaatggatatacttcaaataatcaactgcctcaccactatttatgaccggctggaacaggagcataataacctcgtgaacgtacccctttgtgtggacatgtgtttgaattggttgctgaatgtttatgacaccggaagaacaggccgcatcagggtcctctcatttaagacgggcatcatctccctctgcaaggctcacctggaagataagtaccgctatcttttcaaacaggtggcttcctccacggggttctgcgaccagcggcgcctgggactgctgttgcacgactccatccagatccctagacagctgggcgaggtcgcaagctttggtggatctaatattgagccttcagtcaggagctgcttccagtttgccaataataaaccagagattgaggctgcgctctttctggactggatgcgcctggagccacagagcatggtgtggctgccagtgcttcacagggtcgccgcagccgaaactgctaagcaccaggcgaaatgcaacatttgtaaggaatgcccaattataggcttcaggtaccgaagtctgaaacactttaactacgacatatgccagtcctgtttcttctctggccgggttgccaaaggccataagatgcactaccccatggttgagtactgcaccccgacgaccagtggcgaagacgttagggacttcgccaaagtccttaagaacaaatttcggactaagcgatacttcgccaagcaccccaggatgggttacctgccagtccagaccgtgttggagggtgacaatatggagactgacacaatg

SEQ ID NO: 342850 - DNA, 3591 bp, Artificial Sequence
  derived and/or modified sequence
atgctatggtgggaggaggtcgaggactgctacgagagggaagacgtgcaaaagaaaactttcaccaagtgggtgaacgcacaattttctaaattcggaaagcaacatattgagaacctgttcagcgacttgcaggacggcagacgcctgctggatctgttggagggcctcacaggccaaaaactgcccaaggaaaaaggcagtaccagagtccacgcacttaataacgttaataaagctctgagggtcctgcagaacaataacgtcgatctggtcaatatcggctctaccgatatcgtcgatggaaaccacaagctgaccttaggcttgatttggaacattattctgcactggcaggttaaaaatgtgatgaagaatatcatggcagggctgcaacagaccaactccgagaagatcctgctatcctgggtccgtcagtccaccaggaattatccacaagtgaatgttatcaacttcaccactagctggtccgatggacttgctctgaacgctctgattcattcccatagacccgatttgttcgattggaactcagtggtctgtcagcagtctgctacacagaggcttgagcacgctttcaatattgctaggtatcagctgggcattgagaaactcttggaccctgaagacgtggacacaacatatcccgataaaaagagcatacttatgtatatcaccagtttattccaggtgcttccacagcaggtttccattgaggctatccaggaagttgaaatgctaccgagaccacccaaagtcactaaggaggaacactttcagctgcatcaccaaatgcattattcccagcagataacagtgagccttgctcaagggtatgagagaacttcctcaccaaaacctagattcaagagctacgcatacacccaggcagcctacgttacaacatctgaccccaccagaagtccttttccttctcagcacttagaagcgcctgaagataagagcttcgggagcagcctcatggaatccgaggtgaatcttgataggtatcagaccgctttggaggaggtgctcagctggctgttgagcgccgaggacacgcttcaagcccagggagagatttccaacgatgtggaagtggtaaaagatcagttccatacccacgaaggctacatgatggatctgaccgcccatcagggccgggttggaaatatcctccaattagggagcaaattgatcggaactggaaaactcagcgaagacgaagaaactgaggtacaggaacaaatgaacctgttgaacagccgttgggaatgtctgagagtggcatcaatggagaaacagtcgaacctccatcgggttctcatggatcttcagaaccagaagcttaaggaactcaacgactggctgaccaaaaccgaagaacgaactaggaaaatggaagaagaaccgcttgggcctgatctagaagacttaaaaaggcaggtgcagcaacacaaagtgctccaggaggatcttgagcaggagcaagtgcgtgtgaactccctcacacacatggtggtggttgtggacgaatccagcggcgaccatgctaccgctgcgttggaggagcaactcaaagtcctgggcgaccgctgggcgaacatttgccggtggactgaggatcgctgggtgcttctgcaagatatccttctcaaatggcagcgcctgacagaagagcaatgtctgttttccgcttggttgagcgaaaaagaagacgcggttaacaaaattcacacgaccggattcaaggatcaaaacgagatgctgagcagcttgcagaaactggccgtgcttaaggctgacttagagaaaaagaaacagagcatgggcaaactttactcgcttaaacaagatctgctgtccacattgaaaaacaaatctgttacccaaaagactgaggcctggctggataactttgctcgctgctgggataacctcgtgcagaaactggaaaaaagcaccgctcaaatttcccaggccgtgaccactacgcagccaagcctcacacaaacaaccgtcatggagacagtcactactgtcacaactcgggagcaaatacttgtgaaacatgcccaggaggagcttcccccaccacccccccagaaaaagcggcaaattacagttgacacactggagcggttgcaagaactgcaggaagcaacagatgagctcgatttgaagctgcggcaggcagaagtgattaaaggatcctggcagcccgtgggcgatctcctgatcgactcactccaggatcacctggagaaagtgaaagctcttagaggcgagattgcacccctgaaagagaacgtgagccatgtcaacgatctggctcggcagcttacgaccctggggatccaactctccccttataacttgagtacgttggaggatctaaataccaggtggaagctcctgcaagttgctgttgaggatagagtgaggcagctccacgaagcacaccgagactttgggcctgcttcacagcacttcctctcaacttctgtgcagggtccatgggagagagctatcagccctaataaagtaccctactacattaatcatgaaacacagaccacatgctgggatcacccgaagatgacagagctttaccagtcgctagccgatttgaataatgtcaggttctctgcttaccggaccgctatgaagttaaggaggttgcagaaggctctctgcttggaccttctgtcattgtcagcagcgtgcgacgcactggatcagcacaatctgaaacagaacgaccaaccgatggacatcctgcaaatcattaactgcctgaccaccatctacgatagactggagcaggaacacaacaacctggtcaatgtgcctctgtgcgtggacatgtgcctcaactggttgttgaacgtgtacgacactggcaggacaggtagaatcagggtgctctctttcaaaacgggaattatcagcctttgtaaggcccacctggaggacaaataccggtacttgtttaagcaggtggccagctccactgggttctgcgatcagcgcagactcggtttactgcttcatgacagcatccaaatccctcgccaattgggtgaagtcgcatcttttggcggatccaacattgagcctagcgtgagatcgtgttttcaatttgcgaataacaaacccgaaatcgaagcagctcttttcctggattggatgcgcctggagcctcagtcaatggtgtggctgcctgtgctgcatagagtggccgcagctgaaacagcgaagcaccaagcgaaatgcaatatttgtaaagagtgtcctattattggattcaggtaccggtctctgaagcatttcaactacgatatatgccaaagctgctttttttcagggagggttgccaaaggacataagatgcactaccctatggtagagtattgcaccccaaccacctccggggaagatgttagagatttcgccaaggtgcttaagaacaagttcagaacaaagagatactttgccaaacaccctcgtatgggctatcttccagtacaaacggttctggagggagacaacatggagaccgataccatg

SEQ ID NO: 342851 - DNA, 3591 bp, Artificial Sequence
  derived and/or modified sequence
atgctttggtgggaagaagtcgaggactgctacgagagagaggatgtccaaaaaaagaccttcacaaaatgggtaaatgctcagttctctaagttcgggaagcagcacattgagaatctgttcagtgacctccaggatgggaggaggctgttggacctgctggaggggctcaccggccaaaagctgccaaaggaaaagggatctacccgggtgcacgctctcaacaacgttaataaggcgttgcgagtgctgcaaaataataacgttgatctcgtcaacatcggcagtaccgacatcgttgacggaaatcacaagctgaccctgggtctgatctggaacataatcctgcactggcaggtcaaaaacgtgatgaagaacatcatggcaggtctgcaacagaccaattcagagaagatactgctcagctgggtcaggcagagcacccggaactatccacaggtgaatgtcatcaactttacaacatcatggtccgacggtttggcactgaacgcacttatccacagtcacagacccgacctcttcgactggaattccgttgtctgccagcagagcgcgacccagaggctggagcacgcttttaacatcgcccgctaccagttgggcatcgagaagctgctcgatcctgaagatgtggataccacataccctgataaaaagtccattctcatgtacattactagtctcttccaggtactgcctcaacaggtgagtatcgaggccatccaggaagtcgagatgctgccccgcccgccgaaagtcacaaaagaggagcactttcagctgcaccaccagatgcactattcacagcagatcacagtgtccttggctcaggggtatgagcgcaccagttcacccaaaccaagatttaagtcttacgcttatacgcaagccgcctatgtgacaacctctgatcctacacgctctccgttccctagtcagcatctcgaagcgcccgaagataaatcttttggcagtagcctcatggagtcagaagtcaacctcgaccgctatcagaccgccctggaagaagtcctcagctggctcctgagcgcggaagataccctgcaggctcagggtgagatcagcaatgatgtagaggtggtgaaggatcaattccatactcacgaggggtacatgatggatctcactgcccaccagggtagagtgggaaatattctgcagttggggagcaaacttataggaactgggaagctttccgaagatgaagaaaccgaggttcaggagcagatgaatctgctgaactctagatgggagtgcttgagagttgcaagcatggaaaagcagagcaatctgcaccgggtgctgatggacctccagaatcaaaaattgaaagaactcaacgattggctcaccaaaacagaggagcgaaccagaaaaatggaggaagagcctctgggccctgacctcgaggacctcaaaagacaggtgcagcagcataaggtgctccaggaggacttggaacaggagcaggtgcgggtcaatagtcttactcatatggtggtggtcgtagacgagagctccggcgatcatgcaactgctgccctggaggagcagcttaaggttctgggcgaccggtgggccaacatctgtagatggacagaagaccggtgggtgctgctgcaggacatacttctgaagtggcagcgcctgacagaggagcagtgtctcttcagtgcctggctttccgaaaaagaggacgccgtgaataaaatccacacaaccggctttaaggatcaaaatgagatgcttagttcactgcagaagctggcagtgctgaaagccgatctggagaagaagaagcagtcaatggggaaactctactcactgaagcaggatctgctgtctacgctgaagaacaagtcagtcacccagaaaactgaagcatggctggataactttgccaggtgctgggataatctggtccaaaagctggagaagtccacagctcaaatctcacaagcagtaacaactacacagccttccctgacacaaacgactgtgatggagaccgtgaccacagtgacaacacgggagcagattctggtgaaacatgcgcaggaagagctccctcccccacccccacagaaaaagagacagatcacagtcgacactctggaaagactgcaagaactgcaagaggccacagatgaattggacctgaagttgcgccaggccgaagtaatcaaaggctcatggcaacctgtgggagaccttcttatcgacagtcttcaggatcacctggagaaggtcaaagctctccggggagaaatagcaccactgaaggagaatgtctcccacgtgaacgacctggcccgccaattgaccaccttgggtattcagctcagcccatacaacctctccacccttgaggacctcaacactcgctggaaactgctgcaggtggccgtagaagaccgcgtaagacagctgcacgaagcgcatagagacttcggcccagctagccagcatttcctgagcacttccgtacagggcccttgggagcgggccattagtccaaataaggtgccttactacatcaatcacgagacccagactacgtgctgggatcaccctaagatgactgagctttaccaatctctggcagatctcaataacgtccgcttctccgcgtatcgcaccgctatgaagctgcgccggctgcagaaggccctgtgtctggatctgctgagtttgtccgccgcttgcgacgcgttggaccagcacaatctcaagcagaacgaccagccaatggatatcctccaaatcatcaactgcctgaccacaatttacgaccgcctggagcaggaacacaataatctggttaatgtgcctctctgcgtggacatgtgcctgaactggctgctcaatgtgtatgacacgggtagaaccggccggataagggtcctgtccttcaaaacgggcattattagtttgtgcaaggcccatttggaggacaagtaccggtatctctttaaacaggtggcatctagcaccggcttttgtgatcagagaaggctcggactgctcctgcacgacagcatccagatcccacgccagctgggagaagttgccagcttcggtgggagtaatatcgagccaagcgttaggagttgctttcagtttgcgaacaacaagccagagatcgaagctgccctgttcctggactggatgaggctggaaccccagtctatggtttggcttcctgtgctgcaccgggtggccgcagcagagactgcaaaacatcaggctaagtgcaatatctgcaaggaatgtcctatcattgggtttaggtaccgatcactcaagcatttcaactacgacatttgtcagagttgctttttttctgggcgggtagcaaaggggcacaagatgcactacccaatggtggaatattgcacgcctaccacatccggcgaagatgtgagagacttcgctaaagttcttaaaaataagtttaggacaaaacggtacttcgccaagcacccccgaatgggttacctgcctgttcagaccgttctcgagggggataacatggaaactgacacaatg

SEQ ID NO: 342852 - DNA, 3591 bp, Artificial Sequence
  derived and/or modified sequence
atgctctggtgggaggaggtcgaggactgttacgaaagggaggacgttcagaagaaaactttcactaaatgggtgaacgcccaattcagcaagttcggcaaacagcatattgagaaccttttctccgatctccaagacggtaggagattgctcgacttgctcgaaggactgacaggccagaaactgcccaaggagaagggatcaaccagggtacatgctcttaataatgtgaacaaggcgctccgcgtgttgcagaacaacaatgtagacctggtcaacattggttccactgatatcgtagacggaaatcataagttgacactgggactcatttggaacataatcctgcactggcaggtcaagaatgtaatgaagaatatcatggctggcctccagcaaaccaatagcgaaaagattctcctgagctgggtaagacaaagtaccaggaactaccctcaagtaaacgtaattaatttcacgacaagctggtccgacggcctcgcgctcaacgctctgatccactcacacaggccagatctgtttgattggaactcagtggtctgtcagcagtccgccacccaacgcctggaacatgctttcaatatcgccaggtaccagctcggaatcgaaaagctgcttgaccccgaggatgtagatactacctaccccgacaaaaaatccattttgatgtacatcaccagcttgtttcaggtgctcccacagcaagtgtccatcgaggcaattcaggaagtcgaaatgctgccccgccccccaaaggtcacgaaggaggagcattttcaactccaccaccaaatgcactatagccagcagatcactgtaagccttgcacagggatatgagaggacgtctagcccaaagcccaggtttaagtcttatgcttatacccaggctgcatatgttactacaagcgatccaaccagatccccttttccctcccagcatctggaagcccctgaagacaagagtttcggcagcagcttgatggagtctgaagtaaatttggacagatatcagaccgctctggaagaggttctgagttggctcctgtccgctgaagataccttgcaggcccagggtgaaatctccaacgatgtggaggtcgttaaagaccagttccatacccatgaaggatacatgatggacctgaccgcccatcagggtagggtaggcaatatcttgcaactgggctccaagcttattggcaccggcaagctttcagaagatgaggagaccgaggtgcaagagcaaatgaaccttctgaactctagatgggagtgtctcagggtagcttccatggagaagcaaagcaatcttcacagagtcctgatggatctccagaatcaaaaattgaaggagctcaatgattggcttactaagactgaagagagaacgagaaagatggaggaggaacctctcggccccgatctcgaggatcttaagagacaagtccaacaacacaaggtactccaagaggacctcgaacaagagcaagtcagagtgaactcactcacgcacatggtggtagtcgtagacgaatcttctggtgaccacgccacggccgcgctggaagaacaacttaaagtacttggcgatcgctgggccaacatctgtagatggaccgaggataggtgggtactgctgcaggacatactcctgaaatggcaaagactcactgaggaacaatgtctcttttccgcttggctgtccgagaaagaggatgccgtgaataagatccacactactggattcaaagatcagaacgagatgctgtccagtctgcagaaactcgctgtgcttaaggctgacctggagaaaaagaaacagtccatgggcaagctgtacagccttaagcaagatctgctttctactctgaaaaacaagtcagtgacacaaaagacagaggcctggctcgataactttgcacgctgttgggacaatttggttcagaagcttgaaaaaagcactgcgcaaatcagtcaagctgtcaccacaacccagccatcactgacccagacaaccgttatggagacagtgactacagttaccacacgcgaacaaatattggtaaaacacgcccaggaggaattgccgccaccacctccccagaagaagcgccaaattaccgtcgacacactcgagaggctgcaggagctgcaggaggcgactgatgaattggatttgaaactgcgccaagcagaagtaatcaaaggttcttggcaacctgttggtgacctgcttattgattcactgcaggatcaccttgaaaaggttaaggccctcagaggcgaaatagcgccactgaaggagaacgtgagtcacgtgaacgaccttgccagacagttgacaacccttggaatccagttgtccccttataacctctcaacgcttgaggatctgaatacaaggtggaagctgctgcaagttgcggttgaagatagggttcgccaactgcacgaggctcatcgcgacttcggccctgcttcacagcacttcctgagcacatccgtacagggcccatgggaacgcgctatcagccccaacaaggtcccctattacataaaccacgagacacagactacttgctgggaccatcccaagatgacagaactgtaccagtccttggccgaccttaataacgtcaggttcagtgcgtacagaactgcgatgaaattgaggaggctccagaaagccttgtgtttggacttgctctcactctctgctgcttgcgacgccctcgaccagcacaacctgaagcaaaacgatcagcctatggacatcctccaaattattaactgcctgacaacgatctacgacagactggagcaagaacacaataacctcgtgaatgtgccattgtgtgtggacatgtgtctgaactggcttctgaatgtgtacgatactggaaggaccggccgcattagggtcctcagcttcaagactggaattatttctttgtgcaaggcacatctggaggataaatatagatacctgtttaaacaggtggcgagcagcacaggtttttgtgaccagaggcgccttggactgttgctgcacgattcaattcaaattccgaggcaactcggcgaggtcgcatctttcggaggttctaacatcgagccctcagtcaggtcctgtttccagttcgcgaataacaagcccgagatcgaagccgccctgtttctcgattggatgagattggaaccccagtccatggtttggcttcccgttctccatagagttgccgcggccgagactgccaagcaccaagccaagtgcaacatttgcaaggaatgtccgattatcggcttcaggtaccgcagtctgaagcactttaattatgacatctgccagtcctgttttttctctggcagggtggcgaagggccacaagatgcactacccaatggtagagtactgtactcctaccacctctggagaggacgtgcgcgacttcgccaaggtactcaaaaataaattccgcaccaagaggtattttgcaaagcatcccagaatgggctacttgcctgttcagactgtgctggaaggagacaacatggagaccgataccatg

SEQ ID NO: 342853 - DNA, 3591 bp, Artificial Sequence
  derived and/or modified sequence
atgctgtggtgggaggaggtggaagattgttacgaaagagaagatgtgcaaaagaaaaccttcaccaagtgggtgaacgcgcaattttccaagtttggaaagcagcatattgaaaacctgttctcggatcttcaggatggaagaagattgttggacctgctggaagggctcactgggcaaaaacttcccaaagagaagggaagcacgcgtgtgcatgcactcaacaatgtgaacaaggcgctccgcgtgctgcagaacaacaacgtcgatctggtcaacattggaagcactgatattgtggatgggaatcataagctcaccctcggactcatttggaacattattcttcactggcaagtgaagaatgtgatgaagaacataatggccggacttcagcaaacgaactccgaaaagattcttctttcgtgggtgcgacagtcaactagaaactaccctcaggtcaacgtgatcaatttcactacctcgtggagcgatggactggcactcaatgcactgattcattcgcatcggcccgacctgttcgattggaactcagtggtctgccaacaatcggcaactcagagacttgaacatgcgttcaatattgccagataccaactggggatagagaagctcctcgatcccgaagatgtcgataccacttaccctgataagaagtcgattcttatgtacattacgtcactgtttcaggtgcttccgcagcaagtgtcaattgaagcaattcaagaagtggagatgctccctagaccgccaaaagtgactaaggaagaacattttcaacttcatcatcagatgcattactcacaacagatcactgtctcccttgctcaaggatacgaaagaacctcatcacctaaacctcggttcaagtcctacgcctacacccaagctgcatacgtcactacgagcgaccctaccagatcgccttttccatcacaacatctcgaggcacctgaagataaatcgtttggtagctcactgatggaatcggaggtgaatcttgatcgataccagacggcactggaagaagtgctctcctggttgttgagcgcagaggacactctgcaggcacagggtgaaattagcaacgatgttgaggtggtgaaagatcaattccatacgcacgaaggatatatgatggatttgactgcgcatcaaggcagggttggaaacattctccagctgggatctaaacttattggaactggcaaactgtcggaagatgaagagactgaggtccaagaacaaatgaacctgcttaactcgcgctgggagtgtctgcgcgttgcaagcatggaaaagcaatcaaatttgcatcgggtgcttatggacctgcaaaatcaaaagctgaaggaactgaacgactggcttactaaaaccgaggagaggaccagaaaaatggaagaagaaccactcgggcccgacttggaggacttgaagcgtcaagtgcagcaacataaggtcctccaggaagatcttgagcaagaacaagtgagagtcaattctcttacccatatggtggtggtcgtcgatgagagctccggggatcacgcaactgccgccctggaggagcaactgaaggtgctgggagatagatgggccaatatctgtcggtggactgaggacagatgggtccttctccaggatatcctccttaagtggcaacgcctcaccgaagaacaatgcctgtttagcgcctggctgtctgagaaggaagatgcagtgaacaaaatacatactaccgggtttaaggaccaaaatgagatgctttcctcgcttcagaagttggccgtgcttaaggccgaccttgagaaaaagaagcagagcatgggaaaactttattccctgaagcaagatcttttgagcaccctgaaaaacaaatcagtgacgcaaaaaactgaagcatggcttgataactttgcgaggtgctgggataatcttgtgcagaagctggaaaagtcgactgcgcaaattagccaagcagtaactaccactcagccaagccttactcaaactaccgtcatggaaacggtcacgactgtgactacccgggaacaaatccttgtcaaacatgcacaggaagaactgcctcctccacctcctcaaaagaagcgccaaatcaccgtggataccctggagcgactccaagagcttcaggaagcaaccgacgagctggatctgaagctcagacaggcggaggtcatcaaggggtcgtggcagcctgtcggcgatctgctgatcgatagcctgcaggatcatcttgaaaaagtcaaggcccttagaggtgagatagcacctcttaaagagaacgtgtcccatgtgaacgatctcgcacgccaactcactacgctcggaattcaactttccccttacaacctttcaaccctggaagatctgaacactcgctggaagctgctgcaagtggcagtggaagatagggtgagacaacttcacgaagcccatcgagactttggacccgcatcccaacattttcttagcacttccgtccaaggaccatgggaacgtgctatttcgccgaacaaagtgccttactacattaaccatgaaacgcaaaccacctgttgggatcatccaaagatgaccgagctttaccagtcccttgccgatcttaacaacgtgaggttttcagcatacagaaccgcaatgaaactgagaagattgcagaaggcactgtgtctggatctcctgtcgctttcggcagcgtgtgatgccctggatcagcataatctgaaacagaacgaccaacccatggacattctccagattatcaattgccttactactatttacgaccgtttggaacaagaacacaataaccttgtgaacgtgcctctgtgtgttgacatgtgtctgaactggctcctgaacgtgtatgatactggacgcaccggcagaatacgtgtgctgagcttcaagactgggatcatttccctctgtaaggctcaccttgaggataagtaccgctacttgttcaaacaagtggcatcatcaaccggattttgtgatcagcggaggctgggactgttgttgcacgactcgatacagatcccacggcagcttggtgaagtggccagctttggcggcagcaatattgagccttcagtcaggtcgtgttttcaatttgcaaacaacaagccggaaattgaggctgcgctgttcctggattggatgagattggagcctcaatcaatggtgtggctgcccgtccttcatagggtcgctgccgcagaaaccgcgaagcaccaagcaaagtgtaacatttgcaaagaatgtccgatcattgggtttaggtatcgaagcctgaagcactttaactacgacatttgtcagtcgtgtttcttctccgggagggtggcaaaaggacataagatgcactatcctatggtcgagtactgtactcccactacgagcggtgaagatgtgagggattttgcgaaggtccttaagaacaaatttcgcaccaagcggtacttcgccaagcacccacgcatgggctacctgccagtgcaaactgtgcttgagggcgacaacatggaaaccgataccatg

SEQ ID NO: 342854 - DNA, 3591 bp, Artificial Sequence
  derived and/or modified sequence
atgctctggtgggaagaggtggaggactgctacgagcgggaggacgtgcagaagaagactttcaccaaatgggtaaacgcccaattttctaagttcgggaagcagcatatcgaaaacctcttctctgacctgcaggatgggcgcaggctgctggatttgctcgagggcctgacgggccagaagctgcccaaggaaaagggcagtaccagagtgcatgccttgaacaacgttaacaaagcactgagggtgctgcaaaacaacaatgtggatctggtgaacatagggtctacggacatcgtcgatgggaatcataagctgacccttggcctcatctggaacataatcctgcactggcaggttaaaaacgtgatgaaaaacatcatggcaggtctacaacagactaatagcgagaagatcctccttagctgggtgcgacagagcactcgaaactatccacaagttaatgtgatcaattttaccacctcttggagcgacggtttagcgctgaatgcattgattcactctcatcggcctgacctgttcgattggaattccgttgtctgccagcagagcgcgacgcagagactcgaacatgcctttaacattgcccggtatcagttgggaatcgagaaactcctggaccctgaagacgtagacaccacttacccggataaaaagagcatactgatgtacataactagcctcttccaagtcctgccccaacaggtgtctatcgaggcaattcaggaggtggaaatgctccctcgcccgcccaaggtgacaaaagaggagcacttccaactgcaccaccagatgcactacagccagcagattactgtgagcctggcccagggctatgaacgcactagttctcccaagccaaggtttaagtcgtatgcgtatacccaggcagcatacgtgactacatccgaccccactcggtcccctttcccatcccagcatctggaagcgccggaggacaaaagtttcgggtctagtctgatggaaagcgaagtcaacctcgacaggtaccagaccgcccttgaggaagtgctgagctggctcctgagcgccgaggatactctccaggcgcagggcgaaatcagcaatgacgtggaggtggtgaaggatcagttccacacgcacgaggggtacatgatggatctcactgcccaccagggaagggtcggcaacatcctgcagctgggttcaaagctcatcggaactggtaaactgagcgaggatgaggaaacggaggtgcaggagcaaatgaatttgctcaactcccgctgggagtgcctccgggtggcctccatggagaagcagtcgaaccttcacagagtgttaatggatctgcagaaccaaaagctgaaagaactgaacgactggctgaccaaaacagaggaacgcacgcgcaagatggaggaggagcctttgggccccgatctggaggatctaaaacgccaggtacagcagcacaaggtgctgcaagaggatttggaacaggaacaggtcagggtcaactccctcacacacatggttgtggtggttgatgaaagctccggggaccacgccacagccgcgctggaggagcagctcaaggtccttggagaccggtgggccaacatatgcagatggaccgaagaccgctgggtgctcctgcaagatatactgttgaagtggcagcggttgacagaagaacaatgtctcttttcggcatggctctctgaaaaggaagacgccgtgaacaagatccacacaacaggttttaaagatcagaatgaaatgctctcgagcctgcagaagctggcggtgctgaaagccgacctggaaaagaaaaagcagagtatgggaaaattgtattcactgaaacaagacctgctctcaacattgaagaacaagtccgtgacccagaagacagaagcctggctcgacaatttcgctcgctgttgggacaacctcgtgcagaaactggaaaagtctaccgctcagatcagccaagccgtaacaacaacgcagccatccctaacgcagactacagtcatggaaacagtcacaacagttacaacaagggagcagattctggtgaagcatgcgcaggaggagctgcctcccccccccccccaaaaaaaacgacagattaccgtggacaccttggagcgtctccaagaattgcaagaagcaaccgacgagctggacctgaaactgcggcaggcagaggtgataaaaggcagctggcagcctgtcggagatctgctgatagactctctgcaggaccacctagagaaggtcaaagcattgagaggagaaattgctcctctcaaagagaatgtttcccacgtcaatgacctcgctagacagctcactaccttaggcatccagctgtctccgtacaacctgtcgactctggaggacttgaacaccaggtggaaactgctgcaggtggcggttgaggacagggtgaggcagttacatgaggcccaccgggactttggtccggcttctcagcacttcttatccaccagcgtccaggggccttgggaacgcgccatcagcccaaataaagtcccttactatattaaccacgagacccagactacgtgttgggatcacccgaagatgacggagctgtaccagagcctggccgatctgaacaacgtccgcttttccgcctatcggaccgccatgaagctgcgtcggttgcagaaggccctgtgtctagatctcctgtcactgtcagccgcctgcgatgcactcgaccaacacaatctgaagcaaaacgaccagccaatggatattctccagatcatcaactgtctgaccactatttacgacagactagaacaagagcataataatcttgtgaatgtacccctgtgcgttgatatgtgcctcaactggctgctcaatgtgtacgatacaggcaggacaggcaggatcagggtgcttagtttcaagaccggaattatcagcctgtgcaaagctcaccttgaggataaatacagatatctgttcaaacaagtggcatcttcgacaggtttctgcgaccagaggcgcctcggcctactgctccacgactccattcagatcccccgccagctgggggaggtggcttcctttggtggatctaacatagagccctccgttcgtagctgctttcagttcgctaacaacaaacccgagatcgaggcggcgctgttccttgactggatgcgattggagcctcagagtatggtgtggctgccagtcctacacagagttgccgcagctgagaccgccaagcatcaagccaagtgcaatatctgtaaggaatgccccatcatcggattccgctaccgttccctcaaacacttcaattatgacatctgccaaagttgtttttttagcggccgggttgccaagggccacaagatgcactaccctatggtggaatattgcacccctaccaccagtggcgaggatgttcgcgacttcgccaaagtgttgaagaataaatttcgaactaaacgttattttgcgaaacacccgagaatgggctaccttcccgtgcagacagtgttggaaggtgacaatatggagacagataccatg

SEQ ID NO: 342855 - DNA, 3591 bp, Artificial Sequence
  derived and/or modified sequence
atgttgtggtgggaggaggtcgaagattgctatgagagggaggatgttcagaagaagactttcactaagtgggtcaatgcccagttcagtaagtttggaaagcaacatatcgaaaatctcttttcagatctgcaggatgggcgcagattacttgatctgctggagggcctgactggtcagaaactgcctaaagagaaaggaagtaccagagtccacgccctgaataacgtaaacaaagccctacgggtacttcaaaataacaatgtcgatttggttaatatcgggtccactgatattgtcgatggaaaccataaactgaccctgggtctaatatggaacatcattctacattggcaggttaagaacgtgatgaaaaacatcatggcgggcctgcagcagacaaactcggagaagatcctcttgagttgggtgcgacagtctactaggaattaccctcaggtgaatgttatcaattttaccacttcttggagcgatgggcttgcactcaatgctttaatccattcgcaccgtcccgatctgttcgattggaacagcgtggtgtgccagcagagtgcgacgcagaggctcgagcatgctttcaacatcgcccgataccagctcgggatcgaaaagttactcgaccctgaggacgttgatactacctatccggacaagaaatcaatcctcatgtatataacaagtctgtttcaggtactgcctcaacaggtgtctatcgaggctatacaggaggtggaaatgctaccgaggccaccgaaagtgactaaggaagaacattttcagctgcaccatcagatgcattactcgcaacagatcactgtgtctctcgcgcaggggtatgaacgcaccagcagtcctaagcctcgcttcaaatcctatgcatatacccaagctgcctatgtgacaacctcggatcctacacggtctccatttccatctcagcacctggaagcgcccgaggacaaatcattcggcagttctctgatggagagcgaagtgaacctggaccgctatcagactgccctcgaagaagtgctgtcatggctcctaagcgcagaggacactctgcaggcccagggggaaatatctaacgacgtggaagtggtgaaggaccagtttcatacccacgaaggatatatgatggacctgacggctcaccaggggagggtgggtaatatcctacagctgggatccaagctaatagggacagggaaactgtcagaagatgaggagaccgaagtccaagaacagatgaatctgctcaatagtcgatgggagtgtcttcgcgtggcctcaatggagaagcagtcaaatttacacagagttcttatggacttacaaaaccaaaaattgaaggagctcaatgactggctgacaaaaacagaggaaagaactaggaagatggaagaagagcccctggggcccgatctagaggaccttaagcgccaggtgcagcagcacaaagtcctccaggaggacctcgagcaagagcaagtcagagtgaactctctaactcacatggtcgtggtggtggatgagtcttcaggcgatcatgccacagcagcccttgaggaacagctcaaggtgctcggcgaccgttgggccaacatctgccgatggaccgaggaccggtgggttctactccaggacattctcttaaagtggcagcgactaacagaggaacagtgtctgttttctgcatggctgagtgagaaggaggacgctgtgaacaaaatccatacaaccggattcaaggatcagaatgaaatgctgagctctctgcagaaacttgcagtcctcaaggcagacttagagaagaagaagcagagtatgggaaagctttactctctgaagcaggacctgctgagcacactaaagaacaagtccgtaacccagaagacagaggcgtggctcgacaactttgctcgctgctgggacaatctggtccagaaactggagaagtcaaccgctcaaatctcacaggccgtgacaaccacccagccgtctctgacccagacaactgttatggagactgtgacaacagtgacgaccagggagcagatcctcgtcaaacacgcgcaagaggagcttccaccacccccaccgcagaagaagcgacagatcacggtcgacaccttagaaaggttacaggagctccaggaagcaacagacgaattggatctgaaactccggcaggcagaagtgattaagggcagctggcaacctgtgggcgaccttctgattgacagcctacaggaccacctggagaaggtaaaggccctgaggggtgaaattgcgccactgaaggaaaatgtcagccacgtcaacgatctcgcccgccagcttacaaccttaggcatccagctgtccccatataacttgagtaccctggaggacctgaacaccaggtggaagttattgcaggtcgctgtagaggatagagtcaggcaactgcacgaagcacaccgggactttggccccgccagccaacacttcctgtctacctcagttcagggtccgtgggagagagccatctccccaaataaggtaccttattatattaatcacgagacccagacaacctgttgggatcaccccaagatgaccgaactgtatcaatccctggccgatctgaacaacgttcgcttctccgcctaccgcactgcgatgaagttgcggcgtctgcaaaaagcactgtgtttggacttgctttcactgtccgccgcgtgtgatgccctggaccagcacaacctgaagcagaatgaccagcctatggacattttgcaaatcatcaactgtctgaccaccatctatgacagactcgagcaggagcataataacctggtgaacgtgcccctctgtgtggacatgtgcttgaattggcttctcaacgtctacgataccggccgaacgggtcggataagggtcctctctttcaaaacaggcataatctccctgtgtaaggcacacctagaggacaaatataggtatctgttcaagcaggtggcgtcttctacaggattttgcgatcagagacggctgggattgctcctgcacgatagcattcagatacctcggcagctcggcgaagtggcgtcattcggcggttcaaacatcgagccaagtgtgcggtcctgttttcaatttgccaataataagcctgagattgaagctgctttgtttctggactggatgcgccttgaaccacagtctatggtgtggctgccggttctgcacagggttgctgcagcagagaccgctaagcatcaagccaagtgcaacatttgtaaagaatgtcctattattggcttcaggtatagatcgctgaagcacttcaattatgacatttgtcagtcttgtttcttttccggtagagttgctaaagggcataagatgcactatcctatggtagaatactgtacgcccaccacttccggcgaagatgtccgtgatttcgcgaaggtcttgaagaataagttccgaaccaagaggtacttcgctaaacacccacggatgggctatttgcctgtccagacagtcctggagggggataatatggagacggacactatg

SEQ ID NO: 342856 - DNA, 3591 bp, Artificial Sequence
  derived and/or modified sequence
atgctgtggtgggaggaagtagaagattgctacgaacgcgaagatgtgcaaaagaaaacttttaccaaatgggtgaacgcccaattttcgaagttcggaaaacagcacatcgaaaatctcttctcggacctccaggatgggcgcagactgctggatctcctggagggactgactgggcagaagttgccgaaggaaaaggggagcaccagggtgcatgcgctcaacaacgtgaataaggctctcagggtcctgcaaaacaacaacgtcgacctggtcaacatcggatcaaccgatatcgtcgatggcaatcataaactgaccctgggacttatatggaacatcatcctgcactggcaagtgaagaatgtgatgaagaacatcatggcaggtttgcagcagactaattcggagaaaattctgctgagctgggtgagacagagcactagaaattacccacaagtcaacgtcattaactttactacgtcatggtcggacgggctcgccttgaacgcactgatccattcccacagaccagacctgttcgactggaatagcgttgtttgtcaacaatccgcgactcaaagactggagcacgccttcaacatcgcgcgctaccaacttggcatcgaaaagctgctggacccggaggatgtggacaccacctacccggacaaaaagtctatcctcatgtatattacgagcctcttccaagttttgccccagcaggtgagcatagaggcaatccaagaggtcgagatgctccctaggccacccaaagtcaccaaagaggagcacttccaactgcaccaccaaatgcattattcgcagcagatcaccgtttcactggcccaaggctacgagcgaacgagctccccaaagccgcgctttaagagctatgcctacacccaggccgcttacgtgaccacctcagacccgacccggtccccctttccatcccagcacctcgaagctccagaggataagagctttggttcaagcctgatggaatcagaggtgaacctcgaccgataccagactgccctggaggaggttctgtcctggcttctgtcagctgaagacaccttgcaagcacaaggagaaatcagcaacgacgtggaggtcgtgaaggaccagttccatactcacgaaggatatatgatggatctgactgcccatcaaggacgggtgggaaatatcctgcagcttggatccaaactgattggcactggaaaactgtcggaagacgaggaaactgaagttcaagagcagatgaatcttctcaattcgaggtgggaatgtctgcgcgtcgccagcatggaaaaacagtccaacctgcaccgcgtcttgatggacctgcagaatcaaaagctgaaagagcttaacgattggctgaccaagactgaggaacgcactaggaagatggaggaagaacctcttggacccgacctcgaggatctcaagcggcaggtgcagcagcataaggtcctgcaggaagacctggaacaagaacaggtccgcgtgaattcgttgacccacatggtggtcgtcgtggatgagtcctccggggaccatgcaaccgctgcccttgaggagcaactgaaagtccttggagacagatgggccaacatctgcaggtggactgaagatcgctgggtcctccttcaggacatcctcctcaagtggcagcgcctcactgaagagcagtgtctgttttcggcttggttgtcagagaaggaagacgccgtgaacaagatccacaccactggatttaaagaccagaacgaaatgctctcgtcgctgcagaagctggcggtgctgaaggcagatcttgaaaagaagaaacaatcgatggggaagttgtacagcctcaagcaggacctgctgtcaactctgaagaacaagtccgttactcagaaaaccgaggcgtggctggacaacttcgctcggtgctgggataacctggtgcagaagttggagaaatcgaccgctcaaatttcgcaggcggtgactaccactcaaccgtcgttgacccagaccaccgtgatggagactgtgaccaccgtcactactcgggaacagattttggttaagcacgcgcaagaggaactgcctccacctccgccgcagaagaaacgccaaataactgtcgataccttggagagactgcaagagctgcaggaagcaaccgatgagctggacctgaagttgagacaagccgaggtcatcaagggctcctggcaacctgtgggtgacctgctgatagactctctccaggaccacctcgaaaaggtgaaggccctgcgaggtgaaatcgcaccactcaaagagaatgtgtcccatgtcaacgatcttgccaggcagctgaccactttgggaatccagctgtccccgtacaacttgtccaccctggaggacctcaatacgcggtggaagctcctgcaagtggcggtcgaagatcgcgtgcgccaactccatgaagcacaccgggatttcggaccagcttctcagcactttctctcgacttccgtgcaaggtccgtgggaaagagccatttcaccaaacaaggtgccctactacatcaaccacgagactcagactacttgctgggatcaccctaagatgaccgagctgtaccagtcgctggcagacctcaacaatgtgcggttctccgcctaccggaccgcaatgaagctccggcgactccagaaggcactctgtctggacctcttgtcgctctctgcagcttgcgacgccctggaccagcataatctcaaacaaaacgaccaaccgatggacatcctgcagatcatcaactgcctcactaccatctacgatcgcttggaacaggagcacaataatctggtgaatgtgccgttgtgcgtggatatgtgcttgaactggctgctcaatgtgtacgataccggccgtacgggaaggatccgcgtcctgtcctttaagaccggcatcatcagcctctgcaaggctcacctggaggataagtatcggtacctgttcaagcaggtggcctcctcgaccggattttgcgatcagcggcggctgggactcctgctgcacgatagcatccaaattccgcggcagctcggagaagtagcctccttcggtgggtcgaatatcgagccgtccgtgcgaagctgttttcagttcgcaaacaacaagcctgaaatcgaggcagcactcttcctggactggatgcgcttggagccgcagtctatggtgtggctcccagtgttgcatcgggtggctgctgcagaaacggcgaagcatcaagctaaatgcaatatctgcaaggaatgcccgatcattggattccgctaccgctccctgaagcatttcaactacgatatctgccagagctgctttttcagtgggagagtggcgaagggacacaaaatgcattacccaatggtcgaatactgcacccctaccacctcaggtgaggatgtgagggatttcgcaaaggtccttaagaacaaattcagaaccaaacgctactttgccaagcacccgagaatgggctacctcccagtgcagacggtgctggaaggcgacaacatggaaaccgataccatg

SEQ ID NO: 342857 - DNA, 3591 bp, Artificial Sequence
  derived and/or modified sequence
atgctgtggtgggaggaggtggaggactgctacgagcgggaagatgttcagaaaaaaacttttacaaagtgggtgaacgcacagttctccaaatttgggaaacagcacattgaaaatctgttctccgacctgcaggacggcagaagactgctggacctactggaggggcttacagggcaaaagttacccaaggagaaggggagtactcgcgtgcacgcactaaataacgtcaataaggcccttcgagtgctccagaacaacaatgtggatctcgtgaatattggatctacggacatcgttgatggaaaccataaacttacgttaggtctgatttggaatatcatactgcattggcaagtgaaaaacgtcatgaaaaacattatggctggccttcagcagacaaacagcgagaagatattgttgtcttgggttagacagagtacacgcaattacccccaggtgaatgtgatcaacttcactacgagctggagcgatgggctagcccttaacgcgctaattcattcacataggcccgatctcttcgattggaattccgtggtgtgtcaacagtccgcaactcaacggttggagcacgcatttaacattgcaaggtaccagttaggcatagaaaagctgttagacccagaggatgtcgacaccacgtaccctgacaagaaaagtatattgatgtatattacttctctttttcaggtgctccctcagcaggtgtcgattgaggccatccaggaagtggagatgctgcctcgcccacctaaagtgacaaaagaggagcacttccagctgcatcatcagatgcattattctcagcagatcacagtcagccttgcgcaggggtacgagcgtactagcagcccaaagccccggtttaagtcctatgcctatacacaagctgcatacgtaacaacgtcagacccgaccagaagcccatttccatctcagcacttagaagctcccgaggacaaaagcttcggcagctccctgatggagagtgaggtgaatctggaccgctatcagactgcactggaggaggtgctctcttggctactctcagcagaggatacactgcaagcacagggcgagataagcaatgacgtggaggtcgtgaaagaccagttccacacacatgagggctacatgatggatctgacggcgcatcagggtagagtcggcaacattctacagctggggtcgaaattaatcggtaccggaaaactctcagaggatgaggagaccgaggtgcaagaacaaatgaatctgttaaactctaggtgggaatgtctgcgcgtggcctcaatggagaagcaaagtaacttgcacagggtcctcatggatttgcagaatcaaaagttaaaggagctgaacgactggctgaccaaaaccgaggagaggactcgtaagatggaggaagaaccgctggggcccgatttggaggacctgaaacggcaggttcagcagcacaaggttttgcaggaggacttagagcaggagcaagtacgggtgaactccctcacccatatggtggtggtggtagatgagtcaagcggcgatcacgccactgctgcactcgaagagcagttaaaggtgctcggggatcgttgggccaatatttgtcgatggacagaggataggtgggtgctgttgcaggacattctgctcaagtggcagcggttgaccgaagagcagtgtctgttttctgcgtggctgtcggagaaggaagatgccgttaataagatccataccactggcttcaaagaccagaacgagatgctgtcctccctacagaagctagccgtactgaaggctgatctggaaaagaaaaaacagagcatgggtaagctgtactccctgaagcaggacctgctgtcaactctcaaaaacaaatctgtgacccagaagactgaggcgtggctggacaactttgcccggtgctgggacaatctcgtccagaagcttgaaaagtccacggcccagatatctcaggcagtgacaaccacgcagccttccctgacgcagactacggtcatggagactgtcacaactgtgaccacccgggaacagattctcgtgaagcatgctcaggaggagctcccgcctcctcctccccagaagaagcggcagatcacagtggacaccctcgagcgtctgcaagagttgcaagaggcgacagacgaacttgatctgaagctgcgccaggccgaggttattaaaggcagctggcagccagtgggggacctgttgatcgattcgcttcaggatcaccttgaaaaggtaaaggccctgcgcggagagatagctccactgaaggaaaacgtgtcccacgtaaacgatctggcccgccaattgaccacattgggtatccagctgtctccctataatctctccacgcttgaggacttgaatacacgatggaaattgttgcaagtggccgtcgaggaccgagtgcgacagttgcacgaagcccacagggactttgggcccgcctcgcagcacttcttgagcacaagcgtgcaggggccatgggagcgagctatcagccccaacaaagtaccatactacattaatcacgagacccaaactacgtgttgggaccatcccaagatgacagaactgtatcaatctttggctgacctgaataacgtgagattcagcgcataccgcaccgccatgaaattgaggagactgcagaaggctctgtgcttggacttgctctccctgagtgccgcctgcgatgccctggaccagcataaccttaagcagaatgatcaacccatggacatattgcagatcatcaactgcctgacaaccatttatgatagattggagcaggaacacaacaacctggtaaatgtcccgttatgcgttgatatgtgcttgaactggctgctaaacgtctatgacaccgggagaactggacgcatccgtgtcttgtcatttaagactggcattatttccctctgcaaagcacacctggaggataagtatcgctatttgttcaagcaggtggcgagctcaaccgggttttgtgatcaacgcagactgggcctcctgttacatgattccatccaaattcctcgccagctcggcgaggtagcttcctttggcgggagcaacatagagccatccgtcaggtcctgcttccagttcgctaacaacaaacctgagatcgaggctgccctgtttttggattggatgcgattagaacctcagagtatggtttggcttcccgttcttcatcgcgtggcagcggcagagacagcgaagcatcaagctaagtgcaatatctgtaaagagtgtccaataatcggttttcggtatcggtctcttaaacactttaattacgacatctgtcagagttgcttctttagcggaagagtcgcaaagggacacaaaatgcactacccaatggttgaatattgtaccccgactacctccggcgaagatgttagagatttcgcgaaggtccttaagaacaagtttcgcacgaaaagatattttgccaagcacccgcggatgggttacctccctgtccagacagtactagaaggggacaatatggaaacggatacaatg

SEQ ID NO: 342858 - DNA, 3591 bp, Artificial Sequence
  derived and/or modified sequence
atgctctggtgggaagaagttgaagattgctatgaacgcgaagacgtacagaaaaagacatttacgaaatgggtcaatgcccaattcagtaagttcggaaaacaacacattgaaaatttgttttccgacctgcaggatggacgacgcttgctggatctgctggaaggtctgactgggcagaaattgccaaaagagaagggatcaacccgtgtccacgccctgaataacgtgaacaaggccctcagggtgctgcagaataacaatgtggacctggtgaacatcggaagcactgatattgtggatggcaaccacaagctgacattggggctgatatggaacattattcttcattggcaggtaaaaaatgtaatgaagaacattatggccggcctccaacaaacgaactctgagaagatcctgctctcttgggtcagacagtctactcgcaattatccccaagttaacgttattaattttacaacttcatggtctgatgggctcgctctgaatgcgcttattcattcccacagacccgacctgttcgattggaactccgttgtatgccagcagtctgcaacacagcggctagagcatgccttcaatattgctagataccagttgggaattgagaagctgctggaccccgaagacgtcgacaccacataccctgataagaaatctatcctcatgtacattacgtcactcttccaagttctaccacagcaggtgtccatcgaggcgattcaggaggtagagatgcttccacggcctcccaaggtgaccaaggaagagcactttcaactgcaccaccagatgcactattcgcagcagattacagtcagcctcgcccaggggtatgagcgcacatcaagtcccaagccacgtttcaaatcgtacgcttacacacaagctgcatacgtaacaacctctgatcctactaggagtcccttcccgtctcagcacctggaggctcctgaggataagtcatttggaagctccttgatggaatcagaagtgaacctggaccggtaccagaccgcactcgaagaggtgctcagctggctgctgagtgcagaagacacgctccaggcccagggggagatttcgaacgacgtagaggtggtaaaggatcagtttcacactcacgaaggatatatgatggatctgacagcacaccaaggccgggttggcaacatcctccagctcggcagcaagttaatagggacggggaagctcagcgaagacgaagagactgaggttcaggagcagatgaacttgttgaactcgagatgggagtgtctgcgggtcgcgagtatggagaaacaatctaatctacaccgggtgctgatggatttacagaaccagaagctcaaagaactgaatgattggttgaccaagacagaagaacgcacccggaaaatggaagaggaaccattaggcccagatctggaagaccttaagaggcaggttcagcaacacaaggtcttgcaggaggacctggaacaggagcaggtgcgtgtcaactcattgacccacatggtcgtggtggtagacgagtcttcaggagatcatgcgactgcagcactggaggagcagttgaaggtcttgggggatagatgggccaacatttgtaggtggactgaagacagatgggtcctcttacaagacatcttgctgaaatggcagagacttaccgaggaacagtgcctcttttctgcctggctgtctgagaaggaggacgcggtgaacaaaatccatacaaccggcttcaaagaccagaacgagatgctttctagcctgcagaagctggccgtgcttaaagccgacctggagaaaaaaaagcagagcatgggcaagctgtacagcttaaagcaggacttgctcagtactctgaaaaacaagagtgttacgcagaaaacggaagcgtggcttgacaattttgcccgctgctgggataatctcgttcagaagctggaaaagtctactgcccagattagtcaggcagtcaccaccactcagccttctctgacacaaacaaccgttatggaaacagtcaccacggtcacaactagggagcaaattttagttaagcacgcccaagaggaactgccacctccacccccccaaaagaagagacagatcactgttgataccctggagaggttacaggaactccaggaggcgacggacgaactcgatcttaagttacgacaggcagaggtcattaagggtagctggcagcccgtcggggatcttctcatagactctctccaggaccatctcgagaaagtgaaagccctaagaggggagatagctcctctcaaagagaatgtgtcccacgtgaacgacttggctaggcagctgacaaccctcggcatccagctctccccatacaacttgagtaccttagaggatcttaatacccggtggaagctgctgcaggtggcagtagaagatcgcgtgagacagctacacgaagcacaccgcgattttggacctgcctcacaacacttcctgagtacaagtgttcagggaccatgggagcgtgccattagtccaaataaggttccatactacattaaccatgaaactcagacaacttgttgggatcaccccaaaatgacagagctgtaccaatccctggctgatcttaacaatgtgagattctcggcttacaggacagccatgaagttgcggcgacttcagaaggcactgtgtctggatctgctgagcctctccgcggcttgcgatgccctcgatcagcacaatttgaagcagaacgatcagcccatggatattctgcagattatcaactgcctcaccactatctatgatcggctggagcaagaacataataacctggtgaacgtcccactgtgcgtggacatgtgcctgaactggttactgaatgtttacgacaccggccgaacaggaaggatacgggtcctgtcctttaaaacaggtattatatccctctgcaaggcccatctggaagacaaataccgatacttgtttaagcaggtagcaagttcaacagggttttgtgaccagagacggctgggactgctgcttcacgactcaatccagatcccgagacagctcggagaagtggctagtttcggagggtccaacattgaaccaagcgtccggtcatgtttccaatttgccaataataaaccggagatcgaagctgcactgttccttgattggatgcgactggaaccacaatccatggtgtggctcccagtgctgcaccgggtagccgccgctgaaacagcaaaacatcaggccaagtgcaatatctgcaaggagtgcccgattattggttttaggtaccgatccttgaaacactttaattacgacatctgccagagctgttttttctctgggagggtggctaagggtcacaagatgcactaccccatggtcgagtattgcacgcctactaccagtggtgaagatgtgagggatttcgcaaaagtcctgaagaataagttcaggaccaagcggtactttgctaaacaccccaggatggggtacctccccgttcagacggttctcgagggtgacaacatggagacggacactatg

SEQ ID NO: 342859 - DNA, 3591 bp, Artificial Sequence
  derived and/or modified sequence
atgctgtggtgggaggaagtggaagactgctacgaacgggaggatgtgcagaagaagaccttcacaaagtgggtgaatgcacagttttccaagttcgggaagcaacatattgagaacctgttttccgacctgcaggatggccgtcgtttactggacttgctggagggtctcacaggccagaagcttccaaaggagaagggctctacacgcgtgcacgcactgaacaacgtgaataaggcacttagagtcctccagaataacaacgtggacctcgtcaacattgggtcaaccgatatcgtggatgggaaccacaagctgacattgggacttatctggaacataatcctgcactggcaggtcaagaatgtcatgaaaaatattatggccgggctgcagcagacaaactccgagaagatccttctaagctgggtgagacagtctaccaggaactacccccaagtgaacgtgatcaatttcactactagctggagtgatggtctagccttgaatgctctcattcatagtcatcggccagatctgttcgactggaacagcgtggtgtgtcagcagagtgctacacagcggctcgaacatgcctttaacatcgccagatatcaattaggtatcgaaaagctgttggatccagaggatgtggacaccacttaccctgataaaaaatccatccttatgtatatcactagtctgttccaggttctgccacaacaggtttctatagaggcaatacaggaggtggagatgcttcctcgcccacccaaggtgacaaaagaggagcacttccagctccaccaccagatgcactactcccaacagatcacagtttctctagcacaggggtatgagaggacaagtagccccaagccaaggttcaagtcttacgcctatactcaggcagcctatgtgactactagtgatcctactcgatcacctttcccctctcaacaccttgaggcacctgaggacaagtcttttggttctagcctgatggagtctgaggtcaatctggatcgttaccagactgcactggaagaggtcctgagttggctcctcagcgctgaagatacccttcaggcccagggtgaaattagcaacgatgtggaagtggtgaaagaccagttccacactcatgaaggctacatgatggacctcactgcccaccagggcagggtgggcaatatactacaacttggcagtaaactaataggtaccggaaaactgtctgaggatgaagagaccgaggtgcaggaacagatgaacctgttgaacagcagatgggagtgtctcagagtggctagtatggaaaaacagtccaacctacaccgagtcctgatggatctgcaaaatcagaagctgaaggagctgaacgattggttaactaaaactgaggagcggacccgcaaaatggaggaggagcctctaggccctgatttagaggatctgaagagacaggtgcagcagcataaagtcctgcaggaagacctggaacaggagcaagtccgagtgaattccctgacacacatggtggtagtcgtcgacgagagctccggcgatcacgccacagccgccctggaggagcagctaaaggttctgggggacaggtgggctaatatctgtaggtggaccgaagaccggtgggtgttgcttcaggatatactactgaagtggcaaaggttaactgaggagcagtgcctgttcagtgcatggttatctgagaaggaggatgccgtgaacaaaattcacacaacagggtttaaagaccagaacgaaatgctaagcagcctgcagaagttggccgtgctgaaagctgacctagaaaaaaaaaagcagtcaatgggtaagctgtatagcctgaaacaggaccttctgagtacactaaagaacaagtctgtgactcagaagacagaggcatggctggacaatttcgcacgctgctgggacaacctggtgcagaaactagagaaaagcaccgcccaaatttctcaggccgtgacaaccacacagccatctcttacacaaaccacagtcatggagacagttacaaccgttacaacccgagagcagatactggttaaacacgcccaggaagagctcccacccccaccccctcagaagaagaggcaaataaccgttgataccctggaaaggttacaggaactgcaggaggctacagatgaactcgacctgaagctgcgtcaggcagaggtgatcaaaggcagttggcagccagtcggggatctgttgatagacagtttacaggatcacttagagaaagtcaaagccctaagaggggagatagcaccactgaaagagaacgtgagccatgtgaacgatctggcacggcagctgacaacccttggaattcagctgtctccctacaacctgtcaaccctcgaagacctgaacactcgctggaaactccttcaggtagctgtagaggaccgggttcgtcaactgcacgaagcacaccgcgatttcggcccagcttcccagcattttctctccacctctgtgcagggtccatgggagcgggcaatatcacctaataaggtgccatactacataaatcatgaaacccagaccacctgctgggatcatcccaaaatgacagagctataccagtccctggccgacctgaataacgttcgttttagtgcttaccggaccgcaatgaagctcaggcgtctgcagaaggccctgtgcctggatctgctttctctatctgccgcctgcgacgctctggatcagcataacctcaagcagaatgatcagcctatggacattctacagattataaactgccttaccactatatacgaccgtcttgagcaggagcacaacaatctggtcaacgtcccactgtgtgtggatatgtgtctaaactggctcctgaacgtgtatgacaccggtcgcaccggacgtatacgcgtgctgtcattcaagaccggtataataagcctctgtaaagcccacctggaggacaagtacagatatctcttcaagcaggttgctagctctaccggcttctgcgaccaacgcaggctggggctgctactgcacgactccatacagatcccacgtcagcttggagaggttgccagttttggcgggagcaacatagagccctccgtacggagttgttttcagttcgccaacaataagcctgagatcgaggcagcactgttcctggactggatgagacttgaaccccagtctatggtctggctccccgtgctgcatagggtggctgccgccgagacagcaaagcaccaggctaaatgtaacatttgtaaagagtgtcctataataggatttcgctataggagcctgaagcacttcaactacgatatctgccagtcttgctttttttctggccgtgtggctaaaggacacaaaatgcactaccctatggttgaatactgcacacccaccaccagtggcgaggacgttagggactttgctaaggtgctgaagaacaagtttcgaactaaaaggtattttgctaaacacccaaggatgggatatcttcccgtacagaccgtcttggaaggagacaacatggagaccgacacaatg

SEQ ID NO: 342860 - DNA, 3591 bp, Artificial Sequence
  derived and/or modified sequence
atgctctggtgggaggaggtcgaggactgctatgagcgtgaggatgtgcaaaagaaaacctttaccaagtgggtgaatgcacaattctcgaaatttggtaagcagcatattgaaaatctgttttcggacctccaagacggtagacgacttctcgacttactggagggcctgaccggtcagaagttgccgaaagagaaaggttcgacccgggtccacgccctaaataatgtaaataaggcgctgcgcgtcctgcagaacaacaatgtggacctggttaatatcggtagtactgacatcgtagacggtaatcacaagctcacactgggtcttatctggaacatcatcctccattggcaagtgaagaatgtgatgaaaaacataatggcgggtcttcagcaaaccaactccgaaaagattctgctgagctgggttcgccaatccactcgaaattaccctcaagttaacgtcattaacttcactaccagctggagcgatggtctggcattgaatgctttgatacattctcaccgcccagacctcttcgattggaacagcgtggtttgtcagcaaagtgccactcagcgcttggagcacgccttcaatattgcacgttatcaactgggtatcgagaagctcctggacccggaagatgttgacaccacttacccggacaagaagtccatattgatgtatattaccagcctgttccaagttttgccacagcaagttagcattgaggcgatccaggaggtggaaatgctgccacgcccaccgaaggtaacgaaggaggaacacttccaactgcaccaccagatgcattattcccagcaaatcacagtctccctggcgcaaggttacgagagaaccagcagcccaaagccccgcttcaaaagctatgcatacacgcaagcggcctacgtgaccaccagcgacccaacgcgctcaccgttcccatcccagcacctcgaagcaccggaggataaaagcttcggttcatccctcatggagagcgaggttaatctggaccgctatcaaacggcactggaagaggtcctgagctggctgctgagcgcggaggacaccctacaggcgcagggcgagatcagcaacgacgtcgaggtcgtcaaagatcagtttcatacacacgaggggtatatgatggacctgaccgcccaccaggggcgcgttggtaatatcctacaactcggaagcaaactgattgggaccggcaaactgagtgaggatgaggaaaccgaggtgcaagagcagatgaacctgctgaatagcagatgggaatgtctacgggtcgcgtccatggaaaaacagtcgaatctgcaccgggtcctcatggacctgcagaaccagaagctgaaggagctgaacgactggttgaccaagaccgaagagcgcacacgaaaaatggaggaagagccgctggggcctgatctggaggacctgaagcgccaggtccagcagcacaaagtgttgcaggaagatctggaacaagagcaagtgagggtgaatagcctgacccacatggtcgtcgtggtggacgaaagtagcggcgaccacgccaccgcggccctggaagagcaactgaaggtcctgggtgatcgctgggccaatatttgcaggtggaccgaagatcgatgggttctcctgcaggatattctgctgaaatggcagcgtctgaccgaggaacagtgcctgttttctgcttggctgtcagagaaggaagacgcagtgaacaagatacatactaccggttttaaggatcagaatgagatgttaagcagtcttcagaaactggcagtcctgaaggctgatttggagaagaagaaacaatctatgggcaaactgtactccctgaaacaagatttactgagcaccctgaagaataaatccgtcacacaaaaaaccgaagcgtggctggacaacttcgctaggtgttgggataacttggtgcagaagctggaaaagagcacggcccagattagccaggctgtgactaccactcagccttcattgacgcaaaccaccgttatggagaccgttaccaccgtcaccactcgcgaacagatcctggtaaaacatgctcaggaggagcttccaccaccacctccacagaagaagcgccagatcactgtggacactcttgagcggctgcaggagttgcaggaggccacggacgaactggatctgaagctgaggcaggccgaggtcattaagggtagctggcagccggtgggtgacctgctgattgacagtctgcaggaccacctggagaaagtcaaagccctgcgcggcgagatcgcaccactaaaggagaatgttagccacgtgaatgatttggctcgtcagcttactacgttggggattcagctgagcccttataatctcagcactttggaggacctaaacacaagatggaaactgctgcaggtcgcagtcgaggatcgcgttagacaactgcacgaagcgcatcgtgacttcgggccagcgtcacagcattttctgtctacttccgtgcaaggcccgtgggagagagccatctctccaaacaaggttccgtattacattaatcacgaaacccagacgacgtgttgggatcatccgaagatgaccgaactttaccagtcactggcggatctgaacaacgtgcgctttagcgcctaccgtactgccatgaagttgagacgcctgcagaaagcactttgtctggacctgctgagcctgtccgcagcttgtgatgcgctcgatcagcacaatctgaagcaaaacgaccaaccaatggatatcctgcaaatcattaattgtcttaccactatttacgaccgtctggaacaggaacacaataacctggttaatgtccctctatgtgttgacatgtgcctgaattggctgctgaatgtctacgacactggtcggactggccgtatccgagtgctgtcattcaagaccgggattatttctctatgtaaggcacacctggaagacaagtatcggtatctctttaagcaagttgctagcagcacgggtttctgcgatcaacgccggctgggtctgcttcttcacgattctattcagatcccgcgtcaactgggggaggtggctagcttcggcggcagcaacatagagccgagcgtgcggtcctgtttccagtttgcgaataataagccagagatcgaggctgcactcttcttggattggatgcgcttagagccgcagtccatggtgtggctgcctgttctgcatcgcgtggcagccgctgaaacggcgaaacaccaggccaaatgtaacatctgcaaggagtgtccaattatcggatttcgttaccgctcattgaagcattttaactacgacatctgtcaatcttgtttctttagcggtcgggtcgcaaagggtcataagatgcactatccaatggtggagtactgcactccaacgaccagcggagaagacgttagagattttgcaaaggtactgaagaataaatttcgcactaaacgctacttcgccaagcacccacggatggggtatttacccgttcagacggtcctggaaggcgataacatggagaccgatacgatg

SEQ ID NO: 342861 - DNA, 3591 bp, Artificial Sequence
  derived and/or modified sequence
atgctgtggtgggaagaggtggaggattgctatgaacgggaggacgtgcagaagaaaaccttcactaagtgggtcaacgcacaattctcgaagtttgggaaacagcatatagaaaaccttttctccgatcttcaagatggtcggagacttctggatttacttgaagggctcaccggacagaaacttcccaaggagaagggatccacaagagtccacgccttaaacaacgttaataaagctctgagggtgttacagaacaacaatgttgatttggtgaacatcggttccacagacatagtggatgggaatcataaactgacactgggtctgatttggaatataatactacattggcaggtgaagaacgtgatgaaaaatattatggcaggactccaacagacaaatagtgaaaagattctcctcagctgggtacgccagtccactagaaactatccccaggtcaacgtgatcaatttcaccacctcctggtccgatggactggccctaaacgcgctgattcactctcatcgaccggatttatttgattggaactcggtcgtttgtcagcagtcagccactcaaaggctcgagcacgcattcaatatagctcgctatcaactgggaatcgaaaaactcctcgacccagaggatgtagacaccacctacccagacaaaaagtccattctgatgtatattacaagtttgtttcaggtgctgccacagcaggtaagtatagaggcaatccaggaagtagagatgttgccacgccccccaaaggtcacgaaagaggagcacttccagttgcatcaccaaatgcactacagccaacagataactgtttcacttgcacaaggatatgagagaacctcttccccaaaacctcgctttaagtcctatgcgtacacacaagcagcttatgtcactaccagcgatcccacccgatctccttttccatcgcagcatctcgaagccccagaagacaagtctttcggatcgtcattaatggagtccgaagtgaatttggaccgttatcaaactgctctggaagaagttctgtcgtggctattgtcagctgaagatactctacaagctcagggggaaatctccaatgatgtggaggtggtcaaagaccagtttcacacccacgaaggctatatgatggatttgaccgctcaccagggccgggttggtaatatcctgcagctcgggtccaaattgattggcacagggaaactgtctgaagatgaggagacggaggttcaggaacagatgaacctcctgaacagtagatgggagtgcctcagggtagcatcaatggagaagcagagcaacctgcaccgtgtcctgatggatctgcagaaccagaagctgaaagagttgaatgattggttgaccaaaactgaagaaaggactcgcaagatggaagaagagccactggggccagatctcgaagacttaaagcggcaggtgcagcagcacaaagtgttgcaggaagatctggagcaggaacaagtccgtgtaaacagcttaacccacatggttgtcgtagttgacgagtcctccggtgaccacgctacagctgccctggaggaacagctgaaggtgttgggagatcggtgggcaaatatatgcaggtggacggaagatcgctgggtactgctccaggacattctcctgaagtggcagagattaactgaggaacagtgtctcttctcagcctggctgtcagaaaaagaggacgctgtgaataaaattcatactacaggctttaaagatcagaatgagatgctgtcgtccctgcagaagcttgccgtgctgaaggcggacttggagaagaagaaacaaagcatgggcaagttgtattccttgaagcaggacctgctgtctactttgaaaaataaatcagtgacgcagaaaactgaagcgtggctcgataacttcgctaggtgttgggacaatctggtgcagaaactcgaaaagtctactgcccagataagccaagctgtcactacgacacagccctctctgacccagacaaccgttatggaaaccgttaccacagtcactactcgagaacaaattctcgtgaagcatgcacaggaggagcttccgccgcccccaccccagaaaaagcgccagataaccgtagacaccttagaacgactgcaagaactgcaggaggcaacagatgaattggacctgaagctccgacaagccgaagtgatcaaaggcagctggcaacctgtgggcgatttacttatcgattctctgcaggatcatctggagaaggtgaaggccctccgcggcgagatcgctcctcttaaggaaaatgtaagccatgtgaatgatctggcccgccagcttacaactctgggtatccaactctctccttataatctatctaccctcgaggacttaaatactagatggaaacttctgcaagttgcggtggaagaccgagtgcgtcagttgcacgaagcacatagggattttggacccgcctcccagcacttcttgtccactagtgtgcaggggccgtgggagcgtgcaatcagtccgaataaagtgccctactacatcaaccacgagactcagacaacatgctgggaccaccccaagatgaccgaactataccagtcactggcagatttaaacaatgtcaggttttccgcatatcgaactgctatgaagctgagacgcctacagaaggccctgtgtctcgatttactaagtctcagcgcggcttgcgatgccctggaccagcacaacctaaaacagaacgatcagccaatggacatactacagattattaactgcttaaccaccatctacgacagactggaacaggagcataacaacttggtgaacgtgcccctgtgcgtggatatgtgcttgaactggctgctaaatgtgtacgacacagggagaaccggcagaatccgcgttttgtcattcaaaacaggtattatctccctttgtaaagcccacctagaggacaagtatcggtacctgttcaagcaagtggcatcttcaaccggcttttgcgaccagcggcgcctgggtctgctactgcacgattccatccagatccctagacaattgggcgaggtggcttcatttggcggatcaaatattgagccgagtgtgcggagctgtttccagttcgctaacaacaagcccgagatcgaggccgctctgttcttggattggatgagattggaaccccagtcaatggtgtggctaccagtactgcatcgggtcgccgccgcagagacagctaagcatcaggctaagtgcaatatctgcaaggaatgtccgattattgggtttcggtaccggtccctgaagcattttaattacgacatttgccagagctgctttttttcaggcagggtggccaaaggccacaaaatgcactatcccatggtggagtactgtacaccaacaaccagcggcgaagatgtccgcgacttcgccaaggtgctgaagaataaattcaggactaagcgctattttgccaaacacccccgaatgggatacctccctgttcaaacggtgcttgagggcgataatatggaaaccgataccatg

SEQ ID NO: 342862 - DNA, 3591 bp, Artificial Sequence
  derived and/or modified sequence
atgctttggtgggaagaagtcgaagattgttacgaacgtgaggatgtccaaaagaaaacttttactaagtgggtgaacgcgcagttttcgaaattcggcaagcaacatatcgaaaatctgttctcggaccttcaagacgggaggaggcttctggatctgcttgaaggactgaccggtcaaaaactgccaaaggaaaagggaagcacccgtgtgcatgcattgaacaacgtcaataaggctctgagagtcctccagaacaataatgtggatctggtgaatatcggaagcaccgacatcgtggacggaaaccataagttgactcttggactgatatggaacattatactgcattggcaagtcaagaacgtgatgaagaacatcatggctggcctgcagcaaaccaactcggaaaagatactgcttagctgggtgaggcaatcaacccgcaactaccctcaagtgaacgtgattaacttcactacctcatggtccgatggacttgcgcttaacgccctgattcactcacaccgtccagatctctttgattggaacagcgtggtgtgtcaacaatccgctactcagagattggagcatgctttcaatatcgcccggtaccagctgggaattgaaaagctgctcgatcctgaagatgtcgacaccacttacccggacaaaaagtccatactgatgtacattactagcctgttccaagtactgccccagcaagtctcgattgaagcaattcaggaagtcgagatgctgccccgcccacctaaagttacgaaagaggagcattttcaacttcaccaccagatgcattactctcaacaaatcacggtgagcctcgcacagggttacgagagaacttcaagcccgaagccccggtttaagtcgtacgcgtacactcaggcagcgtacgtgactacttccgatccgaccaggtccccattcccgagccaacatctcgaagcaccagaggacaaatcgttcggatcgtccctgatggaatccgaggtgaacttggatcggtaccaaacggcactggaggaagtgcttagctggctgctcagcgcggaagatactcttcaggcacaaggagaaatctccaacgacgtggaagtggtcaaagatcaatttcacacccacgaagggtacatgatggatcttaccgctcaccaaggccgggtgggaaacattttgcaattggggtcaaagctgattggaactggaaaactctccgaagatgaagagacggaagtccaagaacagatgaatctgctcaactcgcgctgggaatgtcttagagtggcatccatggagaagcagtccaacctgcaccgggtccttatggatcttcagaaccagaaattgaaggagctgaatgattggctcactaaaactgaagaacggacgcggaaaatggaggaagaacctctcgggccggatctggaagatctgaagcgacaagtccagcaacataaagtgttgcaagaggatctcgagcaagagcaggtgcgggtcaactccctgacccatatggtggtcgtcgttgatgaatcctcgggtgaccatgcaacggcagcactggaagagcagctcaaggtgttgggcgacaggtgggccaacatttgccggtggaccgaggaccgctgggttttgctgcaagatattcttttgaagtggcaacggcttacggaagaacagtgtctgttctcggcatggcttagcgagaaggaagatgcagtcaataagattcacactaccggctttaaggatcaaaatgaaatgctttcctctcttcaaaagctggcggtcctgaaggccgatctcgagaagaaaaaacaatcgatgggcaagctgtactcccttaaacaagaccttctgagcaccctgaagaataagtcggtgacccagaaaactgaagcctggcttgataactttgcaagatgttgggataacctggttcagaagctggagaaatccacggcacagatctcccaagcggtcacgactacccaaccatcccttactcagacgactgtgatggaaacggtaaccaccgtaactacccgggagcaaattctcgtgaagcatgcccaagaagaactccctcctcctccgccacaaaagaagaggcagatcaccgtggacaccctggaacggctgcaggaactccaagaggcaaccgacgaacttgacctgaaactgaggcaggccgaagtgatcaaaggatcgtggcagccagtgggtgatttgcttatagattcactgcaagaccaccttgagaaggtcaaggcactgcgtggggaaatagcaccactgaaagagaatgtgtcccatgtgaatgaccttgcgagacagctcactactcttgggattcagctctcaccatacaatctttcgaccttggaagatcttaatacgaggtggaagctcctccaagtggcagtggaagatcgcgtccgccaactgcatgaagcacatcgcgactttggcccagcttcgcaacactttctgtctacttccgtgcagggaccatgggaacgtgcaattagccctaacaaggtcccttactatatcaaccatgagactcagactacttgctgggatcatccaaaaatgacggagctgtaccagtccctggcagatctgaacaatgtgcgattttccgcctatcgcaccgccatgaagctgagaaggcttcaaaaggcactgtgtctggaccttctctcactctcggcagcgtgcgacgccctcgaccaacacaacctgaagcagaatgaccaaccaatggacattctccagattatcaactgccttaccaccatttacgatcgccttgaacaagaacacaacaacttggtgaacgtgcctctctgtgttgatatgtgcctcaactggcttctgaacgtgtacgataccggtcggactggaagaattcgtgtcctgtctttcaagaccgggatcattagtctttgtaaggcacatctggaagataagtacagatacctgttcaagcaagtggcaagctccacgggcttttgcgatcaacggcgacttgggctccttctccatgacagcattcagattcctagacagcttggtgaagtcgcttcgttcggaggtagcaacatagaacccagcgtgcggagctgctttcagttcgccaacaacaagcctgaaatcgaggcagcactttttctggattggatgcgccttgaacctcaatcgatggtgtggctcccagtgcttcatagagtcgcagccgcagaaaccgcaaaacatcaagccaagtgtaacatctgtaaagagtgccctattatcggtttcagatacagaagccttaaacatttcaattatgatatttgtcaatcatgctttttcagtggcagagtggcaaagggacataagatgcactaccctatggtagaatattgcaccccaactacctcgggtgaggacgtgcgggattttgcaaaggtgctgaaaaacaagtttagaaccaaaagatacttcgctaagcatccccggatggggtacctgcctgtccagaccgtgcttgaaggggataacatggaaactgacaccatg

SEQ ID NO: 342863 - DNA, 3591 bp, Artificial Sequence
  derived and/or modified sequence
atgttatggtgggaggaagtggaggattgttacgagcgggaagacgttcaaaaaaagacctttactaagtgggtgaatgcccaattttccaagtttgggaagcagcacatcgaaaatttattctcggacctccaggatggaaggcgcctgttagacctccttgagggtttgacagggcaaaagctgccaaaggaaaagggctctactagggtgcatgctctgaataatgttaataaggcactgcgcgtgcttcaaaacaacaatgttgatctggtaaatattgggtccacggatatcgttgatggtaaccataagttgacactcggtctgatatggaacataatcctgcactggcaagtgaagaacgttatgaagaacattatggctggattgcagcagaccaacagtgaaaaaattttgttgagctgggttaggcagagcaccaggaattacccgcaggtaaatgttatcaatttcaccactagctggtcagacggactcgcgttaaacgccctgattcatagtcatagaccagatctatttgattggaatagcgtggtctgccagcaatctgccacacaaaggttggaacacgctttcaacatcgcacgctatcagctcggtatcgaaaagttgctggaccctgaggacgtggatacaacctatccagacaagaaaagtattttaatgtacatcacatcactgttccaggtcctgccacagcaggttagtatagaggcgattcaagaggtggaaatgctcccccgaccaccaaaggttacaaaggaggagcatttccaactgcatcatcagatgcactattcacagcagatcacagtttcactagcccagggatacgagcgtacctcctctccaaagccgcggtttaaatcatacgcctatacacaggccgcctacgtgaccacttccgatccgacccgctctcctttcccctcccagcatctcgaagcaccagaggataagtcttttggttcctctctgatggaaagcgaggtcaatcttgataggtaccagaccgccttggaagaggtcttatcgtggctcctttcagccgaggatactctgcaggcccagggggaaatctccaatgacgtcgaggtagtgaaagaccagtttcacacccatgagggatacatgatggacctgactgcccatcaaggccgcgtgggtaacattctacaactcgggagcaagctgatcggcactgggaagctgtccgaggacgaggagaccgaggtacaggagcaaatgaacttattgaactcaagatgggaatgcttaagggtagcatccatggagaagcagagtaacctgcaccgggtgttgatggatctgcagaaccagaagttgaaagagcttaacgattggcttaccaaaactgaggaacggacacgcaaaatggaggaggaaccactcgggccagatctggaggatctcaagaggcaggtccagcagcataaggtcctccaggaagatctcgagcaggagcaggttcgcgtgaactctctcacccatatggtggtcgttgtcgatgagtcaagtggggaccacgccacggcggcattggaagagcagctcaaagtactaggggatcggtgggccaatatctgccgctggaccgaggaccgctgggtattgctgcaggacatcctcctcaagtggcagcgcttgaccgaggagcagtgtctattctcagcatggctgtccgagaaggaagatgccgtgaataagattcacaccacagggtttaaggatcaaaatgaaatgcttagctctttgcagaagttagctgtcctaaaagctgacctggagaaaaagaagcagtctatgggtaaattatattctttgaagcaggacttactctccacgttaaaaaacaagtctgtgacgcagaagacagaagcttggctggataacttcgcccgttgctgggataacctcgttcagaaactagagaaatcgactgctcagatcagccaagcagttacgactacgcagccttccctgacccagactacagtcatggagactgtgaccaccgtcaccaccagggaacaaattcttgtgaagcatgcacaggaagaattacccccgccgcccccccagaaaaaaaggcagattaccgtagacacattagaacgtctccaggaactgcaagaggctactgatgagttggacctaaagttaaggcaggcagaggtgataaagggcagttggcagccggtgggcgacctgctcattgattctctgcaggaccacctcgagaaggtcaaggctctccggggtgaaattgcgccactgaaagagaacgtatcccacgtgaacgacctggcgaggcagctgactactcttggcatccagctcagcccctataacctgtccacactcgaggatctgaatactagatggaaactgttgcaggtagccgtggaagatcgagtgcgtcagctacacgaagcccaccgggatttcggccccgcctctcagcacttcttatcaacctctgtgcaaggaccctgggagagagctatatcgcctaacaaggtgccttactacatcaatcatgaaacccagactacatgctgggatcatccgaagatgacagaattgtaccagtccttggccgacctgaacaatgtgaggtttagcgcctacagaaccgccatgaaactgaggcgcctgcagaaggctttgtgtctagatctgctttcactctctgccgcctgcgatgctctagaccagcataacctcaaacagaatgatcagcccatggacatcctgcagatcattaactgcctgacaacaatctacgatagactggaacaggaacacaataatctggtgaatgttcccctgtgtgtcgatatgtgtctgaactggcttcttaacgtgtatgataccggccggactggaagaatccgcgtgctgtccttcaaaactggcataatctctctgtgcaaagcacatctggaagacaaataccggtacttgttcaaacaggtggccagctccactggtttttgtgaccaacgccggctcggcctgctgttacacgacagtatccagattcctaggcagctcggcgaggtggccagttttggaggcagtaacattgagccatctgtcagaagctgcttccagtttgccaacaacaagcccgagattgaggcagcactcttcttagattggatgcgcctcgaaccccaaagcatggtctggctgcccgttctgcatagggtggcagctgcagaaaccgcaaagcaccaggccaaatgtaacatttgcaaggagtgccctattattggcttccggtatcggagtctgaaacacttcaattatgatatatgccaaagttgctttttctccggccgggttgcgaaaggacataaaatgcactacccaatggtcgaatactgcacccccactacatccggtgaagatgtgcgagacttcgccaaagtgctgaagaataagtttagaacaaaaaggtacttcgctaaacatcccaggatgggctacttgcccgtccagactgtgctcgagggcgacaatatggaaactgatacgatg

SEQ ID NO: 342864 - DNA, 3591 bp, Artificial Sequence
  derived and/or modified sequence
atgctgtggtgggaggaggtcgaggactgctacgaaagggaggacgtgcagaagaaaaccttcactaagtgggtgaacgcgcaattctccaagttcggtaaacaacacatcgaaaacttgttcagcgacctgcaggatggaaggcgcctccttgatctgcttgaaggactcactggacaaaagctcccaaaagaaaagggttccactcgcgttcatgccctgaacaacgtgaacaaagcgttgcgagtgttgcagaacaacaatgtggacctggtgaacattggatccaccgacatcgtagatggcaatcataagctgaccctgggactgatttggaatatcatcctgcactggcaggtgaagaacgtgatgaagaacataatggccggactgcagcaaactaattctgagaagattctgctgagctgggtccggcaatccaccagaaactacccacaggtcaatgttatcaacttcaccaccagctggtctgatggcctcgccctgaacgctcttatccactcacaccgcccagatctcttcgactggaactcagtggtctgccagcaatccgccacccagagacttgagcatgcattcaatatcgcccggtatcagctgggcatagaaaagctgttggacccggaggacgtggacactacgtacccagacaagaagtccattttgatgtacataacctccctgttccaggtgctccctcagcaagtgtccatcgaagcaatccaggaggttgagatgctgccgcgcccacctaaggttactaaagaagaacatttccaactgcatcatcagatgcattatagccaacagatcaccgtgagcctggcccaaggatacgaacggaccagcagtccaaagccgcgctttaagtcgtacgcttatactcaggccgcctacgtgactactagcgacccaactagatccccttttccatcccagcacctggaggccccagaggacaagagctttggttcatcgctgatggaatcggaagtgaacctggatcggtaccaaaccgccctggaggaggtgctctcatggctgctttccgccgaagatacgctgcaggctcagggagaaatctccaacgacgtggaagtagtgaaagaccagttccacactcatgaagggtacatgatggacctgactgcccatcaagggcgggtcgggaacatcctgcagctcggaagcaaacttatcgggactggaaagctgagcgaggacgaggagactgaggtgcaagaacagatgaacctcctgaactcccgatgggagtgcctgagggtggcctcaatggagaagcagtccaatctgcaccgcgtcctcatggatctgcaaaaccaaaagctgaaagaactgaatgattggctgaccaagacggaagagagaactaggaagatggaagaggagccgttgggacctgatctcgaagatctgaaacggcaagtgcagcagcacaaggtcctgcaggaagatttggaacaagaacaggtgcgcgtgaactcacttacccatatggtggtcgtggtcgacgagtcgtcgggggatcatgccactgccgcccttgaagaacaactgaaagtactcggcgaccgctgggctaatatctgcagatggaccgaggaccggtgggtgctcttgcaggacatcctgctgaagtggcaaagactgaccgaagagcaatgccttttttcggcctggctgtcagagaaggaagatgcggtgaacaagattcacactaccgggttcaaagaccaaaatgaaatgctctcctccttgcaaaaactggctgtcctgaaggcggacctggagaaaaagaaacaatcaatgggtaaactctactctctgaaacaagatctgttgtcgaccctgaaaaacaaaagcgtcacccaaaagacggaagcctggctcgataactttgctcggtgttgggataatctggtgcagaaactcgaaaagtccactgctcaaatttcacaagcggtgacgacgacccaaccgtcactgactcagactaccgtcatggaaaccgtcaccaccgtgaccacgcgggagcaaattctggtcaagcacgcgcaggaggaactcccgccaccacctccacagaagaagaggcagattacggttgatactctggagagactccaggagctccaggaagccaccgacgagctggaccttaagttgagacaagcggaggtgatcaaaggctcatggcagccagtgggagatctcctgattgactcgctccaggatcatctcgagaaggtgaaggcgctgcggggtgaaattgcaccgctcaaagagaacgtttcccacgtgaatgatctcgctagacaacttactaccctcggcatccaattgtcgccctacaacctctccactctcgaggatttgaacactcgctggaagctgctgcaggtcgcggtcgaagatcgggtgcggcagcttcacgaagcgcaccgtgacttcggaccagcaagccagcactttctctcgacttcggtgcagggaccgtgggaaagggcaatctcacctaacaaagtcccctactatatcaaccatgaaacgcagactacctgctgggaccatcctaagatgactgagttgtaccaatctctggccgacctgaataacgtgcggttttccgcctataggaccgctatgaagctgcggcggctgcagaaggcactgtgtctggacctgctgtcactgtcagcggcatgcgacgcgctcgaccaacacaacctcaagcaaaacgaccagccgatggatatcctgcagatcatcaactgcctgactaccatctacgaccgcctggagcaggaacacaataacttggtcaatgtgccgctgtgcgtggacatgtgcctcaattggctgctcaacgtgtacgacacgggcagaaccgggcggatcagagtgctttcgttcaagactggaatcatctccttgtgcaaggcgcaccttgaggacaagtacagatacctctttaagcaggttgctagcagcaccggattctgtgaccagaggcgtctcggccttctcttgcacgactcaatccagatcccgcgccagctgggagaggtcgccagcttcggaggaagcaatatcgaaccttcagtgaggtcgtgtttccaattcgcaaataacaagccggagatcgaagccgcacttttcctcgattggatgcggctggagccacagtctatggtctggctcccggtactgcaccgggtggctgcagccgaaaccgctaagcatcaggcgaagtgcaacatctgtaaagaatgcccgatcatcggattccgttaccggtcgcttaagcacttcaactacgacatttgccagtcctgcttcttctcagggcgggtggccaagggacacaagatgcactacccgatggtggaatactgcactcccactactagtggagaggacgtgcgcgacttcgctaaggtcctgaagaataagttccgcaccaagagatacttcgccaagcatccgcgcatgggttacttgccggtccagaccgtgctggaaggagacaatatggaaaccgataccatg

SEQ ID NO: 342865 - DNA, 3591 bp, Artificial Sequence
  derived and/or modified sequence
atgctgtggtgggaggaagtcgaggattgttatgagcgggaagacgtccagaaaaagacgtttacaaagtgggttaacgctcaattttccaagtttgggaaacagcacatcgagaatctgtttagtgacttgcaggacggccgtaggctcctggacttactggaggggctcaccggacagaagctgccaaaagaaaagggttctactagggtccacgcgctgaacaacgtgaataaggctcttagagtgctgcagaataataacgtggacctcgtgaatattgggagcaccgatatagttgacggaaaccataaattgacattgggacttatctggaacattatcctgcattggcaggttaagaacgtcatgaagaacatcatggcaggccttcagcagaccaactctgaaaagatcttgctgagttgggtgaggcagtcgactcgcaactatccgcaggttaatgtcattaacttcacaacctcttggtccgatgggttggcactgaatgcccttatccattcccatcggcccgatctctttgactggaatagcgtggtctgtcagcagagcgccacgcaacgcctggaacacgcattcaatatcgccagataccagctaggcatcgagaaactcctagatcctgaagacgtcgacaccacatatcccgacaagaaaagtatcttgatgtatatcacaagcctgtttcaggtgctgccccagcaggtgtctatcgaagccatccaggaagtggaaatgttaccgcggcccccaaaggtgaccaaggaagagcatttccagctgcaccatcaaatgcattactctcagcagattaccgtcagtctggcacagggctatgaaagaaccagctcaccaaaacctcgcttcaagagctatgcttatacccaggctgcctatgtgacaacctctgaccccacccggtctccctttccttcgcagcatctcgaagcaccagaggacaagtcgtttgggtcttctctcatggagagcgaagttaacctggacagatatcagaccgcactggaggaggttttatcttggctcttgtccgccgaagacaccctccaggctcaaggagaaatttccaacgacgtcgaagtggtgaaggaccagttccacacacatgaaggttacatgatggatcttacggcccatcagggtcgcgtgggaaatatcctgcagttggggagcaaactgattggcaccgggaaactcagtgaagatgaggagaccgaagttcaggagcaaatgaatcttctcaattccaggtgggaatgtctgagggtcgccagtatggaaaagcaatcaaatttgcaccgcgtgctcatggatttgcagaaccagaagctgaaagaattgaacgattggttaacaaagacagaggagcgaacccggaagatggaggaggagcccctcggcccagatttggaggacctgaaacgccaggtacagcagcacaaggtgctacaagaggacctggagcaggagcaagtcagagtcaattcccttacccatatggtagtcgttgtggatgagtctagtggggaccacgcaacagcagctctggaggaacagctgaaagtgctaggggacaggtgggccaatatttgtaggtggaccgaggaccggtgggtgctgctacaggatatactgctcaagtggcagcgattgaccgaggaacaatgcctattctccgcatggctttcagagaaagaggatgccgtcaacaagatccataccactgggtttaaagatcagaatgagatgctgtcatccctccaaaaactggccgttttaaaggcggatctggagaagaagaagcaaagtatgggaaaactgtattctctgaagcaggacttgctttccaccctcaaaaacaagtcagtgactcagaagacagaggcctggctcgataacttcgctcgttgctgggataacttggttcagaagcttgagaaatcaactgcacagattagtcaagcagtgaccactacccagcccagcttgactcagacgaccgtgatggagacagtaacaacggtaacaactcgtgaacagatattagtgaagcatgctcaggaggaattacctcctccacctcctcaaaaaaaaaggcaaatcactgtggacaccttggagaggttgcaggagctccaggaggcgacggatgagctagacctgaaactcagacaagcggaggtgattaagggtagctggcagcctgtgggcgacctgctgatcgactcacttcaggaccacctggagaaggtcaaggctctccggggcgaaatcgctcccctgaaagagaacgtctcgcatgtgaatgacctggcgcggcaactgacaacactcggcatccagttgtccccatacaacctgagcaccctggaggatctgaatactcgttggaagctactacaggtcgctgttgaggatagggtgaggcaacttcacgaggcccaccgcgacttcggccctgcttcccagcatttcctgtccacaagcgtccagggcccctgggaaagagccatttctcctaacaaagtaccttactatataaatcacgaaactcagaccacgtgttgggatcaccctaaaatgaccgaactgtaccaaagcttagccgacctgaataatgttcgattcagcgcttacagaacagctatgaagcttagaaggcttcagaaagctctgtgtctcgatctgctctctctgtcagcggcgtgcgacgctctggaccagcataaccttaagcagaacgatcagcctatggatattcttcagatcatcaactgcctgacgacaatctatgacagactcgagcaggagcacaataacctggtgaatgtgcctctctgtgtcgacatgtgtttgaactggctgctgaacgtgtacgacaccggacgaacagggcgcatacgcgtcctctccttcaagacaggcatcatcagcctgtgcaaggcacacctcgaggataagtatagatatctgtttaagcaggtcgcttctagtactggtttttgtgatcagagaaggctaggccttctgcttcacgatagtatccaaatccctaggcagctaggagaagtggcgtcctttggcggaagtaatattgagccctcagtgcgctcttgcttccaatttgccaataacaaaccagaaatagaagctgcactattcctggattggatgagactcgaaccacagtccatggtgtggctgccggtgctgcatagggtagcagctgctgagacggccaaacaccaggcaaagtgtaacatttgtaaagaatgtccaataatagggttccggtatcgctctcttaagcactttaactatgatatatgtcagtcctgcttcttctccggaagagtggccaaagggcataagatgcattaccctatggtcgagtactgtacacctaccacctccggggaggatgtgcgggactttgctaaggtcctgaagaacaaatttagaaccaagagatactttgctaagcaccctaggatggggtatctcccagtccagacagtgctggagggcgataatatggaaactgatacaatg

SEQ ID NO: 342866 - DNA, 3591 bp, Artificial Sequence
  derived and/or modified sequence
atgttgtggtgggaagaggtggaagattgctacgaaagagaagatgtgcaaaagaaaacctttactaagtgggtgaacgcgcagttctccaaattcggaaagcagcacattgagaacctcttcagcgacctccaggacggccggcgcttgttggacctccttgagggactgactggccagaaactgccaaaagaaaaggggtcgacccgggtgcacgcgctgaataatgtgaataaggcgctccgggtgttgcagaacaataatgtggacctcgtcaatatcggcagcaccgacatcgtggacggaaatcataagttgacccttggactcatctggaacataatcctccattggcaggtgaaaaacgtcatgaaaaacatcatggcggggctgcaacagactaatagcgaaaagatcttgctgtcctgggtgcggcaaagcaccaggaactacccacaggtgaatgtgattaacttcacgacctcatggtcagacgggctcgcccttaacgccctcatccacagccaccgccctgacttgttcgactggaactccgtcgtgtgtcagcaatcagccacccaacggctcgagcacgcgtttaacattgcccggtaccaactgggaattgagaagttgctcgacccggaggacgtggatacgacctacccggataagaagtccatactgatgtatatcacgtcactgttccaggtgctgccgcaacaagtgtcgatcgaagccattcaagaagtggaaatgctcccgcgccctcctaaggtcaccaaagaggaacacttccaactccatcaccaaatgcactactcacagcagatcaccgtctcgctggcgcagggatacgaacgcacctcatcgccaaagccaaggttcaagagctacgcgtacacccaggccgcttacgtgactacttccgacccaactcggtcccccttcccatcacaacacttggaggccccggaagataagtcgtttggctcttcgctcatggaatcagaggtgaacctggaccgctaccagaccgccctggaggaggtcctgtcctggctcttgtccgccgaggataccctgcaagcacagggtgaaatatccaacgatgtggaagtggtgaaagaccagtttcatactcacgaaggttacatgatggacctcaccgcacaccagggacgcgtggggaacatcctgcagctcggatccaaactgatcggaaccggcaagctctcggaggacgaagaaactgaagttcaggagcaaatgaatctcctcaacagccggtgggaatgcctcagggtcgcatccatggaaaagcagtctaatttgcacagagtcttgatggatctccagaaccagaagctcaaagaactgaatgattggcttaccaagacggaggaaagaactcggaagatggaggaagaacccctgggacctgatctggaggacctcaaacgccaagtgcagcagcataaggtgctccaggaggatcttgaacaagaacaggtgcgggtgaattcactgacccatatggtcgtggtcgttgacgagtcgtcgggtgaccatgccactgcagctctggaagagcagctcaaggtgctcggcgatcggtgggctaacatttgtagatggactgaggaccggtgggtgcttctgcaggacattctgctgaaatggcaaagactcactgaggaacaatgcttgttctcagcctggctgtccgaaaaggaagatgccgtgaacaagatccatacgactgggttcaaggaccagaatgagatgctctcctcgcttcaaaagctcgcagtgcttaaggccgatctggagaagaaaaagcagtcgatgggaaagctgtattctctgaagcaagacctgcttagcaccctcaagaacaagtccgttacccagaaaaccgaagcctggctggacaatttcgctcggtgctgggacaatcttgtgcagaaactggaaaagagcactgcgcagatttcgcaggccgtgactaccacgcaaccgtcgttgactcagaccactgtcatggaaacggttactactgtgaccacgcgcgaacagatcctggtgaagcacgcccaagaggagctgcctcctccgccacctcagaagaagcggcaaatcaccgtcgacactctcgagcggctccaggaattgcaggaggctaccgacgagctggatcttaagttgcgccaagcagaagtgattaagggatcctggcaaccggtcggagatctcctgatcgacagcctgcaggatcacctggagaaagtgaaggctctccggggagaaatcgcgcccttgaaggaaaacgtgtcgcacgtgaacgacctcgctcgccagctcactaccctgggcattcagctgtcaccctacaacctttccactttggaagatctcaacacccgctggaagctgttgcaggtcgccgtggaagatcgggtgcggcaactccacgaagcgcatagagatttcggtccagcgtcccaacacttcctctccacctcggtccagggaccatgggaacgggcgatctcccctaacaaggtgccgtactacatcaatcacgaaacccagactacctgctgggatcaccccaagatgaccgagctttaccagagccttgcagacctgaacaatgtcaggttctcggcctatcgcaccgcaatgaaactcaggaggctgcagaaggcgctgtgtctggatctgctgtcattgtcggcagcctgcgacgcactggaccagcacaatctcaagcagaacgaccagccaatggacatcctgcaaatcatcaactgcttgactactatctacgaccgcctggaacaggagcacaataatctggtgaacgtcccattgtgcgtcgacatgtgtcttaactggctgctgaatgtctacgacaccgggcgcaccggaaggatccgggttctgtcctttaagaccggtatcatctccctgtgcaaagcccatcttgaggacaaataccgctacctgttcaagcaggtggccagctcgactggattctgcgaccaacgccggctggggctgctgctccatgactccatccagatcccgcgccagctcggagaagtagcctcattcggtggatcaaatatcgaaccgtcggtgcggagctgctttcagttcgccaacaacaaaccagaaatcgaggcggctctgttcctggactggatgagactcgagccacagtccatggtgtggctgccggtgttgcaccgggtggccgccgctgagactgcgaagcatcaggccaaatgcaatatctgcaaggaatgcccgatcattgggtttcggtatcgctctctcaagcatttcaactacgacatttgtcagtcttgcttcttctcgggacgcgtcgctaaaggccacaaaatgcactaccctatggtggaatactgcaccccaacgacgtcgggtgaagatgtgcgcgattttgccaaggtgttgaaaaacaagtttcgcaccaagagatactttgccaaacatcctagaatgggctacctcccagtgcaaactgtgctcgaaggtgataacatggagactgataccatg

SEQ ID NO: 342867 - DNA, 3591 bp, Artificial Sequence
  derived and/or modified sequence
atgctgtggtgggaggaagtggaggactgttacgaacgcgaggacgtgcagaaaaagactttcactaagtgggtgaatgcacagttctccaagtttggaaaacaacacatagagaaccttttttcagatctgcaggatggcagacgcctcctggatcttcttgaaggactgacggggcagaagctgcctaaggagaaggggagcactcgagtccatgcactgaacaacgtcaacaaagcactccgcgtgctccaaaacaataatgtggatctggtcaacattggatccactgatatcgtggacggtaatcataaacttaccctcgggctgatttggaacattatactccactggcaggtgaagaatgtgatgaagaacatcatggcaggacttcagcagactaactccgaaaagatccttttgtcctgggtgagacagtccactagaaattacccgcaggtgaacgtgataaacttcactacgtcatggtccgatggactcgccctgaatgctctgatacactcacatagacctgacctgtttgattggaattccgtggtttgtcaacaaagcgccactcaaagactggaacatgcatttaacatagctcgctaccaactgggaatcgagaagttgcttgatccagaagatgtggatacgacctacccggataagaagtcaattcttatgtatatcacctcgctttttcaagtccttcctcagcaagtttccattgaggcaattcaagaagtggaaatgcttcccagaccccccaaagtgactaaagaggaacacttccaacttcaccatcaaatgcactactctcaacaaattaccgtcagcctggcacaaggatacgaaaggacttcatcgccaaagcccaggtttaagtcatacgcatacacccaggcagcatacgtcactacctcagatcctactcgttcgccattcccgtcccagcaccttgaagcccccgaagataaatccttcggaagctccttgatggaatcggaagtcaatctcgatcgctaccagaccgcattggaggaagtgctctcgtggcttctgtcggcagaggacactctgcaagcacaaggcgagatttcgaatgatgtcgaagtcgtgaaggaccaatttcacactcacgagggctacatgatggacctgaccgcacaccaagggagggttggtaatatccttcaactgggatcgaaactcatcggaactggtaagctcagcgaagatgaagaaactgaagtgcaggaacaaatgaaccttctgaattcgagatgggaatgcctcagagtcgccagcatggagaagcagtccaaccttcatagagtgctcatggacttgcaaaatcaaaagctgaaggagctgaacgattggctgacgaaaaccgaggagcgcacgagaaaaatggaagaagaacctctcggaccagatcttgaagatctcaaaaggcaagtgcaacagcataaagtgctccaggaggacctcgaacaggaacaggtgagggttaattcgctcacccatatggtagtggttgtggacgaatcctccggagatcatgctacggctgcccttgaggaacagcttaaggttctcggagatagatgggctaacatttgtcgctggactgaagatcgatgggtgctccttcaggacattctccttaagtggcaaagacttactgaagaacaatgcctgttctctgcctggctctcggaaaaagaggatgccgtgaacaagattcatacgaccggttttaaggaccagaacgaaatgctttcgagcttgcagaagctcgcggtgctgaaagcagacttggaaaagaagaagcagagcatgggaaagctgtactcactcaaacaagatctgctgagcacgctcaaaaacaagtcagtcactcaaaaaaccgaggcatggcttgataactttgcacgatgttgggacaacctcgtccaaaagctggagaagtcgactgcccaaattagccaagcagtgaccaccactcaaccttccttgacccagaccactgtgatggaaaccgtgactactgtgactactagagagcaaatcctggtcaagcatgcacaggaagaactcccacctccccctcctcagaaaaagcgccaaatcaccgtggatacgctggaaaggttgcaggaactgcaagaagcgaccgatgagcttgatctcaagctgcgacaggccgaagtgatcaaaggatcctggcagccagtgggagatcttcttattgactcccttcaggaccatcttgagaaggtcaaggcactcagaggtgaaatcgctccacttaaagagaacgttagccatgtcaatgatctcgcaagacagctcaccactctgggtatccagctttcgccctacaatctgtcgaccctggaagatcttaacacccgctggaaacttctccaggtggcggtcgaagatcgcgtcagacagctccatgaggcacatcgtgactttggccccgcgtcgcagcactttctgtcaacgagcgtgcaaggtccctgggaaagagcgatcagccctaacaaagtcccttactacattaatcatgaaactcaaaccacctgttgggatcaccctaaaatgaccgaactttatcagtcgctcgctgatctgaacaacgtgcggttttcagcgtaccgaaccgcaatgaaactgcgacgattgcaaaaagcgctttgtctggatctgctgtcacttagcgccgcgtgtgatgcccttgaccaacataacctgaagcaaaatgatcagcctatggacatattgcaaatcattaactgtctgaccaccatatacgatcgactggaacaggagcacaataacctcgtgaacgtgccgctgtgcgtggacatgtgtctcaactggcttctgaatgtttacgacactggccgcaccggacggatacgggtccttagctttaagaccggaattatctcgctctgtaaggcacaccttgaggacaagtaccgctatctctttaagcaggtcgcctcgtcgactggattttgcgaccagcgcagattgggactgctgcttcatgactcaatacagatcccgcgccagctgggagaagtcgcgtccttcgggggaagcaacattgaaccttcggtcagatcctgttttcagttcgcaaataacaaaccggagatcgaggccgcactgtttttggattggatgcggctcgagccacaatccatggtatggctgccagtgctccatcgcgtggctgcagcagagactgccaagcaccaagcaaagtgcaacatatgcaaagagtgtccgattataggttttagatacaggtcccttaagcactttaactatgatatttgccaaagctgcttcttttcaggcagagtcgctaagggccacaaaatgcattaccctatggtcgagtactgtactcccaccacgtccggggaagatgtgcgcgacttcgcaaaagtgctgaagaataagtttagaactaaaaggtatttcgccaagcacccacgaatgggctacctccctgtccagactgtgctggaaggtgacaacatggaaactgacaccatg

SEQ ID NO: 342868 - DNA, 3591 bp, Artificial Sequence
  derived and/or modified sequence
atgctttggtgggaagaagtggaagattgttacgaaagagaagatgtgcagaaaaagaccttcaccaagtgggtgaatgcgcaattctccaagtttggcaagcagcacattgagaaccttttctcagaccttcaagatgggcggcggcttcttgatctcctcgaaggccttactgggcaaaagctgccaaaggagaagggctcaacccgggtgcacgcgttgaacaacgtcaataaggcactgagggtcctgcaaaacaacaatgtcgatctggtcaacattggaagcactgacattgtggatggaaaccataagctgactttgggactcatctggaacattattctgcattggcaagtcaagaacgtgatgaagaacatcatggcgggacttcagcagactaacagcgaaaagatcctgctttcctgggtgagacaatcaactcggaattaccctcaagtcaatgtgatcaactttactacctcctggtcagatggactcgcacttaatgcacttatccattcccatcgccctgatctttttgattggaatagcgtcgtctgtcaacagagcgccacccaacgccttgagcacgcatttaacattgcaagataccagctcgggattgaaaaacttctggacccagaagatgtggacaccacctacccagacaagaaatcgatcctgatgtacataacgtctcttttccaagtgctgccccagcaggtgtccatcgaagcaattcaagaagtggaaatgctcccaaggccaccaaaggttaccaaggaagaacattttcagctgcaccaccagatgcactattcacaacagatcactgtgtcactcgcacagggctacgaaagaacctcgtcccctaaacccaggtttaagtcctatgcatacacccaggcagcctacgtgaccacttcggatccaaccagatcgccgttcccctcgcagcatcttgaagcgccagaagataagagctttgggtcctcgcttatggaatccgaagtcaatctcgatagataccaaacggcactggaggaagtgctctcctggctgctgtcggccgaagataccctgcaagcgcagggggaaatatccaacgatgtcgaagtggtgaaggatcagtttcacacccatgagggctacatgatggatctgaccgcccaccaaggcagagtcgggaatattcttcagctcggatcgaaacttattgggaccggaaagttgtcggaagatgaggagactgaggtgcaagaacagatgaatctgctgaactcccgctgggaatgtctgcgtgtggcctcgatggaaaagcagtccaacttgcatagggtgctgatggacctgcagaaccagaagctgaaagaacttaacgactggctgaccaagactgaagaacgcactagaaagatggaagaagaaccgctgggtcccgatctggaggatcttaaacgccaggtgcaacaacataaggtgcttcaggaagatctggaacaggaacaagtgagagtgaactcgcttactcatatggtggtcgtcgtggacgaatcgtcgggagatcatgccaccgcagccctcgaagagcaactgaaggtgctgggagacagatgggcaaacatttgcagatggacggaagatcggtgggtgctgcttcaggatatcttgctcaagtggcaaaggcttactgaagaacagtgcctgttctcagcctggctctcggagaaggaggatgcagtgaacaagattcataccaccggatttaaggatcaaaacgaaatgctgtcctcgcttcaaaagctggcagtgctgaaggcagatctggaaaagaaaaaacaaagcatgggcaagctctactcactgaagcaagatctgctgagcactctcaagaacaagagtgtgactcagaaaaccgaggcctggctggataacttcgccagatgttgggataacctggttcaaaaacttgaaaagtccactgcgcagatatcccaagccgtcacgactactcagccctcgcttacgcaaactaccgtgatggaaactgtgactaccgtcactacccgagaacagattcttgtgaaacatgcacaagaggaactcccgcctcctcccccacagaagaagaggcaaattaccgtggataccctggaacggctccaagagctccaagaagcaactgatgaactcgatctgaaactccgtcaagccgaagtcatcaagggtagctggcagccagtgggagatctgctgattgactccctccaggatcatcttgaaaaagtgaaggccctgagaggagaaattgcgccgctcaaggaaaatgtgagccacgtgaatgatctggcacggcagcttaccactctggggatccaactttcgccatacaatctctccacccttgaggacctgaacacgcgatggaagttgctccaagtggcagtcgaggatcgagtgaggcaactgcatgaggcgcacagggattttggacctgcaagccaacatttcctctcgacctcggtgcaaggaccctgggagagagcgatttctccaaataaggtgccatactacatcaaccacgaaactcaaaccacttgctgggatcatcccaagatgaccgagctttaccagagccttgcggaccttaacaacgtacgcttttcggcttaccgcactgctatgaaactgcgtcggcttcaaaaagcactctgtctggatctcctttccctttcggcagcatgtgacgccctggaccagcataatctcaagcagaatgatcaacctatggatattctccagattatcaattgtctcaccaccatttatgatagacttgaacaagaacataacaatctggtgaatgtccccctttgtgtggatatgtgtctgaactggcttcttaatgtgtacgacaccggccggaccggaaggatcagagtcctgtcgtttaagaccggaatcatttcactttgcaaagcccacctggaagataagtaccgttatttgttcaaacaggtcgcgtcgtctacgggattttgtgaccagcggaggctgggacttctgcttcacgattccattcagatacctcggcaactgggagaggtcgcatcattcggcggatcgaacatcgaacccagcgtgcggagctgcttccagtttgccaacaataagccagagatcgaagcagccctgttcttggactggatgagactggaaccacaaagtatggtgtggttgcctgtgttgcatcgcgtggcagccgcagaaaccgcaaagcatcaagcgaaatgcaatatctgtaaagaatgtccgattattgggttccgctacagatcgctgaaacactttaactacgacatatgccagtcgtgcttcttttcgggccgcgtggcaaagggccacaagatgcattaccctatggtggaatactgtactccgacgacctcaggtgaggacgtgcgcgattttgcaaaggtgcttaagaacaaattcagaactaaaagatactttgccaagcaccccagaatgggttacctccctgtccaaaccgtgcttgaaggtgataacatggaaaccgacactatg

SEQ ID NO: 342869 - DNA, 3591 bp, Artificial Sequence
  derived and/or modified sequence
atgctatggtgggaagaggtggaggactgctacgagagggaagacgtccagaaaaaaacatttacaaagtgggttaatgcacagtttagcaagttcggcaaacaacacatcgagaatcttttctcggatctgcaggacggaagaaggcttttggacctccttgaggggctgactggacaaaagctcccaaaggagaagggatcaaccagggttcacgctttgaacaacgtcaacaaagccctgcgcgtgttgcaaaacaataacgttgatctggtgaacatcggctctacagatattgtggatggtaaccacaagctcacactgggccttatttggaacatcatactgcactggcaggtaaaaaacgtcatgaaaaatattatggctggacttcaacaaacgaactccgagaaaatcctgctgagttgggttagacagtctacccgcaactatccacaggtgaacgtgataaacttcacaacctcttggagcgatgggctggccctcaacgccctgattcactcccaccgcccagacttgtttgactggaacagcgtcgtgtgccaacagtcagccacacagcgtctggagcacgcttttaacatcgcacgataccaattaggaatcgaaaaactgttggaccctgaagatgtggacacaacctatcccgataagaaaagtatcttaatgtatataaccagcctgtttcaagttctgccccagcaggtgagcattgaagcaatccaggaggtagagatgctccctcgcccgccaaaggtcacaaaagaagaacactttcagctgcaccaccagatgcactattctcagcaaatcacagtgtccctcgcccagggctacgaacggacgagctctccgaaaccaaggttcaagagctatgcctatacccaagctgcctatgtgacaaccagtgacccaactagatcaccatttccctcacaacacctcgaggccccagaagataagtcttttggtagttccttaatggaaagcgaagtgaatctggataggtatcagacagcacttgaagaggtgttgagctggctccttagcgcggaagataccctccaagcgcaaggcgagatcagcaacgatgtcgaagttgtaaaagaccagtttcatactcacgagggttacatgatggacctgaccgcccaccaaggaagagtcggaaacatccttcagcttggcagtaagctgatcggcactggcaagctgagcgaagatgaggaaactgaggtgcaggaacagatgaaccttctgaacagcagatgggagtgcctgagggttgcaagtatggagaaacaatctaacctgcaccgagtcctgatggaccttcaaaaccagaaactgaaagaattgaacgattggctgacaaaaaccgaggaaaggacacgaaagatggaagaggaaccactggggccagatctagaggatctcaagaggcaagtccaacaacacaaggtcctgcaggaagacctcgaacaagagcaggtccgggtgaactccttgacacatatggtggttgtcgtcgatgaaagcagcggagaccatgctacagccgcacttgaagagcaacttaaggtactgggggatcgatgggctaacatttgtcgttggacggaggataggtgggtgctcctgcaggatatcctgctcaaatggcagaggctgactgaagaacagtgcttattttctgcttggctgtctgaaaaagaagacgcagtcaataaaatccacacaaccggatttaaagatcagaatgagatgctctctagtctgcagaaactggccgtgttgaaggctgaccttgagaagaaaaaacagtccatgggaaaactgtactctctgaagcaagatcttcttagtactctcaaaaacaagagtgtgacccagaaaacagaggcttggctggataacttcgcacgctgctgggacaacctggtccagaaactggagaagtccactgcgcaaatctcacaggcggtgacaaccactcagcctagcctcacccaaaccaccgtcatggaaaccgtgacgaccgttacaacccgtgagcagatcctggtgaaacatgcgcaggaagagctgcccccaccacctccacagaagaaaagacaaatcaccgtcgatactctggagcggctccaggaactccaagaggctaccgacgagctagatctcaagctgaggcaggccgaagtcataaagggaagttggcagcctgtgggggatctgcttatagattctttacaggatcatttggagaaagttaaagcactgaggggagagattgcccctctgaaagagaatgtgagccatgtgaacgatctggcacgccaacttaccactctcgggatccaactgagcccatacaacctgagcaccttggaggatctgaatacgcgatggaagctgctgcaagtggccgtggaagatagggtgagacagctgcacgaggcccaccgtgattttggcccagcctctcaacacttcctgtctactagtgtgcagggtccttgggaacgcgcaatcagccccaataaggtgccatactacatcaaccacgagacgcagactacctgctgggaccatcctaagatgacagaactctatcaaagcctagcagatctgaataacgtgcgcttttccgcttatagaaccgccatgaaactcagaaggctgcagaaggcactgtgtcttgacctgctgtcactctctgctgcttgtgacgctcttgatcagcataacctgaaacaaaacgatcaaccaatggatatactccagatcattaactgtttgacaactatttacgacagactggagcaggagcacaacaaccttgtgaacgtgcctctttgcgtggatatgtgtctcaactggctgcttaacgtttacgataccggccggactggaagaattagagtcctgtcattcaaaactggcatcatctccctctgcaaggcccatcttgaggacaagtacaggtatctgtttaaacaagtcgcctcaagcacagggttttgcgatcaacggcgcttggggcttctactgcatgatagcatccaaattccaagacagctgggcgaagtggctagtttcggcgggagcaacatcgagcctagcgtgcgttcgtgtttccaattcgctaacaacaaacctgagatagaggctgctctttttctggattggatgcggttagaacctcaaagcatggtttggctgccagtgcttcatagggtggctgccgctgagaccgccaagcaccaggcgaaatgcaatatttgcaaagaatgtcctataatcggatttcgttataggagccttaaacatttcaattacgacatctgtcaatcttgctttttcagcggaagagtggcaaagggacacaagatgcattatccaatggtcgaatactgcactcctacaaccagcggagaagatgtgcgtgatttcgctaaagttctcaagaacaaattccgcactaaaaggtacttcgcgaaacatccgcgcatgggctacctccccgtgcagactgtcttggagggcgataacatggagaccgatacgatg

SEQ ID NO: 342870 - DNA, 3591 bp, Artificial Sequence
  derived and/or modified sequence
atgctgtggtgggaggaggtcgaagattgttacgagcgcgaggacgtgcagaaaaagacttttactaagtgggtcaacgcacagttctctaagtttggaaagcaacatattgaaaacctgttctccgatttgcaagacggacggcggctgctcgacctccttgagggattgactggacaaaagttgccgaaggaaaagggatcaactcgggtccatgcgttgaacaacgtgaacaaagccttgagggtactgcagaacaacaatgtggaccttgtgaacattggttcgactgatatcgtggatggcaatcataaacttaccctgggactgatctggaacataattctgcattggcaagtgaagaatgtgatgaagaatatcatggctggactgcagcagaccaactccgaaaagattctcctgagctgggtgagacaatcgacccggaactaccctcaagtcaatgtgatcaacttcaccactagctggtccgacggtctggccctgaatgctctgatccattcccaccggcctgatttgttcgattggaactcggtggtgtgccaacagagcgccactcagcgactggaacacgcatttaacatcgccaggtaccagctgggtatcgagaagctgctggacccggaggacgtggatactacctacccagacaaaaagtcgatcctcatgtacattacttcgctctttcaagtcctgccacagcaggtgtcgatcgaagccatccaagaagtggagatgttgccgcgcccgccgaaggtgacgaaggaggagcactttcagctgcaccatcagatgcattattcgcagcaaattaccgtctcactggcccagggatacgaacggacctcgagccctaagccgaggttcaagtcgtacgcatacacccaggcggcgtacgtgactacttccgacccaaccagatccccgtttccatcccaacatttggaagccccagaagataagtcgttcggctcttcattgatggagagcgaggtcaacctggaccgctaccaaacggctctggaggaagtgctctcgtggctcctctcagcagaagataccctgcaggcgcagggcgagatctcaaatgacgtcgaagtggtgaaggaccagttccacactcatgaaggatacatgatggacctcactgcccatcaggggcgcgtgggcaacatcttgcagctgggatcgaagctcatcggaactggaaaacttagcgaggacgaggaaactgaggttcaggagcaaatgaatctcttgaactcgcgctgggagtgcctccgggtcgctagcatggagaaacaatcgaacttgcatcgggtgttgatggacctccagaaccagaagctcaaggaactgaacgactggctcaccaagaccgaagagagaacgagaaagatggaagaagaacccctgggaccagacctggaagatcttaagcgccaagtgcagcaacacaaggtgctgcaggaagatctggagcaagaacaggtgcgcgtgaactcgctgactcacatggtggtggtggtcgacgagtcgagcggagatcatgctactgccgccctcgaagagcagctgaaggtcctcggggaccgctgggccaatatctgcagatggacggaggatagatgggtgctcctgcaagacatcctccttaaatggcagagactgaccgaagagcagtgccttttcagcgcttggctgtcggaaaaggaggatgcggtcaataagatccacactactggattcaaagatcagaatgaaatgttgagctcgctgcagaagctcgccgtgctcaaggcggacctggagaaaaagaagcagtccatgggaaaactgtactctctgaagcaggatctgctttcgacgcttaagaataagtccgtgacgcaaaagacggaggcatggctggataacttcgcacgatgttgggacaacttggtgcagaaactggaaaaatccactgctcagatctcccaggcggtgactaccacccaaccgtcgctgactcagaccaccgtgatggaaaccgtgacgaccgtgaccactcgggagcaaatcctggtcaagcatgcacaagaagagcttccgcctcctcctccgcaaaagaagagacaaatcactgtcgatactctggagcgcctgcaggagctccaggaagcgaccgacgaacttgacttgaagctcagacaagcagaggtgattaagggatcctggcagcccgttggagatctgctgatcgattcacttcaggaccatctggagaaggtgaaggcccttcggggagagatcgccccgctgaaggaaaatgtgtcccacgtcaacgacctcgcgcgccagctgaccactttgggcatccagctgagcccctacaatctgtcaaccttggaggacctgaatactcgctggaaactcctccaggtggccgttgaagatcgcgtgcgacaactgcacgaggcgcaccgggatttcggacctgcctcgcaacacttcctctcgacctcggtgcaagggccgtgggagcgcgctatcagcccgaacaaagtgccatactacatcaatcacgaaactcagaccacgtgttgggatcacccgaagatgactgagctgtaccagtcgctggccgatctgaataacgtccggttttccgcttaccgcaccgccatgaagttgcgccgcctccagaaggccctgtgcctcgatctgctctccctcagcgcggcgtgcgatgcgctggaccaacacaacctgaagcagaatgatcagcctatggacatcctccagatcatcaattgtctgacgactatctacgaccgcctggaacaggaacacaacaatctggtgaatgtaccactgtgtgtcgatatgtgcctgaactggctccttaatgtgtatgacactggacggaccggcagaattagagtgctgtcgttcaagaccggcattatctccctctgtaaggctcatctggaggacaaatatcgctacctgtttaagcaggtggcctcgtccacgggattctgcgaccagcgcaggctgggactcttgctgcatgattcaatccaaattccgcgccagctgggagaagtcgcctcattcggaggctcgaacatcgagccgtcagtccggtcctgtttccagttcgctaacaataagccagagatcgaagctgcgctgtttctcgattggatgcgcctcgagccgcaaagcatggtctggctcccggtcctgcaccgcgtggctgccgctgagactgcaaagcatcaggccaagtgcaacatctgcaaagagtgccctatcatcgggttccggtaccggtccttgaagcatttcaactacgatatctgccaatcctgttttttctccggcagggtggcaaaggggcacaaaatgcactacccgatggtcgagtactgtactccaaccacctccggtgaagatgtgagagactttgccaaggtgctgaagaacaagttcagaaccaagcgctactttgccaagcatccaagaatgggatacctgccggtgcagactgtgctcgaaggggacaatatggagacggacacgatg

SEQ ID NO: 342871 - DNA, 3591 bp, Artificial Sequence
  derived and/or modified sequence
atgctttggtgggaggaggtagaggattgttacgagcgggaggacgtccaaaagaagacttttaccaagtgggttaatgcgcaattcagcaagtttggcaagcagcacatcgagaacctgttctccgatctccaggatggcaggagactcctggacctgctggagggcctcacaggtcaaaagctccctaaagaaaaaggttccacccgcgtccatgccctgaacaacgtgaacaaggccttgcgtgtcttacagaataataacgttgacctagttaacatcggttccactgacatcgttgatggtaatcacaagctcaccctcggactgatctggaacatcattctgcattggcaggtgaagaacgtcatgaaaaacattatggctggactacaacagaccaactcggagaaaatccttctgagctgggtccgccagtcaactcggaactacccccaggtcaacgtcatcaatttcaccaccagctggtcggatggcctggcactgaacgccctgatccattcccaccgcccggacctgtttgattggaacagtgtggtttgccaacagtctgccacccagagactggagcacgcattcaacatcgcgcgctaccagctcggtatagagaagctcctcgaccccgaagacgtggacaccacctatcccgacaagaagtccatcttaatgtatatcaccagtttgttccaggttctgcctcaacaggtttcgatcgaggccatccaggaagtcgaaatgcttcctcgccccccaaaggtgaccaaggaggaacacttccagctgcatcaccagatgcattactcccaacagatcactgtctccctcgctcaaggttacgagcggacctcctcgcctaagcctcgcttcaagtcctacgcctacacccaggcagcgtacgtgactacctccgaccccacccgcagccccttcccatctcagcacctcgaagcccccgaagacaagagcttcggctccagcctgatggaatccgaggtgaatctcgatcggtaccagacggcgctcgaggaggtgttgtcgtggctgttatccgcggaggataccctacaggcccagggagagatttctaacgatgtcgaggttgttaaggatcagttccacacgcacgagggctatatgatggacctcactgcccaccagggccgtgtgggcaacattctgcagctgggctcgaagcttatcggcactggaaagttgagcgaggacgaggaaacagaagttcaggagcagatgaacctgctgaacagccgttgggagtgtttaagagtggccagcatggaaaagcagtctaatttacaccgtgttctgatggacttacagaaccaaaagctcaaagagctgaacgactggcttactaaaaccgaggaacgaacgcgcaagatggaggaggagcccctgggtcctgacctcgaggacctgaagagacaagtccaacagcacaaggtcttgcaagaggacctcgagcaggagcaggttcgggtcaactcgctgacccatatggtcgtggtcgtggatgagagctccggagaccacgccactgcagccctggaggagcagcttaaggtgttgggcgaccgctgggccaacatctgtcgctggaccgaggaccgttgggtgttgctacaggacatccttcttaagtggcagcgcctgacggaagagcagtgcctcttctcggcttggttgtccgagaaggaggatgcggttaataagatccataccaccggtttcaaggatcagaatgagatgctcagttctctccagaagcttgccgttttgaaggctgatctggaaaagaagaagcagtccatgggtaagttgtatagtcttaaacaggaccttcttagtacgctgaagaacaagagcgtcactcaaaagactgaagcctggctcgataatttcgcacgctgttgggacaacctggtccagaaactggagaagagcaccgcccagatctctcaggccgtcaccaccacccagccgtccctcacccagacgaccgtgatggagacagtcacgaccgtcaccacccgcgagcagattttggttaagcacgcccaagaggagttaccaccccctcctccccagaagaaacgccagatcacagttgatactcttgagcgcctccaggagctccaggaggccaccgacgagctagacttgaagctccgtcaggcagaggtgattaagggctcttggcaaccagtcggcgatctcctgatagactctctccaggaccacctggagaaggtgaaagctctgcgtggtgaaattgcaccgctgaaggagaatgtctcccacgtcaacgatctggctcgacaattgaccaccctaggtatccagttgagcccgtacaacttgtccacccttgaggacctgaacactcgctggaagttactccaggtcgccgttgaggaccgcgtccggcagctgcacgaggctcaccgcgacttcggccccgcctcgcagcacttcctttcgaccagcgtccagggcccctgggaacgtgccataagccccaacaaggtgccctactacattaaccacgagacgcagaccacgtgctgggaccatcctaagatgaccgaactataccagtcgctcgcggacctgaacaatgtccgattctccgcatatcgtaccgccatgaaactccgtcgtctgcagaaggccctgtgtttagacttgttgtctttgtcagccgcttgcgatgccctggaccaacataacttgaagcagaacgatcagcctatggacatccttcagattatcaattgtctgaccaccatctacgaccggctcgagcaggagcataacaacctggtgaacgttcccctgtgcgtcgacatgtgtctgaattggctgttgaatgtctacgacacgggccgcaccggtcgtatccgtgttctctccttcaagactgggattatttcgctgtgcaaggcacacctggaggacaagtaccgctacttgttcaagcaggtcgcatcctcgaccggcttttgcgaccagcgtcggctgggcctccttttgcacgacagtattcaaatcccccgccagctcggtgaggtggcgtcgttcgggggttctaacatcgagcctagtgtgcgtagttgtttccagttcgcaaacaacaagcccgagatcgaggccgcgctgttcttggactggatgcggcttgagcctcagagtatggtttggctgccggtactgcatcgtgtcgctgctgccgagaccgccaagcatcaagcgaaatgcaacatttgcaaggagtgcccgatcattggatttcgatacagatcgcttaagcatttcaactatgacatctgtcagtcttgttttttctcgggccgcgtcgctaagggccacaagatgcactaccctatggtggaatactgtaccccaaccactagcggtgaggatgtacgcgatttcgcgaaggtcctcaagaacaagtttcggactaagcgctacttcgctaagcatccgagaatgggctacctccccgtccagacggtgcttgagggtgacaacatggagaccgatactatg

SEQ ID NO: 342872 - DNA, 3591 bp, Artificial Sequence
  derived and/or modified sequence
atgctctggtgggaagaggtggaagactgctacgaaagggaggacgtgcagaagaaaactttcactaagtgggtcaatgcgcagttctctaaatttggaaaacagcatattgaaaacctattttccgatctccaggacgggcgtagacttttggacctgctggaggggttaaccggtcagaaattgcctaaggagaagggttccactagggtgcacgccttgaacaatgtcaacaaggctttgagagtcctgcaaaataacaatgtggacctggttaacatcggttcaactgacatcgtggatggcaatcataagctgacgcttgggctgatctggaacatcattctgcactggcaagtaaagaatgtgatgaagaacatcatggccggcctgcagcagactaactccgagaagatactgctgtcgtgggtgaggcaaagcacaagaaattatccccaggtgaatgtaataaactttaccaccagttggtccgacggtctggccctcaacgccctgatacactcccatcgacccgatctgtttgactggaattctgtggtgtgccagcagagcgccacccagcgactggagcacgcctttaacatcgcccgttaccagctgggtatagaaaagctcctggatccagaggatgttgatacgacataccccgacaagaaatctattctgatgtacatcacttctcttttccaggtgctgccccagcaagtatctatcgaagccattcaagaagtggagatgctcccccgacctcctaaagtgaccaaagaggagcattttcagctccatcatcagatgcattatagccagcaaattaccgtctccctggcgcaagggtacgagagaacaagctcccccaagccaagattcaagagctacgcttacacccaggcagcctatgtgaccacctcggatcctacacgcagtccgtttcccagccaacacctggaggcaccagaggataagtcctttgggtctagccttatggaatccgaggttaatcttgacaggtatcagacagccttggaggaagttttgagctggctgctgtccgcggaggacacattgcaggctcagggtgaaatcagcaacgacgtcgaagtggtaaaggaccagttccatacccatgaagggtatatgatggatcttacagcacatcaaggcagagtggggaacattctgcagctgggatctaagctgattggaactggtaagctgtccgaagatgaggaaactgaagtgcaggagcaaatgaatcttctgaactccaggtgggaatgcctaagggttgcttccatggagaagcagtccaaccttcacagggtcttgatggatctccagaatcagaaactgaaagaactgaacgattggctgaccaaaacggaagagaggaccagaaaaatggaagaggagccccttggccctgatctggaggatttgaagcgacaggttcaacagcacaaggttctacaggaagatctggagcaggaacaggtgcgtgtcaattctcttacacacatggtcgtggtggtagacgagtccagtggcgaccatgccacggccgcattggaagagcagttgaaggtattgggcgaccgctgggcaaatatttgccgttggactgaagatcgttgggttctgctgcaggatattcttctgaagtggcagagactgaccgaagagcagtgcctcttctcggcctggctgtccgagaaggaggatgctgtgaacaagatccatactaccgggtttaaagatcagaacgaaatgctttctagcctccagaaactggcggtcctcaaagccgatctggaaaagaaaaaacagtccatgggcaaattgtactctctcaaacaggacttgctcagcaccctaaaaaacaaatctgtgactcaaaagaccgaagcctggctggacaacttcgctcgatgctgggacaatctcgtgcagaaattggagaagtccaccgcacaaatcagtcaggccgtaaccactacacagcccagcctgacccagacaacagtgatggaaaccgtgacaactgtgactacccgagaacagattctagtaaagcatgcacaagaggaactaccacctccccccccccaaaagaagcgacaaattacagtggatactcttgagaggctacaggaactgcaggaggctacagacgagttggacttgaagctgagacaggccgaagttatcaaggggtcctggcagcctgttggcgacctgttgatcgactccttgcaggatcaccttgagaaggtgaaggccttgaggggagagattgctccgctgaaggagaatgtgagccacgttaatgatctggcccggcagctgactacgctgggaatccaactgtccccttataatctgagcacgctggaagatctgaacactagatggaaattgctccaggtcgccgttgaagaccgggtacgacaattacacgaggcacacagagacttcgggccggcctctcaacacttcctctccactagtgtgcagggcccctgggaacgcgcaatctcccccaacaaggtaccctattatatcaaccacgaaacacagacaacttgctgggatcaccccaaaatgacagagctctatcagagtctcgcagatctcaacaatgtgcgattctccgcctatcggacggccatgaagcttagaaggctacaaaaggcactgtgcctggatctgctgtcactgagcgcagcttgcgacgcgttggaccagcataatctgaagcagaacgaccagccaatggacattctgcaaatcattaactgtctgacaacaatctacgacagacttgagcaagaacataataacttggtcaatgtccctctgtgcgtggacatgtgtctgaactggttgctgaacgtttacgatacaggtcgaacagggcgcattagagtcctgtccttcaaaactgggataatcagcctttgcaaggcccacctcgaggacaagtataggtacttgtttaagcaagtcgccagctcaactgggttctgtgaccagagacgcctaggccttctgcttcacgattccatccagatacccagacagttaggagaggtagcctcattcggtggatctaacatcgaaccttctgtgagaagctgtttccagtttgcaaataacaagcccgagatagaggctgctctttttctggactggatgcgattggaaccccaatctatggtctggctgcccgtgctgcatagggtggccgccgccgagaccgctaagcaccaggctaagtgcaacatatgcaaggagtgcccaattataggttttcggtatagatcattgaaacacttcaactacgatatctgtcagtcctgttttttcagcggccgggtcgccaaaggccataaaatgcattatccaatggtggaatactgcacacccactaccagtggggaggacgtgagagatttcgctaaggtcctgaagaataagtttagaacgaagcgatatttcgcgaagcacccaagaatgggttacctcccagtgcagaccgtgttagaaggagacaatatggagacagatactatg

SEQ ID NO: 342873 - DNA, 3591 bp, Artificial Sequence
  derived and/or modified sequence
atgttgtggtgggaagaagttgaggattgttacgaaagagaagacgtacaaaagaagacttttaccaaatgggtgaacgcgcaattttcaaagttcggcaaacagcatatcgagaacttgttcagtgatcttcaggatggtcgtaggctgctagatctcttggaagggttaaccgggcagaaattgcctaaggaaaaaggttcaactcgtgttcatgcgcttaataacgtcaacaaggcgcttagggtgctacagaataacaatgtggatcttgtgaacatcggaagcacagatattgttgacggtaaccataagctcaccctaggactcatttggaacatcattcttcattggcaagtcaagaatgttatgaagaatattatggccggtctacaacagactaactcagaaaagattttactatcatgggtacgccagtcaactagaaattacccacaggttaatgtgataaatttcacgacttcatggagcgatggtcttgctcttaatgcgctaattcactctcatcgacctgacctattcgactggaattctgtcgtgtgtcaacagtctgcgacccagaggcttgagcatgcatttaacatcgcaagatatcaattgggaattgaaaagttgctcgaccccgaggatgtggatacaacatatcctgacaagaagtctatccttatgtacatcacatcccttttccaagttctgcctcaacaggttagcattgaggcaattcaggaggtagagatgctacctcgtccaccaaaggtcacgaaagaggaacattttcagctccaccaccagatgcattattcacaacagattaccgtgtcacttgctcaaggatatgaaaggacctctagcccaaagcctagatttaagtcttatgcttacacacaggctgcttatgttactacttcagatcctactagaagtccgttcccgagccagcatctcgaggctccagaagataagagcttcggtagctcgttgatggagtcagaggttaatcttgatagatatcaaacagctcttgaagaagtgctttcatggttattatccgccgaggatacactgcaggctcagggagagatatctaatgatgtggaggttgttaaggaccaatttcatacacatgaggggtacatgatggatctgactgcacatcaaggtagagttggcaacatattgcaattgggtagtaagttaatcggaacaggcaagctctcggaagatgaggaaaccgaagtacaagagcaaatgaatctacttaacagccgttgggagtgtttgagggtcgcttctatggagaaacagtcaaatctccatagagttctgatggatttgcaaaatcaaaaattgaaggaactgaatgattggcttacaaagactgaagagaggactcggaaaatggaagaggaacctctcggacctgacctcgaagatctcaagagacaagtccaacagcacaaggtccttcaggaagatctcgaacaagaacaggttagagttaacagtttgacacacatggtggttgttgttgacgaatcctcgggagaccacgctaccgcagctttagaggaacagttgaaagtactcggggatcgatgggcaaacatttgccgatggaccgaagatcggtgggttctactccaagatattcttctaaaatggcaacgactcactgaggagcagtgcctcttttcagcatggttgtccgagaaggaggacgctgttaacaaaattcatacaaccggatttaaggatcaaaacgaaatgttaagttccctccaaaagctagcagtgttgaaggccgatcttgagaaaaaaaaacaatctatgggaaagctttattcgttgaagcaggatttactttcaactttaaagaataagtctgttactcaaaagactgaggcttggctcgacaacttcgcgcggtgttgggataacctcgtccagaagttggaaaaatctacagcacaaatctcccaggctgttaccactactcaaccatcgctcactcagacaacggttatggagactgtaactactgtaacgacaagggaacaaattcttgtgaaacatgcccaggaggaattacctcctccaccaccacaaaagaagcgacaaatcactgttgatactcttgaaagattgcaggaattacaagaggcaacggatgaactcgatctcaaattgcgacaagctgaggtcattaaaggtagctggcaaccagttggagatcttctaattgactctttacaggaccatcttgagaaggttaaggctcttagaggtgaaatcgctcctctcaaggagaatgtcagtcatgtcaacgatcttgctaggcaacttaccacgctgggcatccagctgtctccgtacaatctcagcacattggaggatttgaatacccgctggaaactgcttcaagtggctgttgaggacagggtcagacaattgcatgaggctcatcgcgattttggacctgcatctcaacatttcctgtctacatcagtacaaggtccatgggaacgtgctatcagtcctaataaggttccttattacattaatcatgaaacacagacaacttgctgggatcacccaaaaatgactgagctgtaccaaagcttagccgatctgaataacgtgagattcagcgcttatcggacggcaatgaagctcagaagactgcagaaagcattgtgccttgaccttcttagcctctccgcagcttgcgatgcccttgatcagcataatcttaagcagaacgaccaaccgatggacatacttcagataatcaattgtctaacaactatttatgatcgattggagcaggaacataataacttggttaacgtacctctgtgtgttgatatgtgtctcaattggttactgaacgtgtacgacactggaagaacagggagaatacgtgttctgtcattcaaaactgggatcatcagtctttgtaaagcacacctggaggacaaatacaggtacctttttaagcaagtcgcttcctcaacaggattttgcgatcaaaggaggcttgggcttctgcttcatgacagcattcaaattccaagacaacttggtgaagtagcctcatttggaggttcgaatattgagccatcagtcaggtcatgcttccagttcgccaacaacaagcctgaaattgaagccgctttgttcctagattggatgcggttggagcctcaatctatggtttggttgcctgttttacatagggtagctgcggcagagactgctaaacatcaggctaagtgtaacatctgtaaggaatgtcctattattgggtttcgatatcgtagcctgaaacacttcaattatgatatctgccaatcatgttttttctccggtagggtggctaaaggtcacaaaatgcattacccaatggttgaatattgtactccgaccaccagcggtgaagacgttagagactttgctaaggtcttgaaaaataagtttcgaacaaagcgttatttcgcgaaacacccaaggatgggctatctcccagttcaaaccgtgctggaaggagacaatatggagacagatactatg

SEQ ID NO: 342874 - DNA, 3591 bp, Artificial Sequence
  derived and/or modified sequence
atgctctggtgggaggaagtcgaggattgttatgaacgcgaagatgtccaaaagaaaacctttaccaaatgggtgaatgcacagttttcgaagttcggaaagcaacatatagaaaatcttttctccgatttgcaagatggcaggcgacttctcgaccttctggaaggtcttaccggccagaagctccccaaggaaaaaggatccactagggtccatgcacttaacaacgtgaacaaggcacttcgcgtgctccagaacaataacgtggatctggtgaatatcggcagcaccgacattgtggacggtaaccataagttgacgctgggacttatctggaacattatcctgcattggcaggtgaaaaacgtgatgaaaaacatcatggccggacttcagcaaacgaactcggagaagattctcctgtcatgggtccggcagtcgaccaggaactaccctcaagtgaacgtcattaactttactaccagctggagcgatggcctggccctgaacgcactgatccatagccatcgcccagatctttttgactggaactcggtggtgtgtcagcaatcggcaactcaacggctcgagcacgcgtttaacattgcacggtaccaactgggaatagaaaaactcctggaccccgaggatgtggatactacctacccagataagaaatccatcttgatgtacattacttctctgttccaagtgctcccacaacaagtgagcatcgaagcaatccaagaggtggaaatgcttccaagacccccaaaagtgaccaaggaagagcatttccaacttcatcatcagatgcattattctcaacaaattaccgtctccctcgcccagggatacgaacgtacttcgagcccaaaaccgcgcttcaagtcatacgcctacactcaagcagcatacgtgacgacctcggatcctactcgttcaccattcccttcgcaacatctggaagccccggaagataagtcctttggctcgtccctgatggaatcagaggttaacttggataggtaccagactgcgctcgaagaagtgctgtcctggctcctcagcgcagaagatacccttcaagcccagggggaaatcagcaacgacgtggaagtggtcaaggatcaatttcatacccacgaaggctacatgatggatctgaccgcgcaccaaggaagggtggggaatattcttcaacttggatccaaactgattggaacgggcaagctgagcgaggacgaggagactgaagtgcaggagcagatgaaccttttgaacagccgctgggagtgtttgagagtggcatcgatggaaaagcaaagcaacctccacagagtcctcatggacttgcagaaccaaaagctgaaggagcttaacgattggctgaccaagaccgaagaaaggaccagaaagatggaagaagaaccactcgggcctgatcttgaggatcttaagcgtcaagtgcagcaacataaagtgctccaagaggacctggaacaagaacaggtccgagttaattccctgacccatatggtcgtggtcgtcgatgaatcgtccggtgatcatgcaaccgcggccctcgaagagcaactcaaagtgctgggcgaccgttgggcaaacatctgccgatggaccgaagatagatgggtccttctccaagatatcctgcttaaatggcaacggctgaccgaggagcagtgtctgttttccgcatggctgtcggaaaaggaagatgccgtcaacaagattcacactactggattcaaggatcagaacgagatgctgtcatctctgcagaagctggcagtgctgaaggcagatctggagaagaagaagcaaagcatggggaagctctacagcctgaagcaagatctgctgtcaactctcaagaacaagtccgtcacccaaaagaccgaagcctggctggacaattttgctcgttgttgggacaacttggtccaaaaactggaaaaatctaccgcacagatctcacaagcggtgaccaccacgcaaccatcacttactcaaaccaccgttatggagactgtgaccacggtgactaccagagaacagattcttgtgaagcacgctcaggaggaactccctccacccccaccgcaaaagaagcgccagataactgtggatactcttgagcgactgcaggagcttcaggaagccaccgatgagcttgatctgaaacttaggcaagcagaagtcattaaaggttcctggcaacctgtcggtgaccttttgatagactctcttcaagaccatctggagaaggtcaaggcgttgagaggggagattgcgcctctgaaggaaaacgtgtcccacgtcaatgacctcgctagacaactgactaccctcggcattcagctcagcccgtacaacctctccacccttgaagatctgaacaccaggtggaaactgctccaggtggcagtggaagatcgcgtgagacaactgcacgaagcacatagagacttcggacctgcatcgcaacatttcctttccacgtccgtgcagggcccttgggagagagcaatttcacctaataaggtgccctactacattaaccatgaaactcaaacgacctgttgggatcatccaaagatgactgaactgtaccaatccctggccgatctgaacaatgtgagattttcagcataccgtactgccatgaagctccggcgattgcagaaggccctctgcctcgacctgctgtcattgtccgcagcatgtgacgcactggatcaacataatctgaagcagaatgatcagcctatggatattctgcagattatcaactgtctgaccaccatatacgataggctggagcaggagcataacaatcttgttaacgtgcctctgtgtgtggatatgtgccttaactggctcctgaacgtgtacgatacgggaaggactggaaggattcgggtgctttcgttcaagaccggtatcatttcgctttgtaaagcgcatctcgaagataagtatcggtacctgtttaagcaggtcgcaagctccactggattttgtgatcaacgccggctgggtctgcttttgcacgattccatccaaattcctcgacaactcggggaagtcgcatcgttcggagggtcaaatatcgaaccttcagtccgatcgtgttttcagtttgcaaacaacaagcccgaaatcgaagcggcgctttttctcgactggatgcggctcgaacctcagtcgatggtctggcttccagtgcttcatcgcgtcgcggcagctgagacggcaaagcatcaggcaaagtgtaacatttgcaaggaatgtccgataattggattcaggtacagatcccttaagcacttcaattacgacatttgtcagtcctgttttttcagcggcagagtggcaaagggtcataagatgcattatccaatggtggaatactgcaccccgaccacgtcaggcgaagatgtgagagattttgcaaaagtgctgaaaaacaagtttcgcaccaagcgctattttgccaagcaccctagaatgggatacctgcctgtgcaaaccgttctggaaggagacaacatggaaactgacacgatg

SEQ ID NO: 342875 - DNA, 3591 bp, Artificial Sequence
  derived and/or modified sequence
atgctttggtgggaagaagtggaggactgttacgaaagggaagatgtccagaaaaagacctttaccaagtgggtgaacgcacaattttccaagtttgggaagcagcatattgaaaacctgtttagcgatctgcaggatggcaggcggcttctcgatctcctcgaaggccttactgggcaaaaacttccaaaggagaaaggttccacccgagtgcatgctctgaataatgtcaacaaagcactgagagtgctgcagaacaacaacgtcgacctggtgaatatcggatcgactgacattgtggatggtaaccacaaactgaccctcggattgatctggaatatcattctccattggcaagtcaagaatgtcatgaagaacattatggcaggactccaacaaaccaactcggaaaagattcttctgagctgggtgcggcaaagcaccagaaactacccgcaggtgaatgtgattaacttcacgacctcctggtcggatggtcttgcactcaacgcgcttattcattcgcacagacctgatctgttcgattggaactccgtcgtgtgtcagcagtcagcaacccagaggctggaacacgcctttaacatcgcacgctaccagctcggaatcgagaaacttttggatcccgaagatgtggataccacctaccctgacaagaagtcaattctgatgtacattaccagcctttttcaagtccttcctcaacaggtgtccatagaggcaattcaggaagtcgaaatgcttcctaggcctcccaaggtgactaaagaagaacattttcaactgcatcaccaaatgcattactctcaacaaataaccgtctcccttgcccaaggatacgagcgtacttcatcccctaagcctaggtttaagtcgtacgcttacacccaggcggcatacgtgacgacgtcagatccaacgagatcaccattcccatcgcagcatctggaagcacctgaagataagtcctttggttcgtcacttatggagtcagaagtgaaccttgatcgttaccaaaccgcgcttgaggaggtcctgtcgtggctgctctcggcagaggataccctgcaagcacagggagaaatttccaacgacgttgaggtggtgaaggatcaatttcatactcatgagggatacatgatggatctgaccgcacatcaaggccgtgtgggcaacatcttgcaactgggtagcaaacttattggaaccggaaagctgagcgaagatgaggaaacggaggtgcaggagcaaatgaatctgctgaactcccgctgggaatgcctgagagtggcaagcatggaaaagcaatccaatcttcacagagtgctcatggatctgcaaaaccagaaactgaaggagctgaatgattggcttaccaagaccgaggaacgtacccggaagatggaagaggagccactggggcctgatcttgaagatttgaaacgtcaagtgcaacaacacaaggtccttcaagaggacctggagcaagaacaagtacgcgtaaactcgcttacccacatggtggtcgtggtcgatgagagcagcggcgatcatgcaaccgccgcgctcgaagagcagctgaaagtgcttggtgaccgctgggcaaatatctgtcgctggactgaagatcgttgggtgcttttgcaggatatactgctcaagtggcagagactgactgaagaacagtgtctgttctcagcatggctctcggaaaaggaggatgcagtcaacaagattcacactactgggttcaaggaccaaaatgaaatgttgtccagccttcaaaagctcgcagtcctcaaggctgacctggaaaagaagaagcagtcaatggggaaactgtactcccttaaacaagatcttctctcaaccctgaagaataagtcagtcactcaaaagacggaggcgtggctggacaactttgccaggtgttgggataatcttgtccagaaactggaaaagagcactgcacagatctcgcaagcagtgaccaccacccagccgtcgcttactcaaaccactgtcatggaaaccgtcaccactgtgacgactagagaacagatcctcgtgaagcatgcacaggaagaactgccaccaccacctccacagaaaaaacggcagataaccgtggatactcttgaacgtctccaagaacttcaagaagcaaccgatgagctcgatctcaagctccgccaggcagaggtgattaaggggtcctggcaacccgtgggagacttgcttattgacagccttcaagaccatctcgaaaaggtcaaggcgctgagaggtgaaatcgcacctttgaaggagaatgtgtcacatgtgaatgatctggcgcggcagctcaccaccctgggcattcagctttccccctacaaccttagcacgctggaagatcttaacacgagatggaagctcctccaggtggcagtggaggatagagtgaggcaactccacgaggcacatcgggattttggccccgcatcgcaacacttcctgtcgacctccgtgcagggaccatgggaacgggcaatttcgcctaacaaagtcccttattacattaaccatgaaacccaaactacctgctgggatcatccaaagatgaccgaactctaccaatcacttgcagatttgaacaatgtgcggttttccgcgtaccggaccgcaatgaagctccgaaggcttcagaaggcgctctgtctggatcttctgtccctgtctgcggcatgtgacgcccttgatcaacataatcttaagcaaaatgatcaacctatggatattctccagatcataaactgtctgaccactatttacgatcgtctcgaacaagaacataacaatcttgtgaatgtgccactgtgcgtcgatatgtgtttgaactggctccttaatgtgtacgatactggacgcactggtagaatcagagtgctgagctttaagactgggatcatctcactctgtaaagcacacctcgaggacaaataccgctacctgttcaagcaagtggcgtcgtccacgggcttttgtgatcagagaaggcttggcctgctgcttcacgattcgatccaaatccctcgacaactcggcgaagtggccagctttggcggttcaaacattgaaccatcggtgcggtcctgcttccaattcgcaaataacaagccggaaatcgaagcagccctgtttctggattggatgcggctggagcctcagtcgatggtgtggcttcccgtactccatagagtcgcagcagcagagactgccaagcatcaggccaagtgtaacatatgtaaggagtgtccgatcattggttttcgctacaggtcgctcaaacacttcaattacgatatttgccaaagctgctttttcagcggccgcgtggcgaaagggcacaagatgcattatcccatggtggaatactgcactcctactacttccggggaagatgtcagagatttcgcaaaggtcttgaagaacaaatttcggaccaaacgctattttgcaaaacacccgaggatgggttaccttcctgtgcagactgtccttgaaggggacaatatggagactgataccatg

SEQ ID NO: 342876 - DNA, 3591 bp, Artificial Sequence
  derived and/or modified sequence
atgctctggtgggaagaagtcgaggattgctatgagcgagaagatgtacagaaaaaaacatttactaaatgggttaacgcacagttttctaaattcggaaaacagcacatcgaaaacctgttcagtgatctgcaagacggacgacggctgctagacctcttagagggactcacagggcagaaacttccaaaggaaaaggggtccacaagggtccatgcccttaataacgtaaacaaggcactccgcgtcttgcagaacaacaacgtcgacctcgtgaacatcgggtccacagatatagtcgatgggaatcacaaactgactctcgggttgatctggaacataatattgcattggcaggtgaaaaacgttatgaaaaatataatggcaggacttcagcagacaaatagtgagaaaatccttctctcctgggtccggcagtctactaggaactatccacaggtgaacgtgataaattttactacatcatggtccgatgggctcgcccttaatgccctcatccattctcacaggcctgatctgtttgattggaactccgtagtctgccaacagtcggccactcagcggttagaacacgcctttaacatagcccggtatcagctggggatagaaaaactccttgatcccgaagatgtcgatacaacataccccgataaaaaatccatcttaatgtacatcacatcactatttcaagtgcttccccagcaggtctctatcgaggccatccaggaagttgaaatgcttccacgaccacctaaagtgacgaaggaggaacacttccagctacatcaccagatgcactactcacagcagataactgtgtccttagcccaggggtatgaaaggactagttctcccaaacctcggtttaagagttatgcctatacacaggcagcttatgttacaacttcggatcctactaggtctcccttcccctctcagcatttagaagccccagaagataaatccttcggatctagtctaatggagagtgaagtaaatctcgaccggtaccagacagctctagaagaagtcctctcttggctactgagtgcagaagacacactccaggcccagggagagataagtaacgatgttgaagtggtcaaagatcagttccatacacacgaaggatacatgatggatctgactgctcaccagggaagggtagggaatatactccagcttgggtctaagctcatagggactggaaaactgtccgaggatgaagaaacagaagtacaagaacagatgaacctcttaaactctcggtgggaatgtctccgagtagcttctatggaaaaacagagtaaccttcatagagtccttatggatctacagaatcagaaactcaaagaattaaatgattggctcactaaaacagaagaacgaacacggaaaatggaagaagagcctcttggaccggatttagaagacctgaaaagacaggtacaacagcacaaggtcctgcaggaggacttggaacaggaacaggtgagagtgaactccctcacacatatggtcgtagtcgtggatgaatcttccggagatcacgccactgcagcactggaagaacagctcaaggtccttggagataggtgggcaaacatctgtcgctggactgaagatcggtgggtgctgctgcaggacatactgctgaagtggcagcgcttgacagaagaacagtgcctcttttcggcatggttatccgaaaaagaagatgcagtgaacaaaatacatactacagggttcaaagatcagaatgaaatgctgtcttcccttcagaaactcgcagtgctcaaagccgatctggaaaaaaaaaaacagtccatggggaaattatactcactcaaacaggatctcctgagtacactcaagaacaaaagtgtgacacaaaaaactgaagcctggctcgacaacttcgcaaggtgctgggacaatcttgtgcagaaactggaaaagagtactgcacagatctctcaggccgtcacaacaactcagcccagtttaacacagacaactgtaatggaaacggtaacaactgttacaacacgagaacagatactggtgaaacatgctcaggaagaactccccccaccaccaccacagaagaaaagacagatcactgtagatactctggaaagactgcaggaactccaggaagcgactgacgaacttgatctcaaattaagacaggcagaagtgataaagggatcttggcagcccgtaggggaccttctgattgacagtctccaagatcacctcgaaaaggtcaaagctttacggggagagatagcaccattgaaagaaaatgtttcacacgttaatgatctagctcgccagctcacaacactgggaatacagctttccccttataatttatctactctcgaagatcttaacacacgatggaaactgctacaggttgccgttgaagatcgagtccggcagcttcacgaggcccaccgggattttgggccagcttcacagcatttcctttccacgtccgtgcagggaccctgggaacgagcaatctccccaaataaagtgccatattatatcaaccacgagacacagactacatgctgggatcatcccaagatgacagaactctatcagagtcttgctgatctgaacaacgtgaggttctctgcctatcggacagctatgaaactccggaggctacagaaagcactatgcctggatctgttatctctgtctgccgcatgtgatgcacttgatcagcacaaccttaaacagaatgatcagccaatggatatcctgcagatcataaactgtctcactactatttacgatcgactagaacaggaacacaacaacctcgttaacgtgcccctgtgcgttgatatgtgcctgaattggctcttgaacgtgtatgatacagggcgcactggaaggatccgggtgttatcattcaaaacaggaataatatccctctgcaaagctcatctggaagataagtaccggtatctgttcaaacaggtggctagttctacagggttttgtgatcagcgccgtctggggctgcttttacatgactcaatacagataccccggcagttgggggaagtggcatcgttcggagggtctaacatcgaacccagtgtcaggtcttgtttccagtttgctaataacaagccagagatcgaagcagctttgtttttagactggatgagattggaacctcagagtatggtctggctccccgtcctccaccgagtggccgcggcggaaacagctaaacaccaggccaagtgcaacatttgcaaggaatgtcccatcataggatttcgctacagatctctgaaacactttaattatgatatatgccaatcgtgttttttttcaggaagagtggcaaaggggcataaaatgcattaccccatggtagaatattgcacacctactactagtggggaagatgttagagattttgccaaagttctcaaaaacaaattccggacaaaacgctatttcgccaaacaccccagaatgggatacctcccagtgcagactgtgttagaaggagataacatggaaacagacacaatg

SEQ ID NO: 342877 - DNA, 3591 bp, Artificial Sequence
  derived and/or modified sequence
atgttgtggtgggaagaggtcgaggactgttatgaaagggaagatgttcagaaaaagacgttcaccaagtgggtgaacgcccaattctcaaagttcgggaaacaacatatcgagaacctgttctccgaccttcaagacggacgaaggctcctggaccttctggagggactcacgggccagaaattgcctaaggaaaagggcagcaccagggtgcatgccctgaataacgtgaacaaggctctgcgggtgctgcagaacaacaatgtggacctcgtcaatatcggatcaactgatatcgtggatggaaatcacaagctgacgctgggcctgatttggaacatcatcctgcactggcaagtgaagaacgtgatgaagaatatcatggccggcctgcagcaaactaattccgaaaagatcctgctttcctgggtacggcaatcgacccgcaactacccgcaggtgaatgtcatcaacttcaccacctcctggtcggatgggctggcccttaacgcactgatccattcacaccggccggacctgttcgactggaactccgtcgtgtgtcagcagtcggccactcaaaggctcgaacacgcgtttaacatagcgaggtaccagctcggcatcgaaaagctgctcgacccggaggacgtggacactacctacccggacaagaaatccatcctgatgtacattacctccctgtttcaggtgttgccgcaacaagtctcgatcgaagcgatccaagaggtggagatgcttccgcgccctcccaaagtgactaaagaagaacatttccagctgcaccaccaaatgcattactcacaacaaattactgtgtctctggcccaggggtacgagcgcacttcgtcccctaagccgagattcaaaagctacgcatacacgcaggctgcgtacgtcaccacgtccgacccaacccggagcccgttcccatcccaacacctggaggcgccagaagataaatcatttgggagctcactcatggaatcggaagtgaatctggacaggtaccagaccgcgttggaggaggtgctgagctggctcctctcggcagaagatacgcttcaagcccagggagaaatttcaaacgatgtggaagttgtgaaggatcaattccatacccacgagggatacatgatggaccttactgcgcaccagggacgagtgggtaatatcctccagttggggtcgaagctcatcggtaccggaaaactttccgaggacgaggaaaccgaggtgcaggagcaaatgaacctcctgaactcccggtgggaatgcctgcgcgtggcctccatggagaagcagagcaatttgcaccgggttctgatggacctccagaatcagaagctgaaggaactgaatgactggttgaccaaaacggaggaacgcacccggaaaatggaagaagagccgcttggaccggatttggaggaccttaagcggcaagtgcagcaacacaaagttctgcaggaggacctcgagcaagaacaagtgcgggtgaactccttgacgcatatggtcgtcgtggtggatgagtcctcaggcgatcatgccactgctgctttggaagaacagttgaaagtgctgggcgataggtgggcgaacatttgtcggtggactgaggaccgctgggtcctgctccaagatatcctcctcaaatggcagaggctcaccgaggagcaatgcctgttttctgcctggctctcggagaaagaggacgctgtgaacaaaatccataccactgggttcaaggaccagaacgagatgctgagctcacttcagaagctggccgtgctcaaggcggatttggagaagaagaagcaatccatgggaaagctgtacagcctgaaacaggatctcttgtcaactttgaaaaacaagagcgtgacccagaaaactgaggcgtggctggataacttcgcgcggtgctgggacaatcttgtccagaaactggaaaagtcaactgctcagatctcccaggccgtgacgactactcagcctagcctgacccagactactgtgatggaaaccgtgactactgtcaccaccagggagcagatcctggtcaagcacgcccaggaagaacttccgcctcctccgccccagaaaaagagacaaattaccgtggataccctggagcggctgcaggaactgcaagaagccaccgacgaactcgacctcaagctgagacaagctgaggtgatcaaggggagctggcagccagtgggggacctgctgatcgactcgctgcaggaccacttggagaaggtgaaggcactgcgaggcgagatagcccccctcaaggagaatgtctcacatgtgaatgacctggcccgccaactcaccaccctgggaatccagctgagcccgtacaatctgtccactctggaagatctgaacaccagatggaagctcttgcaagtcgccgtggaggaccgggttcggcagctgcatgaggcacaccgcgattttggacccgctagccaacactttctctcgacctcggtgcagggaccgtgggaacgcgccatcagcccaaataaggtgccgtactatatcaaccacgaaactcagaccacttgctgggatcatccaaagatgaccgagttgtaccagagcctggcggacttgaataacgtgcgcttcagcgcataccgcaccgcgatgaagttgagacggctgcagaaagccctctgtctggacctcctgtccctctccgcggcctgcgatgccctggaccaacataatcttaaacagaacgatcagccaatggacattctccagatcatcaactgcctgaccaccatctacgacagactcgagcaggagcacaacaacctggtgaacgttccgctttgcgtagacatgtgcctcaactggctgctgaatgtgtacgataccggccgcactggacgcattagggtcctgtcgttcaaaacgggaatcatctccctgtgcaaagcccaccttgaggacaaataccgctatctgtttaagcaggtggcttcctccaccggcttctgcgatcagagacggttgggactgctgctccacgattcgatccaaatccctcgccagcttggagaagtggccagcttcggaggatccaacatcgagccgtctgttcggtcctgcttccaattcgccaacaacaagcccgagattgaggccgcactctttctcgattggatgcggctcgaaccccagtccatggtatggcttccagttttgcaccgcgttgctgccgcagagactgcgaagcaccaagccaagtgcaacatttgcaaggaatgtcctattatcggttttagatacagatccctcaaacatttcaattacgacatctgccaaagctgctttttctcgggtcgggtggcaaagggacacaagatgcattacccaatggtcgaatactgtaccccgacgacttcaggagaggacgtgagggactttgctaaagtgctgaagaataagttcaggactaagcgctactttgccaagcacccccgcatggggtacctcccagtccagacggtcctcgaaggagacaatatggagactgacactatg

SEQ ID NO: 342878 - DNA, 3591 bp, Artificial Sequence
  derived and/or modified sequence
atgttatggtgggaggaagtggaagattgctatgaaagggaagacgtccagaaaaaaacattcacaaaatgggtaaacgcacaattctcaaaattcggaaagcagcatatagaaaacctctttagtgatctgcaggatgggagaaggctgctggatctgctcgaagggctaacgggacagaaactgcctaaagagaaagggtctactagggttcacgccctaaacaacgtaaacaaggctttacgcgtgctacagaataataatgttgatctagtgaacataggatcgacagatattgtagatgggaatcataaactcacactgggactgatctggaacataatactacactggcaggttaaaaacgtcatgaaaaacataatggctgggcttcagcagactaactcggaaaaaatcctcctctcctgggtgaggcagtctacaagaaattatccacaggtcaatgtgatcaactttacgacatcttggtctgacggactggcgctcaatgctcttatacactctcatcgccccgatctgtttgattggaattcagtggtgtgccagcagtcggctacacaacgacttgaacatgcctttaatatagcacggtatcagctggggattgaaaaactacttgatcctgaagatgtggatacaacttatcccgataagaaaagtattcttatgtatatcacttccttgtttcaggtgctccctcagcaggtttcaattgaagcaatccaggaagtggaaatgctgccccgcccacctaaagtgactaaagaagagcacttccagctgcaccaccagatgcactactctcagcagatcacagtgtccctggctcagggatatgaaaggacatcatcgcccaaaccacgctttaagtcctatgcttatactcaggccgcttacgtcacgacatcggatcccacacgatcccctttccctagtcagcatcttgaagcccccgaagataaatctttcgggtcttctttgatggaatccgaagtaaatctcgatagatatcagacagctctggaggaagtcctatcatggctcctgagtgcggaagatactcttcaggctcagggggaaatatccaatgatgtagaagtcgtcaaagatcagtttcatactcatgaagggtacatgatggacctcacagcccaccagggacgggtcggaaacattctgcagctgggatctaaactgattgggactggaaaactctctgaagacgaagaaactgaagtgcaggagcagatgaatttgctcaatagtaggtgggagtgtctgagggtggcaagtatggagaaacagagtaatcttcacagggttttaatggatctacaaaatcagaaactaaaagaactaaacgattggctgactaaaacagaagaaagaactcggaaaatggaggaggagcccctggggcctgatctcgaagatttaaaaagacaggtccagcagcataaagtcctgcaggaagatctggagcaggaacaggtacgcgttaacagtctcactcacatggtggttgtggtcgatgaatcatctggggatcatgcaactgctgctttggaagaacagttaaaagtgctcggagatcgatgggccaacatttgcaggtggactgaagacaggtgggtacttctgcaggatattcttctgaaatggcaacggctgacagaggaacaatgcctttttagtgcgtggctctccgaaaaagaagatgctgtgaacaagattcatacaactggatttaaagatcagaacgaaatgctctcatcacttcagaaattggcagtcctcaaagccgatcttgagaaaaaaaaacaatccatgggaaaattgtattctcttaaacaggatcttttgtctactctcaaaaacaaatccgtgactcagaaaactgaggcatggctcgataacttcgcccgctgttgggataatctggtccagaagctagaaaagtccacagcccagattagtcaggcagttactactacacagccatctctgacacagacaactgtgatggaaacagtcactacagtgacaacacgggaacagattctcgtaaaacatgcccaggaagaacttcctcccccacctccccagaaaaaacgacagatcactgtagatactctggaacgcctacaggaactccaggaagccacagatgaacttgacctcaaacttcggcaggcagaagtgataaaagggtcttggcagcctgtgggagatttgctgatcgactctctccaggatcacctcgaaaaagtaaaagcacttcggggggagatagctcctctaaaagagaatgtatcacacgtgaatgatcttgcacggcagctcactactcttggaatacagctatccccatataaccttagtactttagaggatctcaatacacgatggaagctgctgcaggtggcggtagaagatagagtgcggcaactccacgaagcccatagggactttggacccgcatctcaacactttctgtcaacaagtgtgcaggggccttgggaacgcgccatttccccaaacaaagtgccttattatatcaaccacgaaacacagactacttgttgggatcacccaaagatgacagagctctatcagtcccttgccgatcttaataacgtcaggttctctgcttataggacagccatgaaactccgccgcttacagaaagccctttgtctcgatcttctgtcactgagtgcagcatgtgatgctttggaccagcacaatctcaaacagaatgaccagcctatggacatcctccagatcattaactgtcttactacaatttacgatcggctagaacaggaacataacaatctcgtaaatgttcccctgtgcgtggatatgtgcttaaactggctgctcaatgtatacgacacagggaggacaggacgaatccgggtcctcagtttcaagactggaatcatatctttatgtaaagcacatctggaagataagtaccggtatcttttcaaacaggtcgcgagttctacagggttctgcgatcagagaaggctcgggcttctgctgcacgacagtattcagatccctagacagcttggggaagtcgcatccttcggaggatctaacatcgaaccctctgttaggtcctgcttccagttcgcaaataataaacccgaaatagaagctgctctcttcctcgattggatgcggctcgaaccccagagtatggtgtggctgcccgtgcttcaccgagtggccgcagcagaaactgccaaacaccaagctaaatgtaatatctgcaaagaatgcccaatcataggattccggtatcggtcccttaagcactttaactatgatatttgtcaatcatgcttcttcagtggacgggtagctaaaggacacaagatgcactatccaatggtcgaatattgcacgcccacaacttcaggagaagatgtgagggatttcgccaaagtccttaaaaacaaattccggacaaaacgatattttgcgaaacatccaagaatggggtacctgccagtgcagacagtgctggaaggagataatatggaaacagatacaatg

SEQ ID NO: 342879 - DNA, 3591 bp, Artificial Sequence
  derived and/or modified sequence
atgctgtggtgggaagaggtggaggactgctacgagcgagaggacgtgcaaaagaaaaccttcaccaaatgggtgaacgctcagttcagcaagtttggaaagcaacacattgagaatcttttctccgacctgcaggacggccggcgcttgctcgatttgctggagggactgactggacagaaactgcctaaagaaaagggctcgaccagggttcatgcgctgaacaacgtgaacaaagccctgcgcgtactgcaaaacaacaatgtggacttggtgaatatcggttcaaccgatatcgtggacggaaatcacaagctgacgctcgggttgatctggaacatcatcttgcactggcaggtcaagaacgtgatgaaaaacatcatggctggcctgcagcaaactaactccgaaaagatcctgctgtcctgggtgcggcagtcgactcgaaactaccctcaggtgaatgtcatcaacttcaccacctcctggtcagatggactcgcactgaacgccctcatccactcgcataggcctgatctcttcgactggaactcagtcgtctgccaacaatcagccacccaacggctggaacacgcttttaacatcgctagataccagctggggatcgaaaagctgctggacccggaggacgtggacaccacctacccagacaagaagtccatcctgatgtacattacctcgttgtttcaagtgctgccgcagcaagtgtcgatcgaggcgattcaggaagtggaaatgctgccacggccgccgaaggtcaccaaggaggagcattttcagttgcatcaccagatgcactactcacagcaaatcacggtcagcctcgcccaaggttacgaacggacctcgagcccaaagccaagatttaagtcgtacgcttacacccaggcggcatacgtgactacttcggaccctactaggagcccgttcccttcgcaacacctggaagcaccggaggacaagtcattcggaagctcactgatggaatcggaagtgaacctggaccgctaccagacggcgttggaagaggtcttgtcatggctcctgtcggccgaagatacgctccaagctcagggagagatctccaatgatgtcgaggtggttaaggaccagttccatactcatgagggctacatgatggatctcaccgcccaccagggccgagtgggtaatatcctgcaactcggatctaaattgatcggtactgggaagctctcagaggatgaagaaactgaagtgcaagaacagatgaacctgctgaattccaggtgggaatgcctgcgcgtggcctcgatggaaaaacagtccaacctgcatcgggtgctgatggatctgcaaaatcaaaagctgaaggagcttaatgattggctgaccaaaactgaagagcggacccgcaagatggaagaagagcctctcggaccagatcttgaggacctcaaacgacaggtgcagcagcacaaggtgctccaggaggatcttgaacaagagcaagttagggtgaactccctgacccacatggtggtagttgtggacgaatcctcaggggaccacgctacggcagcgctggaagagcagctgaaggttttgggagataggtgggcgaacatttgccggtggaccgaagatcgctgggtattgttgcaagacatcctcctcaagtggcaaagactgactgaggagcaatgtctcttctcggcgtggctgtccgaaaaggaggatgcggtcaacaagatccacaccaccggattcaaggatcaaaacgagatgctctcctcgttgcaaaaactggccgtgcttaaggccgatctggagaagaaaaaacaatctatgggaaagttgtactccctgaagcaggacctgctctcgaccctcaagaacaagtcagtcacgcagaaaactgaagcatggctggacaacttcgcaagatgctgggataacctcgtccagaaattggaaaagtccactgcacaaatctcgcaggctgtcaccacgacgcagcccagcctgacccagaccaccgttatggagactgtcacgactgtgaccactcgggagcagatcctggtgaaacatgctcaggaggaactgcctccgccacccccacaaaagaaaagacagatcaccgtggacacccttgagcggctccaggagctccaggaggccactgatgaactcgatttgaaactcagacaggcggaggtgataaagggttcgtggcagccggtgggcgacctcctcatcgatagcctgcaggaccacctggagaaagtgaaggcccttcggggcgaaatcgctcccctcaaggaaaatgtgagccacgtgaatgacctggctaggcaactgaccaccctcggtattcagctgtccccttacaacttgtcgacgctggaggacctgaacacccgctggaaactcctccaagtggcggtggaggaccgcgtccggcagctccacgaagcacatcgcgacttcggtccggctagccaacacttcttgtcgactagcgtgcagggaccgtgggagcgggccatcagccccaacaaggttccgtattacattaatcacgagactcagaccacttgttgggaccacccgaaaatgacggaactctaccagtccctggcggacctgaataacgtcaggttctccgcgtaccgcactgctatgaagctgcgcagactgcagaaggccctctgccttgacttgctgagcctcagcgcagcatgcgacgccctggatcagcataatctgaagcagaatgaccagccgatggacattcttcagatcatcaattgcctgactactatctatgacagattggaacaggaacataacaacttggtgaatgtgccgctctgtgtcgacatgtgtctcaactggctgctcaacgtctacgatactggacggaccggccgcatccgcgtgctgtcatttaagactgggatcatctcactgtgtaaagcccaccttgaggacaagtacagatacctgttcaagcaggtagcgtccagtaccgggttctgcgaccagcgcaggctgggactgcttcttcacgattcaatccagattcctcgccagctgggcgaagtggcatcgtttggcggctccaacatcgaaccgtccgtccgcagctgctttcagttcgcgaacaacaaacctgaaatcgaagctgcccttttccttgactggatgcgactggaaccgcaatccatggtctggttgccggtccttcatcgggttgccgctgcagaaactgcgaagcatcaggccaaatgcaacatctgcaaggagtgcccaatcattggattcaggtatcgctcacttaagcatttcaattatgatatttgccaatcctgctttttctcgggccgcgttgccaagggccacaagatgcattacccaatggtggagtactgtactccgactaccagcggtgaagatgtgcgcgacttcgcaaaagtcctcaaaaacaagttcagaacgaagcgttacttcgctaagcacccccggatgggataccttccagttcaaaccgtgttggaaggcgacaatatggagacggataccatg

SEQ ID NO: 342880 - DNA, 3591 bp, Artificial Sequence
  derived and/or modified sequence
atgctgtggtgggaggaggtggaggattgctacgagagggaggatgtacaaaaaaagacttttactaagtgggtgaacgctcagttctctaagttcggcaaacagcacatagaaaatttgttcagcgatctccaggacggacgccgtctgttggacctgcttgagggcctgacgggccagaaattacccaaagagaaaggatccacacgcgttcatgcactcaacaatgtcaataaggcactccgggtgttgcagaataataacgtggacttggtgaacatcggtagcaccgatatagtcgatgggaaccacaaacttaccttaggactaatatggaatatcattttgcattggcaggtgaaaaatgttatgaagaatattatggcgggcctgcagcagaccaatagcgagaaaattctcctctcgtgggtgcggcagagtacccggaactatcctcaggttaatgtgatcaattttacaacgtcttggtctgatgggttagccctcaacgctctgatacactcccaccggcctgatctgtttgactggaacagtgtagtttgccaacagagtgctacgcagcgtttggagcatgccttcaacattgcccgctaccagctaggaattgaaaaacttctggatcccgaagatgtggatacaacgtacccagataagaagtctattcttatgtatattactagtctgttccaagttctcccccagcaagtgagcatagaggccatccaggaagttgagatgttgccacgcccacccaaagtgacaaaggaggagcacttccagctacatcatcagatgcattacagtcaacaaatcacagtctcactggctcaagggtatgaacgcacgtcctcacccaaaccccgatttaaaagctatgcatatacacaggctgcctatgttaccacttccgaccctacacgcagtcctttccccagccagcaccttgaggcgcctgaggataagtcattcggctcttctctgatggagtcagaggtgaatctggaccgttaccagacagcacttgaggaagtactatcctggttactatccgcggaagacacactgcaggctcagggtgaaatcagtaacgacgtcgaggtagttaaggaccagtttcatactcacgaagggtacatgatggacctaaccgctcaccagggtcgcgtggggaacatccttcagctgggttctaaacttataggcaccggaaaactctcagaggacgaggagaccgaggtgcaagagcagatgaacctgcttaattcccgttgggaatgcctcagggtggccagcatggaaaagcagagcaacctgcatagagttctgatggatctccagaaccagaaactcaaggagctgaacgactggctgaccaagaccgaagagcgcacccgtaaaatggaagaggagccacttggacctgatcttgaggatttgaaaagacaagtccaacaacacaaggttttacaggaggatctcgaacaggagcaggtgcgtgtgaattcactcactcatatggtggttgtggttgatgagagtagtggcgatcacgcaacagcagctcttgaggaacagctcaaagtgctgggcgaccggtgggccaacatctgtcgatggaccgaggatcgctgggtcttgctgcaggatattctcttgaagtggcagcgccttacagaggagcagtgtctgttctctgcctggctctcagaaaaagaagacgctgtaaataagatccataccacgggcttcaaggaccaaaatgagatgttgtcctctctccagaagctagccgttttaaaggcggatctggagaagaagaagcagtctatgggaaaactttacagcctcaagcaggatctgctgtctaccctgaaaaacaagtctgtcacccagaagactgaagcttggctggacaattttgctcgctgctgggacaacctggttcagaaactggagaaatcgactgctcagatcagtcaagctgtaactactacacaaccatctctgacgcagacaacagtgatggaaaccgttacaacagttacaacacgcgagcaaatcttggtcaagcacgcgcaggaagaactgcctccacctccacctcagaaaaaacgacagattaccgtcgatacacttgaacggctacaagagctgcaggaagcgactgacgaattggacctgaagctgagacaggcagaagtgataaagggcagctggcagcccgtaggagacctgttgatcgatagcctgcaggaccacctggagaaggtgaaggctctccgcggcgagattgctcccctaaaagaaaatgtgagccacgtcaacgacctggcaaggcaactgacgactctcggcattcagctgtccccctataacctctccacgctagaggatctgaacacaaggtggaaacttcttcaggtggccgtggaggatcgcgttagacaactgcatgaagcacacagagatttcggccccgcttcgcagcacttcctgagtaccagcgtgcagggaccatgggaacgggccattagccccaataaagtcccttattatatcaatcatgagacccagaccacgtgttgggaccacccaaaaatgacggaactgtatcagtcactggctgacctcaataatgtcaggttcagcgcctataggaccgccatgaagctgcggagactccagaaagcattatgtctggatttgctgagcctgtcagctgcttgtgacgcgctcgatcaacataaccttaagcaaaatgaccagcctatggatatcctgcagataatcaattgcttaacgactatttacgatcgccttgagcaggaacataacaatctggtcaatgtgccgctgtgtgttgatatgtgcctcaactggctcctgaacgtttacgacacaggccggactggacggataagagtactgtcttttaagactggaatcataagcttgtgcaaagcccacctcgaagataaataccggtatctcttcaaacaggtagcctcgtctacaggtttttgtgatcagcgccggctggggctgctgctgcatgattccatccagattccacggcaactgggggaggttgccagcttcggggggtccaacatcgagcccagcgtgcgttcctgtttccagtttgccaataataaaccggaaatcgaagcagctttgtttctggactggatgcgtcttgagcctcagagtatggtgtggcttcctgtcctgcatagggtcgccgcagcagaaacggcaaagcaccaggccaaatgcaacatttgtaaggagtgccccatcatcgggttcaggtaccgctccctcaaacattttaactacgatatttgccaatcttgcttcttcagcggaagggttgccaaaggccataaaatgcactatccaatggttgaatactgcacgcctaccacctcgggcgaggacgtgcgagatttcgccaaggtgctcaaaaacaagttccgcacgaaacggtattttgcaaagcatcctaggatgggttacctccccgtacagaccgtcctagagggagataacatggaaacggacacgatg

SEQ ID NO: 342881 - DNA, 3591 bp, Artificial Sequence
  derived and/or modified sequence
atgttgtggtgggaagaggtggaagattgttacgaaagagaagatgtgcaaaagaaaacttttactaagtgggtgaacgcacaattctcgaagtttgggaaacagcatattgagaaccttttctcagatctgcaggatgggcgcagacttctcgatctgctcgagggcctgaccggacagaaattgccgaaggaaaagggatcgactcgggtccatgcgctgaataacgtgaacaaggccctgcgagtgttgcagaataacaacgttgacctcgttaacatcggatcgactgatatcgtggacggaaatcacaaactgactctgggattgatctggaatatcatcctgcactggcaagtgaagaacgtgatgaagaatatcatggctgggctgcagcaaactaattccgagaaaatcctcctgtcctgggtccggcagtcgaccagaaactatcctcaggtgaatgtgatcaacttcactacttcatggtccgacggcctggctctcaacgccctcattcattcacatcgaccggacctgtttgactggaactcagtggtgtgccagcaatcagcgacccagagacttgaacacgccttcaacatcgcacgctaccaactgggaattgaaaaacttctggacccggaagatgtggacactacctacccggataagaagagcatccttatgtacatcacgtcgctgtttcaggtcttgccgcaacaggtgtccatcgaggccatccaggaagtcgagatgctgccgcgcccgccgaaggtgaccaaggaagagcacttccagctgcaccatcagatgcattactcccaacagatcaccgtatcactggcacagggctatgaacggacctcgtccccaaagccgaggttcaagagctacgcctacactcaggccgcttacgtgactacctcggatccgacgaggtcgccgttcccgtcccagcatctggaagcaccggaggacaagagcttcggatcgtccctgatggaatcagaggtgaatttggaccgctaccagaccgccctggaggaggtgctgtcctggctgctttccgcggaggacaccctgcaagctcagggcgagatttcaaatgacgtcgaagtggtcaaagatcagttccacacccacgaaggatatatgatggacctgactgcacatcagggaagggtggggaacatccttcagcttggaagcaagctgatcgggaccggcaagctgtccgaggacgaagaaactgaagtgcaggaacagatgaacttgctgaatagccggtgggagtgcctccgggtggccagcatggagaagcagtccaacttgcaccgggtcctgatggatctccaaaaccagaagctgaaggagctgaacgactggctgaccaagacggaggagcggacccgcaagatggaggaggaaccgctgggaccagacctggaggacctcaaacggcaggtgcagcagcacaaagtgttgcaagaggacctggaacaggagcaggtgagagtgaacagcctcacccatatggtcgtggtcgtggacgaatcgtcgggcgatcatgccactgccgccctggaagaacagcttaaggtcctcggagatcgctgggctaatatctgtcgctggaccgaagatcgatgggtccttctccaagacattttgttgaagtggcaaagactgaccgaagaacagtgcctgttctccgcgtggctgtcggaaaaggaggacgctgtgaacaagatccataccactgggtttaaagaccagaacgagatgctgtcctcgttgcagaagctggccgtcctgaaggctgatctggagaagaaaaagcaatccatgggtaaactgtactccctgaagcaggatctgttgtccactctcaaaaacaaatccgtgacccagaaaactgaggcctggctcgacaatttcgcccggtgttgggataatctcgtgcagaagctcgagaaatccaccgctcagatttcccaggcggtcaccacgacccagcctagcctgacccagaccactgtcatggaaaccgttactactgtgaccaccagagaacagatcctcgtgaaacatgcgcaggaagagctgccgccaccaccccctcaaaagaagcggcagattaccgtcgacaccctggaacgcctgcaggagttgcaggaagcgacggacgagcttgacctgaagctccgacaggcagaggtgataaagggctcctggcagcctgtgggcgatttgctgatcgactccctccaggatcacctggaaaaggtgaaggccctccggggagagatcgcgcctctgaaagaaaacgtgtctcacgtcaacgacctcgctcggcaactgaccaccctggggatccagctgtcaccctacaacctgagcactctcgaggatctgaatacccggtggaagctcctccaagtggcggtggaggatcgggtgcgccaactccacgaagcacaccgggacttcggaccggcctcccaacactttctgagcacctcggtacagggaccatgggaacgggcgatctcaccaaataaggtgccttactacatcaatcacgagactcaaactacctgttgggaccatcctaagatgactgaattgtaccagtccctggccgacctcaacaacgtgcggtttagcgcctacaggaccgcgatgaagttgcgcagactgcaaaaggcgctctgcctcgacctgctgtcgctctcggcagcctgcgatgcccttgaccaacacaacctgaaacagaatgaccaacctatggacatcctgcaaatcattaactgcctcaccactatctacgatcggctggaacaggaacacaataatcttgtcaacgtaccactgtgcgtggacatgtgcctgaactggctccttaacgtctacgacactggacgaaccggaaggatccgggtgctgtcgttcaagactggtatcatctcgttgtgcaaggcgcacctcgaagataagtaccggtacctgttcaagcaggtggcctcgagcaccggtttttgcgatcaaaggcgtctgggacttcttctgcacgactcgatccagatcccgcgccagctgggggaagttgcctccttcggaggatccaacatcgagccttccgtccgctcctgtttccagttcgccaacaacaagccggaaatcgaagcggcactgttcctggactggatgcgcctcgagcctcagtcgatggtgtggttgcccgtcctgcacagagtggcggccgccgagacggcgaagcaccaggctaagtgcaacatctgcaaggaatgcccaatcatcggttttcgctaccggtcgctgaagcacttcaattacgatatctgtcagtcctgtttcttctcaggaagggttgcgaagggccataagatgcattacccgatggtggagtactgcacccccaccacctcgggcgaggacgtgagagacttcgccaaggtgctgaagaacaagttccggaccaagagatacttcgcgaaacatccacggatgggatacctgccggtgcagactgtgctcgagggcgacaatatggaaaccgacactatg

SEQ ID NO: 342882 - DNA, 3591 bp, Artificial Sequence
  derived and/or modified sequence
atgctgtggtgggaagaggtcgaggactgctacgaacgggaggatgtccagaagaaaacttttactaaatgggtgaatgcacaattttccaagtttggtaagcagcacattgagaatcttttctccgatctgcaagatggccggcgccttctggatctgcttgaaggtctgacggggcaaaagctgccaaaggagaaggggtcgactcgagtgcatgcgctcaataacgtgaataaggccctgcgcgtgctgcaaaacaacaatgtggacctggtgaacattggaagcactgatattgtggatggtaatcataaactgacgttggggttgatttggaacattattctccactggcaagtgaagaacgtcatgaagaacatcatggccggcttgcaacagacgaattccgagaagatccttcttagctgggtccggcaatccacgagaaactacccacaagttaacgtgattaactttactacgtcgtggagcgatggcctcgcactcaatgcactgattcattcccatcgacctgatctctttgactggaactcggtggtgtgccaacagagcgcaactcaaagattggaacacgccttcaatattgcgagataccaactgggtatcgaaaagctccttgaccctgaagatgtggatactacttacccggacaagaaatcgattctgatgtacataaccagcctttttcaggtgcttccccagcaggtatctattgaggcaatccaagaagtggaaatgcttccacgtccacccaaagtgactaaggaagaacactttcaacttcaccatcaaatgcattacagccagcagattactgtaagcctggcacagggctacgagcgcacctcatcgccgaagcctagatttaagtcctacgcgtacactcaggcagcgtacgtcaccacgtcagacccaactaggtccccttttccttcacagcatctggaggcaccagaggataagagctttgggtcctcattgatggaatccgaagtcaacctcgatcgataccagaccgcacttgaagaggtgctgtcgtggctgctgtcggcggaagatactctccaggcacaaggtgaaatcagcaatgatgtcgaggtggtgaaagaccagtttcacactcatgaaggatacatgatggatcttactgcacatcaaggacgcgtcgggaatattctgcaactgggtagcaagctcattggtaccggaaaacttagcgaggacgaagaaactgaagtgcaagaacagatgaacttgcttaattcgcgctgggagtgtctccgtgtggcctccatggaaaagcaatctaacctgcacagggtgcttatggatctgcaaaatcagaagttgaaagaactgaacgactggctcaccaaaaccgaggaaagaacccgcaagatggaagaagaaccactgggaccagaccttgaggatctgaagcggcaagtgcaacaacacaaggtccttcaagaagatttggaacaagaacaagtgcgcgtgaactcccttactcacatggtggtggtcgtcgatgagagttccggtgaccatgcaactgcagcactggaagagcaacttaaggtgctcggcgacaggtgggcgaacatatgccggtggaccgaggatcggtgggtgctgctccaggacattcttctcaagtggcagagactgaccgaagagcaatgtctttttagcgcatggctgagcgaaaaagaagatgcagtgaacaagattcataccactggtttcaaggatcagaatgagatgctgtccagccttcaaaagttggccgttcttaaggctgacctcgagaaaaagaaacagtcaatgggcaaactttatagtcttaaacaagatcttctctccactcttaagaataagagcgtgactcaaaagactgaggcgtggctcgataactttgcaagatgttgggacaatcttgttcaaaaacttgaaaagtccaccgcgcagatcagccaagccgttactaccactcaaccctcgcttacccagactacggttatggaaacggtgaccacggtcactactagggaacagattcttgtgaagcatgcacaagaagagctccctcccccaccgcctcaaaagaaacgccagattactgtggataccctggaacgtttgcaagaactgcaggaggcaaccgatgagctcgatcttaagctgcggcaagcggaggtcatcaagggctcctggcaacctgtgggagatctgctcatcgatagccttcaggatcatcttgaaaaggtcaaggccctgaggggcgagatcgcaccactgaaggagaacgtctcgcacgtgaacgaccttgcacgccagctgacgacccttggaattcagctgtcgccttacaatctgtcaactcttgaagatctgaatactagatggaagctcctgcaagtggctgtggaagatcgagtgagacagcttcatgaggcacatagagattttggccctgcaagccagcacttcctttccacttccgtgcaggggccatgggagagagcgatcagcccaaacaaggtgccgtactacatcaatcatgagactcaaaccacttgttgggaccatccaaagatgacggagctttatcagtcgctcgcagatcttaacaacgttagattttcggcatacagaaccgctatgaaacttcgccgcctccagaaagccctttgcctcgatcttctgtcgttgtcggcagcatgcgatgccctcgaccagcacaaccttaagcaaaacgaccaacccatggacattctgcaaatcatcaactgtcttaccaccatatacgatcggttggagcaagagcataacaacttggtcaacgtccccctctgcgtggatatgtgtcttaactggcttctgaatgtgtacgacaccggtcgcaccggaaggatcagagtcctctcctttaagactggtatcatttccctgtgcaaggcacatctcgaggacaaatatcgctacttgtttaagcaagtggcatccagcaccggtttctgcgatcaacgcagactgggtctgcttctgcacgactcgattcagatccctaggcagctgggcgaagtggcctcatttggtggatccaacatagaaccttcggtgcgttcgtgtttccagttcgcaaacaacaagccagaaattgaggccgcactcttcctggactggatgagactggaacctcaatcaatggtgtggctccccgtccttcacagagtcgcagcagcagaaactgcaaagcatcaagcaaagtgcaacatctgtaaagaatgtccaattatcggatttagataccgctccctcaaacatttcaactacgatatttgtcaatcgtgctttttctcgggaagagtggcaaagggtcataagatgcattatcctatggtcgaatactgtacgcctaccacttcgggcgaggatgtgcgagattttgcgaaagtgctgaaaaacaagttcagaactaagagatactttgccaagcaccccagaatggggtatctgccggtgcaaaccgtgcttgagggagataacatggaaaccgatactatg

SEQ ID NO: 342883 - DNA, 3591 bp, Artificial Sequence
  derived and/or modified sequence
atgctttggtgggaggaagtggaggattgctacgaacgggaagatgtccagaagaaaacgtttaccaagtgggttaacgcccagttctccaagtttggaaagcagcacatcgaaaacctcttctcggacctccaagatggacgcaggctgctggacctcctggaaggactgactggacagaagctgccgaaagaaaagggatcgactcgggtccatgctctgaacaacgtcaataaggcgttgcgcgtgctgcagaataacaatgttgatttggtcaacataggatcaaccgacatagttgacgggaaccacaaactcaccctcggcctgatctggaacatcattctccattggcaggtgaagaatgtcatgaagaatatcatggcagggttgcaacaaaccaactcggagaagatcctgctgtcatgggtcaggcaatccacccgaaactacccgcaggtgaatgtgatcaacttcactaccagctggtcagacggactcgctctgaacgctctgatccactcccatagaccagacttgttcgactggaattccgtggtgtgccagcagtctgccacgcagcggttggaacacgctttcaatatcgcacgctaccaactgggaatcgaaaaactgctggacccggaggacgtggacaccacctaccctgacaaaaagtctatcctcatgtacatcacttccctgtttcaagtgctgccgcaacaggtgagcatcgaggccattcaagaggtggaaatgttgccgcgtccgccaaaggtcacgaaggaggagcacttccagctgcatcatcaaatgcactactcacagcagattaccgtgtccctcgcccaaggctacgagcgcacctcctcaccgaaaccacggttcaaatcatacgcatacacccaagctgcctacgtgactacctccgacccaactagatcaccgttcccctcccaacacctggaagcgcctgaagataaatccttcgggagctcgctgatggaatcagaagtgaacctggaccggtaccaaactgcccttgaggaagtcctcagctggcttctgtcggcggaggataccctgcaggctcaaggtgaaatctcgaacgacgtggaagtggtgaaggaccagttccacactcatgagggctacatgatggacctgaccgcccatcagggtcgcgtcggaaatatcttgcaactgggatccaaacttatcggtactggaaagctcagcgaggacgaagagactgaggtccaggagcagatgaacctcctcaacagccggtgggaatgcctgcgggtggccagcatggagaagcaatcgaatctgcaccgggtcctgatggaccttcagaaccagaagctcaaggaattgaacgattggctcactaaaaccgaggaacgtactcggaagatggaagaggaaccgctgggacccgatcttgaagatttgaagagacaagtgcagcaacacaaagtgctccaggaagatctcgagcaggaacaagttcgggtgaactccttgacccatatggtggtggtcgtggacgagtcctcgggagatcacgccacggcagccttggaagaacagttgaaggtcctgggagatcgctgggccaacatctgccgctggaccgaggaccggtgggtgctgcttcaagacatattgctgaagtggcaacggctgactgaggaacagtgtctgttttcagcttggttgtccgagaaggaggacgcagtcaataagattcataccaccggattcaaggatcaaaatgagatgctctcctcgctgcagaagctggctgtgctgaaagccgaccttgaaaagaagaaacagagcatgggcaaactctactcgctcaagcaggacttgctcagcaccctgaagaacaagtcggtgactcaaaaaaccgaagcatggctcgataacttcgcccgttgctgggacaatctggtccagaaactggaaaagtcaaccgcgcaaatctcccaggctgtgacgactactcaaccgagcctgacccaaaccactgtgatggaaaccgtcaccacggttaccacccgcgagcagattctggtcaagcacgcgcaggaagaactgccgccgcctcctccacagaaaaagagacagatcactgtggatactctcgaacgcctgcaggaactccaggaagcaaccgatgaactggatctgaaactcagacaagcggaagtcatcaagggatcgtggcaaccagtcggtgatctcctcatcgattcactgcaagatcacctggagaaggtcaaagccctgagaggggaaatcgccccactcaaggagaatgtgtcgcatgtcaatgaccttgcccggcagctcaccacgctgggcatccagctgtctccgtataaccttagcaccctggaggacctgaacactcggtggaagctgctgcaggtggcggtggaggatagagtgaggcagctccacgaagcacacagagacttcggtccagcgtcccagcatttcctgtccacctcagtgcaaggcccatgggaaagagctatcagcccaaacaaggtcccttactacatcaaccacgagactcagacgacctgctgggaccatcctaaaatgaccgaactttaccagagcctcgcagacctgaacaatgtgcgcttcagcgcttaccgcacggcgatgaagctgcgcagattgcaaaaggcactttgtctggatctgttgtcgctctccgccgcttgcgacgcgcttgatcagcacaatctgaaacagaatgatcagcctatggatatccttcagattatcaactgtctgaccaccatctatgaccggcttgagcaggagcacaataacctggtaaacgtgccgctgtgcgtggacatgtgcctgaattggctgcttaacgtttacgacacgggacggactggaagaatccgtgtgttgtccttcaagacggggatcatctcactctgcaaagcccatctggaggacaagtataggtacctctttaaacaggtggcatcgagcactggcttttgcgatcagcgcagactgggtctgctgctgcatgattccatccagatccctaggcaacttggagaagtggcatcatttggcggatcaaacattgaacctagcgtgcgctcctgtttccagttcgccaataacaaacctgaaattgaggctgcgctgttcttggattggatgcggctggagccacaaagcatggtttggctcccggtgctgcaccgcgtggctgccgcagaaaccgcgaaacaccaagccaagtgtaatatctgcaaggagtgcccgatcatcgggttcaggtatcgctcgctgaaacatttcaattacgatatatgtcaatcctgcttcttttccggccgcgtggccaagggacacaagatgcattatcccatggttgagtactgcaccccgaccacgtcgggagaagatgttagggacttcgcaaaggttttgaaaaacaagttcagaaccaaacgctactttgccaagcaccctcggatgggttacctcccagtgcagaccgtgctggaaggcgacaatatggaaaccgacactatg

SEQ ID NO: 342884 - DNA, 3591 bp, Artificial Sequence
  derived and/or modified sequence
atgctgtggtgggaagaggtggaagattgctacgaacgcgaggacgtgcagaagaaaactttcaccaagtgggtgaacgctcagttctcgaagttcgggaagcagcacatcgaaaatctcttctccgatcttcaggacggaagaaggcttctggacctgcttgaaggactcaccggtcaaaagctgccgaaggagaagggatcgaccagagtgcatgccctgaataacgtgaacaaagccctgagggtcctgcagaataacaacgtcgacctggtgaacattggatccaccgacatcgtggacggaaaccataagctgaccctggggttgatctggaatatcatccttcattggcaggtgaaaaatgtcatgaaaaacatcatggccggcctccaacagacgaacagcgaaaagatcctgctcagctgggtccggcagtccaccaggaactacccacaggtgaatgtgatcaactttaccacctcgtggtcggacggactggctctcaacgcgctgatccactcacaccgaccggacctgtttgactggaactcagtggtgtgccaacaaagcgcaacgcagcggctggaacacgcgttcaatattgctagataccaattgggaatcgaaaaactgttggatccggaggacgtggacaccacctaccccgacaaaaagtcaatcctcatgtacatcacctcacttttccaagtgctcccgcaacaagtgtcgatcgaagcaattcaggaggtcgaaatgctgccacgaccgccaaaggtgacgaaggaggagcactttcaattgcatcaccagatgcactacagccaacaaatcaccgtgtccctcgcgcagggatacgaaagaacctcttcccccaagcctcggttcaaatcatacgcctacacgcaggccgcttacgtcactacctccgaccccacccgctcccctttcccatcccagcacctcgaggctccggaagataagtcattcggcagctccctgatggaatcggaagttaacctggaccggtatcaaaccgctctggaggaagtgctctcttggctgctgagcgccgaagataccttgcaggcgcagggagaaatctcgaacgacgtggaggtggtgaaggatcaatttcatacccacgaaggctacatgatggatctgactgcacaccagggaagggttggaaacatcctgcagctggggtcgaagctcatcgggaccggaaagctgagcgaggatgaagagactgaagtccaagagcagatgaatttgttgaactcacggtgggaatgcctccgcgtcgcttccatggaaaagcagtcgaacctgcatcgggtgctgatggacctgcaaaatcagaaactcaaggaactcaacgattggctgaccaagaccgaggaacgtaccagaaaaatggaagaagagccgcttggaccagatctggaggacctgaagcgccaagtgcagcagcacaaagtgctgcaagaggatctggagcaggaacaggtgcgggtgaacagcttgacccatatggttgtggttgtggacgagagctcgggcgaccacgccaccgctgctctcgaagaacagctcaaggttctcggagacagatgggccaatatctgccgctggactgaggacagatgggtgctgctgcaagacattctcctcaaatggcagcggctgactgaagaacaatgtttgttcagcgcctggttgtccgagaaagaggacgctgtgaataagatccacactaccggattcaaagatcagaacgagatgctgtcaagcctccaaaagctggcggttttgaaggcggacctggagaagaagaagcagtcgatgggcaagctgtactctcttaaacaggacctgttgtctactttgaagaacaaatctgtgacccaaaaaaccgaggcctggctggacaacttcgccaggtgttgggataacctggttcagaagctcgaaaagtcgaccgcacaaatctcccaagcagtcaccaccactcaaccttccctgactcaaactaccgtgatggaaaccgtgactactgtgactacgcgagaacaaattctggtgaagcacgctcaggaagaacttccgccaccgccaccacagaagaagcgccaaataactgtggacaccctcgaaagattgcaagaactccaggaggcaactgacgagcttgacctgaaactccggcaggccgaagtcatcaagggtagctggcagccggtgggtgatctcctgattgactcacttcaagatcacctggaaaaagtgaaggccctgaggggtgaaattgcccctctcaaggagaatgtgtcgcacgtgaacgacctggcccgccaactgaccacgctgggaatccagctgtcgccgtacaacctttctactttggaagatctgaatactcggtggaaactgctgcaggtcgctgtcgaagatagagtccgccagctccacgaggcgcacagagatttcgggcccgctagccagcacttcctttcgacttcggtgcagggaccgtgggaaagggctatttccccgaacaaggtcccatactacattaatcatgaaacccagacgacctgttgggaccatccgaagatgactgaattgtatcagtcgctggcggacttgaacaatgtgcgcttcagcgcctaccgaaccgccatgaaacttcggcgcctccagaaagcactgtgcctggatctgctctcactgtccgccgcatgcgacgccctggatcaacacaacctgaagcagaacgaccaaccaatggatatcctgcagatcataaactgcttgacgactatctacgatcggcttgaacaggagcataacaacttggtcaatgtgcccttgtgtgtcgacatgtgcctcaactggcttttgaatgtctacgataccggacggaccggacggatccgggtccttagcttcaagacgggcatcatctcgctctgtaaagctcatctcgaggacaagtaccgatatctctttaagcaagtcgcctcttccaccgggttctgcgaccaacggcggctcgggctgctgcttcacgactcgatccagattccgagacagttgggagaggtggcgtccttcggaggatcgaatatcgaaccatccgtgcgctcttgcttccagttcgctaacaataaaccggaaatcgaagccgccctgttcctcgattggatgcggctggagcctcagagcatggtctggctccccgtgctgcatagagtcgccgccgcggaaactgcaaaacaccaggccaaatgtaacatctgtaaggagtgcccaattatcggatttcgctatcgcagtcttaaacactttaactacgacatctgccagtcgtgctttttctccggccgggtggcgaagggacataagatgcactatccgatggtagagtactgtactccaaccacctcgggtgaagatgtgcgagatttcgccaaagtgctcaagaataagttccgcactaagcgctacttcgccaagcacccgagaatgggttacttgccagtgcagaccgtcctggagggggacaacatggagactgacaccatg

SEQ ID NO: 342885 - DNA, 3591 bp, Artificial Sequence
  derived and/or modified sequence
atgttgtggtgggaggaggtagaggactgttatgagagggaggatgtgcaaaagaaaaccttcactaaatgggtgaacgcacagttttcaaaatttggaaagcaacatattgaaaatctgtttagcgacctgcaggacgggcggcgtctgttggacctgctggaagggctgaccggccagaagctcccaaaggaaaagggttcgacaagggtgcacgcgctcaacaacgttaacaaagctctcagagtgctccagaacaacaacgtggacctggttaacatagggagcaccgatatagtggatggcaaccataaattaacactcggcctcatttggaatatcatcctccactggcaggtgaagaatgtgatgaagaatatcatggccggattgcagcagaccaacagcgagaagatcctgctcagttgggtgcggcagagcacacggaactatccacaagtgaatgtgattaacttcaccacatcatggagcgacggactggctctcaatgcgctcattcatagccacagaccggacctgttcgattggaacagtgtggtgtgccagcagagtgcaacgcagaggctggaacatgccttcaatatcgcccggtatcagcttggtatagagaagctgctggatcctgaagacgtcgacactacttacccagataagaagtcaatattgatgtatataacctcgttattccaggtgctccctcagcaggtatcgatcgaagccatacaagaggtcgagatgctgccacggcctcccaaggtgaccaaagaggaacattttcagctccaccatcagatgcactactctcaacagataaccgtgtccctcgcacagggttacgaacgaacctcttcgccaaaaccgcgcttcaagtcttacgcctatacccaggccgcgtatgtcaccacgtctgatcccacgcgcagcccattcccatcacagcacttggaggcaccagaggataagagcttcggcagctcattaatggagtctgaggtcaacctggatcgatatcagacagcacttgaggaggtgctttcatggcttctgagtgcggaggacaccctccaggctcagggtgagataagcaatgacgtggaggtggtaaaggaccagttccacacacacgaaggatatatgatggacctgacagcacaccaggggagggtgggaaatattttgcagcttgggtctaagctcattggcaccggtaagctgagcgaggacgaggagaccgaagtccaggagcaaatgaatctgctcaactcccggtgggaatgtttaagagtggcgtctatggagaaacagagcaacctccaccgggtgctaatggacctccaaaatcaaaagctgaaggagctgaatgattggctgactaaaacagaggagcggacacgcaaaatggaggaggaacctctggggcctgacctggaagacctcaagcgtcaggtgcagcagcacaaggtcctccaagaagatttggaacaagagcaggtgcgcgtgaattctctcacccacatggtggtggtcgtggatgagtcttctggcgaccacgccacagccgccctggaggaacagttgaaagtgctcggagaccggtgggctaatatctgtagatggaccgaagaccggtgggtcctcctgcaagatatactcctcaagtggcagaggctcactgaagaacagtgcctcttttcagcgtggctgtctgagaaagaagatgcggttaataaaattcacactacaggttttaaagaccagaatgaaatgttgtcttctcttcagaaactggcagtcctgaaagccgatcttgaaaaaaagaaacaaagtatggggaagctctattccctcaaacaggatctgctgtcaactctgaaaaacaagtccgtcacgcagaagaccgaggcctggcttgacaatttcgcaagatgctgggacaacctggttcaaaagctggagaagtcgaccgctcagatatctcaggccgtgacaactacccagccttcattaacacagaccaccgttatggaaactgtgacaacggttacaactcgggagcagatattagtgaagcacgcccaagaggagctcccacctccaccaccccagaagaaacgtcagattacggtcgacacacttgagagattgcaggagttgcaggaggcaaccgatgaactcgatttaaagctgaggcaagcggaggtcataaaaggctcttggcaacctgtgggggatttgctcatcgactctctccaggaccacctggaaaaagtgaaagctctacgaggggaaattgctccactgaaggagaatgtgtcccatgtgaatgacctggccaggcaactgaccaccttgggcatccagctgtctccctacaatttatcaacactggaggatttgaacaccaggtggaagctgctccaggtggcggtggaagatcgggtgcgccaactccatgaggcgcatcgtgattttggacccgcctctcagcactttctgagcactagcgtacagggcccctgggaacgggccatcagccctaataaggtgccatactacattaaccacgaaacacagacaacttgctgggaccaccccaagatgactgagctgtatcagtccctggcagatcttaataacgtgcgctttagtgcgtataggacagcgatgaagcttaggaggctgcagaaagccctgtgcttagacctgctgagcctatctgcagcttgcgacgccctggatcagcataacctcaagcagaacgaccagcctatggacatcctgcagatcattaactgcttgaccactatatacgatcgcctcgagcaggagcataacaacctggttaatgtcccgctgtgcgtggacatgtgtctgaactggctcctgaatgtgtatgacaccggaagaacagggcgcataagggtactgtcattcaagactggaatcatctcactctgtaaagcccacctagaagataagtaccggtatttgttcaagcaagtagcatctagcacaggattttgcgatcagcgccggttgggacttctattacacgatagcattcagatccctcgacagctgggagaagttgccagttttggtggatcaaacatcgaaccaagcgtccgcagttgcttccaattcgcgaataataagcccgagattgaagcagctttattcctggactggatgagattggaacctcaatccatggtctggctgcccgtattgcaccgggtggccgctgccgaaactgctaaacaccaggccaagtgcaatatttgtaaggagtgccctattataggtttccgttacaggtctctcaagcactttaactatgatatatgtcagagctgtttcttcagtgggcgtgtcgccaagggtcacaaaatgcattatcccatggttgaatactgtacaccaaccacatccggtgaagatgtgagagatttcgctaaggtgctcaagaacaagtttcggaccaaacgctacttcgctaaacatccccgtatgggctatttgcctgtgcagactgttttggagggggacaacatggagaccgacaccatg

SEQ ID NO: 342886 - DNA, 3591 bp, Artificial Sequence
  derived and/or modified sequence
atgctgtggtgggaggaagtcgaggactgttacgaacgtgaggatgtgcaaaagaaaacgtttactaagtgggtgaatgcacaattttccaagtttgggaaacaacatattgaaaatctcttctcagatctccaggatggtagacgtctgcttgatctgctggaaggtcttaccggacaaaaacttccaaaggaaaagggtagcactcgcgtgcatgcacttaacaacgtgaataaggcactccgggtgcttcaaaacaacaacgtggatctggtcaatattggtagcaccgacattgtcgatggaaatcacaaacttactctgggactgatttggaacattattcttcactggcaagtgaaaaacgttatgaaaaacatcatggcaggcctccagcagactaactcagagaagattcttctgtcctgggtcaggcaatcgacccggaattacccacaggtgaatgttatcaactttaccacctcatggtccgatggactcgcattgaacgcacttattcactcccacagacccgacttgttcgactggaatagcgtggtctgtcagcagtcagcaacccaacggctcgagcatgcctttaacatcgctcgctaccagctgggtatagaaaaacttctggatcccgaagatgtcgatactacgtaccctgataagaagtcgattcttatgtatatcacgagcctgtttcaagtcctccctcagcaagtgtcgattgaggcaatccaagaagtggaaatgttgccacgccctccaaaagtcacgaaagaagaacattttcaacttcatcatcagatgcattattcccagcagattactgtgtcacttgcgcagggttacgaacgaacttcctcacccaagcctagattcaagtcctacgcttacactcaagccgcatacgtgaccacctccgatccaaccagatccccgtttccatcccagcaccttgaagcacctgaagataagtcgttcggctcgagccttatggagtccgaagtcaacctggaccgctaccaaaccgcacttgaagaggtgctgtcgtggctgctttcggctgaagataccctccaagcgcagggagaaatttccaacgatgtggaagtggtgaaagaccagtttcatacccatgaaggatacatgatggatctcaccgctcatcaaggacgagtgggtaacatacttcaactcggatcaaaactgatcgggactggcaaactctccgaggatgaagagactgaagtgcaagagcaaatgaatctgctgaattcacgctgggagtgcctgcgcgtcgcatccatggagaaacagtcaaatcttcatagagtgttgatggatctgcagaatcaaaagctgaaggaactcaatgattggcttaccaagaccgaggaaagaacccgcaaaatggaagaggaaccacttggaccagatcttgaggatcttaagagacaagtgcagcaacataaggtcctgcaagaagatcttgagcaggaacaggtgcgagtgaactcgctgactcatatggtcgtggtggtcgacgaatcgtccggcgatcatgcaaccgcagcccttgaagagcaactgaaggtcctcggtgacaggtgggccaacatctgtagatggactgaagatagatgggtgctgcttcaggatattcttctgaaatggcaacggcttactgaagaacaatgccttttcagcgcctggctgtctgaaaaggaagatgcagtgaacaaaattcataccactggattcaaagatcaaaatgaaatgctgtcgtcgcttcagaaacttgccgtcctgaaggcagatctggagaaaaagaagcagtccatgggcaaactttactccctgaaacaagaccttctttccaccctcaaaaacaagagcgttactcaaaagaccgaagcgtggcttgacaatttcgcgagatgttgggataacctggtccaaaagctggaaaagtcgaccgcacagatttcccaagcagtcactactacccaaccctccttgactcagactacggtgatggaaacggtgaccactgtgactactcgcgaacaaattcttgtgaagcatgcacaggaagagctccccccgcctcctccccaaaagaagaggcaaattactgtggacaccctggagcgtctccaggaacttcaggaagccaccgatgaattggacctgaaactgagacaagcggaggtgatcaagggaagctggcaacctgtgggagatctgctcattgactcgctgcaagatcatcttgaaaaagtcaaggcacttaggggggaaatcgcacctctgaaggaaaacgtctcccatgtgaatgatctcgcccggcaactgactacgctgggcattcagctgagcccctacaacctttctacccttgaagatctgaataccagatggaagctgcttcaagtggcggtggaagatcgagtgcgacagctgcatgaggcacaccgcgacttcggaccagcttctcagcacttcctgtccacgtcggtgcaaggtccctgggagcgcgccatctcaccaaataaggtcccatattacattaaccatgaaacccagaccacctgctgggatcatcccaagatgactgagctgtaccaatccttggccgatctcaacaacgtccggttttcggcatacaggactgccatgaaactcagacgacttcaaaaggcactttgccttgatctcctgtcgttgtccgctgcatgtgacgccctcgatcagcataacctgaaacagaatgatcaaccaatggatattctccagatcataaactgcctgaccacgatttacgacaggctggagcaggaacataacaacctcgtgaacgtccctctgtgtgtggatatgtgtctgaattggcttcttaatgtgtacgatactggtcgcactggtcgcatcagggtgctgtcgtttaagaccggtataatctcgctgtgtaaagcccacctggaggacaagtaccggtacctctttaagcaagtcgcctcgagcaccgggttctgtgatcaacggcggctgggtctgcttctgcacgatagcatacagatacctcgtcaactcggagaagtggcatcctttgggggttcgaatattgagccatccgtgcgatcctgctttcagtttgcgaacaacaaacctgaaattgaagcagcacttttcttggattggatgagacttgaacctcaatccatggtctggctgcctgtccttcacagagtggcagcagccgaaaccgcaaaacatcaggcaaagtgcaacatctgcaaagaatgcccaatcatcggctttcgttaccgatccctcaagcactttaactacgatatttgtcaaagctgtttcttttccggtagagtggcaaaggggcacaagatgcattaccccatggtcgagtactgcaccccaaccactagcggagaagatgtgagggattttgcaaaggtgctgaagaataagttccgaaccaaaaggtactttgcaaagcacccacggatgggttaccttccagtgcagaccgtgttggaaggagataacatggaaaccgataccatg

SEQ ID NO: 342887 - DNA, 3591 bp, Artificial Sequence
  derived and/or modified sequence
atgctctggtgggaggaggtagaggattgttatgaaagggaagatgtgcaaaaaaagacatttactaagtgggtaaacgcgcagttctccaaatttggaaaacaacatattgagaatctgtttagtgatttgcaagatggacgtagactccttgatcttcttgaagggttaactggacaaaagctgccgaaggagaagggtagtacacgagttcacgcgttgaacaatgtcaataaagcgttgagagttttgcaaaacaataacgttgatctcgttaacataggatcaacagacattgttgacggaaaccataagctaacacttggtttgatttggaatattattctgcactggcaagtgaagaatgtaatgaaaaatataatggcgggcttacagcaaacgaatagtgaaaagatcctccttagctgggtgagacaatctacccgtaattatccgcaagtgaacgtaattaatttcactacaagctggagtgatggactcgctttgaatgcccttattcatagtcaccgtccagacttattcgattggaattcagttgtttgtcaacaatcagctacacaacggcttgagcatgcttttaatattgcacgatatcaacttggcatcgagaaattgttggacccggaagacgttgacactacatatccagataaaaaatcaattctcatgtatatcacttccctttttcaagtccttcctcagcaggtatctatagaagcgattcaagaagtggagatgcttccccgtccgccaaaggtgacaaaggaagaacattttcagctccatcaccagatgcactattcacagcaaattacagtttcattggctcagggttatgaaagaactagtagtcctaaaccaaggtttaagtcatatgcttacactcaagctgcgtacgtcaccacatctgatccaacgcgatcccctttcccaagtcaacatttggaagcacctgaggataagtctttcggatcttcgcttatggaatctgaggtcaatcttgacagatatcagaccgcgctggaagaggttttgtcctggctcctttcagcggaagatactttgcaagcacaaggagagataagtaatgatgtggaagtagtaaaagatcagtttcacacacatgagggttacatgatggacctgacagcccatcaaggacgtgttggaaacattttacagctcggatcaaaactaatcggaactggaaagctatcagaggatgaagagactgaggtgcaagaacaaatgaacctcttgaactcgcgatgggaatgcctgcgagtggcatccatggagaagcagagtaatctccatcgtgtccttatggatttgcaaaatcaaaaattgaaagagctaaacgattggctaactaaaactgaagagcggacaagaaaaatggaggaagagcctttgggtccggatcttgaagacctcaaacgccaggtacagcaacataaagttctccaggaggatttggaacaagaacaagtgcgagtcaactcacttactcatatggtggtggttgtagacgaatcttcgggagaccatgctaccgctgccttggaggaacaacttaaagttttgggagatcgttgggctaatatttgtcgttggacggaggacagatgggttttactccaagatattcttctgaagtggcaacgtctcacagaagagcaatgtctgttcagtgcatggttgtcagaaaaagaagatgcggttaataaaattcatacaactggtttcaaagatcaaaatgaaatgctgtcttctttacagaaactagccgtcctaaaagctgatttggaaaaaaagaagcagagcatgggtaagctatattcgctgaagcaagatttgctttcaacactaaaaaataagtcggtgacacaaaaaacagaagcctggttagataattttgcaagatgctgggataatctcgtccaaaaactagaaaagtctacagcccaaatctctcaggcggtaacgacaacacaaccatctcttacacaaaccacggttatggaaactgtgaccacagtgacaactcgagaacaaattctagtcaaacacgcgcaggaggagcttccaccgccgcccccacaaaagaaaaggcagattactgtggatacgcttgaacgtcttcaagaattgcaggaggctacggatgagctagatcttaagctgaggcaggctgaggttataaaaggatcctggcaacctgttggagatttgcttattgattcattgcaagatcatctcgaaaaggtgaaagcactgcgaggagaaatcgcgccactgaaggagaacgtctcacatgtcaacgacttggcacgccaattgactacactgggtattcaattgagtccatataatctttcaactcttgaagatctgaatacaagatggaagctacttcaggttgcagtggaagaccgagtccgtcagctgcatgaggcccatcgagacttcggcccagcatcacagcacttcctctctacttctgtacagggaccgtgggaaagggctattagtccaaataaggtgccgtattatattaatcacgaaacacagacaacatgctgggaccatcctaaaatgacagaattgtaccaatctcttgcagacctcaataatgtccgtttttcagcgtatcgtacggcgatgaagctacgcaggcttcaaaaggcgttgtgtttagatttattaagtcttagtgcggcttgcgacgcacttgaccaacacaacctcaagcaaaatgatcaaccaatggatatcctccaaatcatcaattgcctgaccaccatctatgacagactggaacaggaacataataatcttgtgaacgtcccgctttgtgtggatatgtgtttaaactggcttctaaacgtctacgatactggccgtactggacgaataagggtacttagctttaaaaccggaattatttcgctctgtaaggcacatcttgaagataaatacagatatttgtttaagcaagttgcaagttctacgggtttctgcgatcaaagaagattaggattacttctccatgactcaattcagatccctcgccagttgggggaagtcgcatcttttggagggtcaaatattgaaccatctgttcgtagctgttttcaattcgctaacaacaagcctgaaattgaagccgcgcttttcttggactggatgcgactcgaacctcaatcaatggtctggctaccggttctgcatcgtgttgcggccgcagagaccgctaaacatcaagcaaaatgcaatatttgtaaggaatgcccaataatcggattccgttaccgctcgcttaagcacttcaattacgatatttgtcaaagttgtttcttcagtggcagagttgcaaaagggcataagatgcactacccgatggttgaatactgtaccccaacaacatcaggagaagacgtcagagatttcgctaaagtgctcaaaaacaaattccgaacaaaacgttatttcgccaaacatccaagaatgggatatcttcccgtccagacagttctggaaggtgataatatggaaacagacacaatg

SEQ ID NO: 342888 - protein, 849 aa, Artificial Sequence
  derived and/or modified sequence
MALIMEPVSKWSPSQVVDWMKGLDDCLQQYIKNFEREKISGDQLLRITHQELEDLGVSRIGHQELILEAVDLLCALNYGLETENLKTLSHKLNASAKNLQNFITGRRRSGHYDGRTSRKLPNDFLTSVVDLIGAAKSLLAWLDRSPFAAVTDYSVTRNNVIQLCLELTTIVQQDCTVYETENKILHVCKTLSGVCDHIISLSSDPLVSQSAHLEVIQLANIKPSEGLGMYIKSTYDGLHVITGTTENSPADRCKKIHAGDEVIQVNHQTVPLIPRSPTSSVATPSSTISTPTKRDSSALQDLYIPPPPAEPYIPRDEKGNLPCEDLRGHMVGKPVHKGSESPNSFLDQEYRKRFNIVEEDTVLYCYEYEKGRSSSQGRRESTPTYGKLRPISMPVEYNWVGDYEDPNKMKRDSRRENSLLRYMSNEKIAQEEYMFQRNSKKDTGKKSKKKGDKSNSPTHYSLLPSLQMDALRQDIMGTPVPETTLYHTFQQSSLQHKSKKKNKGPIAGKSKRRISCKDLGRGDCEGWLWKKKDAKSYFSQKWKKYWFVLKDASLYWYINEEDEKAEGFISLPEFKIDRASECRKKYAFKACHPKIKSFYFAAEHLDDMNRWLNRINMLTAGYAERERIKQEQDYWSESDKEEADTPSTPKQDSPPPPYDTYPRPPSMSCASPYVEAKHSRLSSTETSQSQSSHEEFRQEVTGSSAVSPIRKTASQRRSWQDLIETPLTSSGLHYLQTLPLEDSVFSDSAAISPEHRRQSTLPTQKCHLQDHYGPYPLAESERMQVLNGNGGKPRSFTLPRDSGFNHCCLNAPVSACDPQDDVQPPEVEEEEEEEEEEGEAAGENIGEKS

SEQ ID NO: 342889 - DNA, 4355 bp, Artificial Sequence
  derived and/or modified sequence
gtcatttccgccgggcagctagtcgtgctcggggcttcactcccgcgcgtgaggcgagcgggcaagttggctgagggcgtgcggcagaggctgcttccctcggcgacgcgacccctcagcaactcaagctatgaactgaagctccctagggacggagaccggagcggagcggcggaggcagcagcagcagcagcagcagcagcagcagcagcagccgccgccgccgccgccttagcgggaactgagcagacccggcgcggagccacgactcctgcacgtttacctccctgtcgccgttcctgccggcggttggctaaaagacgttacagccgcgagacccgacacacaaaagccgctttctccgcgccgcccgcccagggaggctgcggccagcaagggaccccacctgagagcagctcgggctgctgagttcgttttgtgtctgagctctgcgctctgcacggaaccgaccccgtacccatggctctgataatggaaccggtgagcaaatggtctccgagtcaagtagtggactggatgaaaggtcttgatgactgtttgcagcagtatattaagaactttgagagggagaagatcagtggggaccagctgctgcgcattacacatcaggagctagaagatctgggggtcagccgcattggccatcaggaactgatcttggaagcagttgaccttctgtgtgcattgaattatggcttggaaacagaaaatctaaaaaccctttctcacaagttgaatgcatctgccaaaaatctgcagaattttataacaggaaggagaaggagtggccattatgatgggaggaccagccgaaaattgccaaacgactttctgacctcagttgtggatctgattggagcagccaagagtctgcttgcctggttggacaggtcaccatttgctgctgtgacagactattcagttacaagaaataatgtcatacaactctgcctggagttaacaacaattgtgcaacaggattgtactgtatatgaaacagagaataaaattcttcacgtgtgtaaaactctttctggagtctgtgaccacatcatatccctgtcgtcagatcctctggtttcacagtctgctcacctggaagtgattcaactggcaaacattaaaccaagcgaagggctgggtatgtatattaaatctacatatgatggcctccatgtaattactggaaccacagaaaattcacctgcagatcggtgcaagaaaatccatgctggcgatgaagtgattcaagttaatcatcagactgtgcctcttatacctagaagtcccacaagcagcgttgccacgccttccagcaccatcagtacacccaccaaaagagacagttctgccctccaggatctctacattccccctcctcctgcagaaccatatattcccagggatgaaaaaggaaaccttccttgtgaagacctcagaggacatatggtgggcaagccagtgcataagggatctgaatcaccaaattcatttctggatcaggaatatcgaaagagatttaatattgtcgaagaagatactgtcttatattgctatgaatatgaaaaaggaagatcaagtagtcaaggaagacgagaaagcaccccaacttatggcaagctacgacctatatctatgccagtggaatataattgggtgggggactatgaagatccaaataagatgaagagagatagtagaagagaaaactctctacttcggtatatgagcaatgaaaagattgctcaagaagaatacatgtttcagagaaacagcaaaaaggacacagggaagaagtcaaaaaagaagggtgataagagtaatagcccaactcactattcattgctacctagtttacaaatggatgcactgagacaagacatcatgggcactcctgtgccagagaccacactataccatacatttcagcagtcctcactgcagcacaaatcaaagaagaaaaacaaaggtcctatagcaggcaagagcaaaagacgaatttcttgcaaagatcttggccgtggtgactgtgagggctggctttggaaaaagaaagatgcgaagagttacttttcacagaaatggaaaaaatattggtttgtcctaaaggatgcatccctttattggtatattaatgaggaggatgaaaaagcagaaggattcattagcctgcctgaatttaaaattgatagagccagtgaatgccgcaaaaaatatgcattcaaagcctgtcatcctaaaatcaaaagcttttattttgctgctgaacatcttgatgatatgaacaggtggcttaacagaattaatatgctgactgcaggatatgcagaaagagagaggattaagcaggaacaagattactggagtgagagtgacaaggaagaagcagatactccatcaacaccaaaacaagatagccctccacccccatatgatacatacccacgacctccctcgatgagttgcgccagtccttatgtggaagcaaaacatagccgactttcctccacggagacttctcagtctcagtcttctcatgaggagtttcgccaggaagtaactgggagcagtgcagtgtctcccattcgcaagacagccagtcagcgccgctcctggcaggatttaattgagacgccactgacaagttcaggcttacactatcttcagactctgcccctggaggattctgtcttctctgactccgcggccatctccccagagcacaggcggcagtctaccctgccaactcagaaatgccacctgcaggatcactatgggccataccccttagctgagagtgagaggatgcaagtgctaaatggaaatgggggcaagcctcgaagttttactctgcctcgagatagcgggttcaaccattgctgtctgaatgctccagttagtgcctgtgacccacaggatgacgtgcaacccccagaggtggaggaagaggaggaggaggaggaggaggaaggggaggcagcaggggaaaacataggagaaaaaagctaatacactgcgagagttggtagaacctctccatgccaaatcggatccacttctgttggcactcaacccattggactcacagattgataagctaatgtttagagaatttagatcggagagagtcggtacggcgcagactcaacatcaacctcttgcaagcaactaaaatggcctcgtccttgctgtttataacagaaaacagacttgtaaaaagcttagatcatcaagtgttttggattgggggcctcccaaagggatataagaggggcaggccactcttaagaagaatgcgagctttctacattgggactagcataagatcaaagccaatcaagatggagcacagtaacagaaaactgcggtttctgtgggagaacagaaggggaaagggtcttaactgggaaagggctctgtgtggtaacacctcagttgtgttctcctgacaccaggaaaagagagggatcagcttcaataactagaaaattctggctgtttaatggactctttggtggcctctttaaggcaaagcagagaaagcaaattatgtattaagtgtattttgcatttttaaaacttgacgtgctgtattgtactaaattaagtgtaatctattaaggcaaggtatacacaatttgctttgaaacttactatgtttattctattataaagtgtattcaggtgcaacacagagactgctttcggtgacattaatgaagaaaatttctcatgccaggctttattatagaatcttcagctaaaatcctaactttctccttatttcttggcacttgtatacaagtggtgttgcctcttagggcaggcatgagctattcttttctgtaaaatattttgaatctataggctgtgggtttcatttttgaaaagtattttgtctggatgtctttcaaactagcttcagatattatttaatactatgtaactgggtcccctatggctcaatcaatattgcttatttttcttctgtagtggatgtgaaatttcctttagttggataagatacactgtaataattttaatgctaattaatgatatttcatactgtgcaatgaacagataatttaacactgtattttgaaatgtttttttcttcctgtcaccgcagtgtgtggtattgcataatgtgaatacctgtaaaaatataaattacttaaaaataaaaatatgaccaattggtatcagatcttttcagatagctaaataatttgctaagtatgcctgatagtaaatatctttctaaaaagaagtaatcagtgcttctttctcacaaatggaatttgtgtctgtgaataaaatcacattgatctgcc

SEQ ID NO: 342890 - protein, 83 aa, Artificial Sequence
  derived and/or modified sequence
MEHDLMQRRLRRVSCTTAIPTPEEMTRLRSMNRQLQINVDCTLKEVDLLQSREVYYSRSSLKLSFTQLTRLEMVFIFCGKYTD

SEQ ID NO: 342891 - DNA, 252 bp, Artificial Sequence
  derived and/or modified sequence
atggagcacgacctgatgcagagaagactgagaagagtgagctgcaccaccgccatccccacccccgaggagatgaccagactgagaagcatgaacagacagctgcagatcaacgtggactgcaccctgaaggaggtggacctgctgcagagcagagaggtgtactacagcagaagcagcctgaagctgagcttcacccagctgaccagactggagatggtgttcatcttctgcggcaagtacaccgactag

SEQ ID NO: 342892 - DNA, 252 bp, Artificial Sequence
  derived and/or modified sequence
atggagcatgacctgatgcagagaagattacgccgtgtttcatgcacaactgcaatccccacacctgaggagatgaccaggctgcggtctatgaatcggcagctccagatcaacgttgattgcacgttgaaggaagttgatctgctccagtcacgagaggtgtattacagccggtccagcctgaaactgagcttcactcagctgacacgactagaaatggtgttcatcttctgtgggaagtacaccgactag

SEQ ID NO: 342893 - DNA, 252 bp, Artificial Sequence
  derived and/or modified sequence
atggagcatgacctgatgcagaggcggctgcggcgggtgtcctgcaccacagccatccccaccccagaggagatgacccggctgcgctccatgaaccggcagctgcagatcaacgtggactgcaccctgaaggaggtggacctgctgcagagccgggaggtgtactacagccgcagcagcctgaagctgtccttcacccagctgacccggctggagatggtgttcatcttctgtgggaagtacacagactag

SEQ ID NO: 342894 - DNA, 252 bp, Artificial Sequence
  derived and/or modified sequence
atggagcacgacctgatgcagcggcggctgcggcgggtgagctgcacgacggccattccaacacctgaggaaatgaccagactgcggtccatgaaccgccagctgcagatcaatgtggattgcacactgaaggaggtagacctcctgcaatcccgggaagtttattactccaggagcagcttaaaactgagcttcacccagctgacacgcttggagatggtgtttatattttgtggaaagtataccgattag

SEQ ID NO: 342895 - DNA, 252 bp, Artificial Sequence
  derived and/or modified sequence
atggagcacgatctaatgcagagaaggcttcgtcgtgtgagttgcaccactgccatccctacccctgaagagatgacgaggttgcgcagtatgaacaggcaactgcagatcaacgtagactgtacactgaaggaggtagatctgctccagtccagggaagtttactattctcgatcttcgctgaaactcagcttcacgcagctgactaggctagagatggtcttcatcttttgcggcaagtacacagattag

SEQ ID NO: 342896 - DNA, 405 bp, Artificial Sequence
  derived and/or modified sequence
aacttgagaaagaggagctagagcggttgaagtctgaagttaatggtatggagcatgacctgatgcagagacggctcagaagagtcagctgcaccactgcgatccctacgcctgaggaaatgacaagattgagaagcatgaacagacaactccagataaatgttgactgtacactgaaagaagttgacctccttcaatctagagaagtatactacagcagaagctctcttaaactttcatttacccaactcaccagattagagatggtcttcattttctgtggaaaatatactgactgatgtccacagctgctgcatacttttgactagtaggctgcattctggaaactttgatccaaaagccatgaataatttttatgacaacatagaacctggcccagttgta

SEQ ID NO: 342897 - protein, 205 aa, Artificial Sequence
  derived and/or modified sequence
MGTWILFACLLGAAFAMPLPPHPGHPGYINFSYENSHSQAINVDRTALVLTPLKWYQSIRPPYPSYGYEPMGGWLHHQIIPVLSQQHPPTHTLQPHHHIPVVPAQQPVIPQQPMMPVPGQHSMTPIQHHQPNLPPPAQQPYQPQPVQPQPHQPMQPQPPVHPMQPLPPQPPLPPMFPMQPLPPMLPDLTLEAWPSTDKTKREEVD

SEQ ID NO: 342898 - DNA, 618 bp, Artificial Sequence
  derived and/or modified sequence
atgggcacctggatcctgttcgcctgcctgctgggcgccgccttcgccatgcccctgcccccccaccccggccaccccggctacatcaacttcagctacgagaacagccacagccaggccatcaacgtggacagaaccgccctggtgctgacccccctgaagtggtaccagagcatcagacccccctaccccagctacggctacgagcccatgggcggctggctgcaccaccagatcatccccgtgctgagccagcagcacccccccacccacaccctgcagccccaccaccacatccccgtggtgcccgcccagcagcccgtgatcccccagcagcccatgatgcccgtgcccggccagcacagcatgacccccatccagcaccaccagcccaacctgcccccccccgcccagcagccctaccagccccagcccgtgcagccccagccccaccagcccatgcagccccagccccccgtgcaccccatgcagcccctgcccccccagccccccctgccccccatgttccccatgcagcccctgccccccatgctgcccgacctgaccctggaggcctggcccagcaccgacaagaccaagagagaggaggtggactag

SEQ ID NO: 342899 - DNA, 835 bp, Artificial Sequence
  derived and/or modified sequence
aaaggatcaagcatccctgagtttcaaacagaaacttgcactgaatacattcaaagaaccatcaagaaatggggacctggattttatttgcctgcctcctgggagcagcttttgccatgcctctaccacctcatcctgggcaccctggttatatcaacttcagctatgagaactcacattctcaggctatcaatgttgacaggactgcattagtgcttacccctttgaagtggtaccagagcataaggccaccgtacccttcctatggttacgagcccatgggtggatggctgcaccaccaaatcatccccgtgctgtcccaacagcaccccccgactcacaccctgcagcctcatcaccacatcccagtggtgccagctcagcagcccgtgatcccccagcaaccaatgatgcccgttcctggccaacactccatgactccaatccaacaccaccagccaaacctccctccgcccgcccagcagccctaccagccccagcctgttcagccacagcctcaccagcccatgcagccccagccacctgtgcaccccatgcagcccctgccgccacagccacctctgcctccgatgttccccatgcagcccctgcctcccatgcttcctgatctgactctggaagcttggccatcaacagacaagaccaagcgggaggaagtggattaaaagatcagaagatgagaggggaatgaatacttcagatgctttcaggagtgacacaagaacacaatgatttttgcttataatcactttacttagcaaattctgtaactaaaaaagtaccattagcagacaataaaatgcattaaaaatca

SEQ ID NO: 342900 - DNA, 618 bp, Artificial Sequence
  derived and/or modified sequence
atggggacttggattctattcgcctgtctgcttggagctgcttttgccatgcccctgcccccgcaccctggacacccagggtacattaacttttcctacgaaaattctcatagccaggccatcaacgtcgacaggactgcacttgtactgacgcccctgaaatggtaccagtctatccgcccaccgtatccttcatacgggtacgagcctatgggaggctggctgcatcatcaaatcatccccgtattgtcccagcaacatcccccaactcacacacttcagcctcatcaccacattcccgtggtgccagctcagcaaccagtgatcccacagcagccaatgatgccagtccccggtcagcactccatgacccccatccagcaccaccaacctaatctaccaccccccgcacaacaaccttatcagccccagcccgtacaaccccagcctcaccagcctatgcagccacagccccccgtgcaccccatgcaacccttaccccctcagccaccactgcctccgatgttccctatgcagcctttacctcctatgcttcctgatctgaccttagaggcctggccaagcaccgacaagaccaagagagaggaagttgactag

SEQ ID NO: 342901 - DNA, 618 bp, Artificial Sequence
  derived and/or modified sequence
atgggcacctggatcctgtttgcctgcctgctgggcgccgcctttgccatgcccctgcccccccaccctggccaccctggctacatcaacttctcctatgagaacagccacagccaggccatcaacgtggacagaacagccctggtgctgacccccctgaagtggtaccagagcatccggcccccctaccccagctatggctatgagcccatgggcggctggctgcaccaccagatcatccctgtgctgagccagcagcacccccccacccacaccctgcagccccaccaccacatccctgtggtgcctgcccagcagcctgtgatcccccagcagcccatgatgcctgtgcccggccagcacagcatgacccccatccagcaccaccagcccaacctgcccccaccagcccagcagccctaccagccccagcctgtgcagccccagccccaccagcccatgcagccccagccccctgtgcaccccatgcagcccctgcccccccagccccccctgccccccatgttccccatgcagcccctgccccccatgctgcctgacctgaccctggaggcctggcccagcacagacaagaccaagcgggaggaggtggactag

SEQ ID NO: 342902 - DNA, 618 bp, Artificial Sequence
  derived and/or modified sequence
atgggcacctggatcctgttcgcctgcctgctgggcgccgccttcgcaatgcctctgccgccacacccaggtcatccagggtacatcaattttagctatgagaattcacactcacaggccattaacgtggacaggaccgcactggtactcacccctctgaagtggtatcagagtatccgcccaccttatcctagttatggttatgagccgatgggagggtggctacaccatcagatcatacctgtactgtcccagcagcaccccccaacccacaccctccaaccacaccaccacatccctgttgtgcccgcccagcaacccgtgattccccagcagcctatgatgcctgtgccaggccagcacagcatgaccccgatacagcatcaccagcccaatttacctccacccgcacagcagccctatcagccccagcccgtgcaaccgcagcctcatcagccaatgcagcctcaaccgccagttcaccccatgcaacctctgcctccacagccacctcttccacccatgttccccatgcagcctcttcctcccatgctgccagatctgacacttgaagcatggccttccactgataaaactaagcgggaggaggtggattag

SEQ ID NO: 342903 - DNA, 618 bp, Artificial Sequence
  derived and/or modified sequence
atgggcacgtggatactgttcgcctgcttattgggtgctgccttcgcaatgccactgccgcctcaccctggtcatcccggttatataaacttcagttatgagaattctcattcccaggcaattaatgtcgacagaacagctctggtcctgacgcctctcaagtggtatcagagcatccgacccccttatccaagctacggttatgagccaatgggagggtggctacaccatcagattattccggtcctgtctcagcaacacccgccaacccatacactgcagccccaccatcacattccagtggtgccagcgcaacagccggtcatcccacagcagccaatgatgccagtgcctgggcagcactccatgactcctatccaacatcatcagccaaatctgccaccacccgcacagcagccctaccagcctcagcccgtccagccccaacctcaccagcctatgcagccacagccgccagtacaccccatgcaacctttgccccctcagcctccgttaccccctatgttccccatgcagcctttgccaccgatgctgcccgatttaacgttagaagcttggcccagtacagataaaaccaagagggaggaggtggactag

SEQ ID NO: 342904 - DNA, 618 bp, Artificial Sequence
  derived and/or modified sequence
atgggaacttggatcttgtttgcttgccttttgggtgccgctttcgctatgccactcccaccccacccgggtcaccctgggtatattaatttcagctatgaaaactcgcactcacaagcaattaacgtggaccgaaccgccctcgtcctgactccccttaagtggtaccagagtattagaccaccatatccttcttacggatacgagccaatgggcggctggttgcaccatcagatcatacccgtcctgtcccagcaacaccccccaacacacaccctacagccccaccaccatatacctgtagtacctgctcagcagcctgtgatcccccagcaacctatgatgcccgtgcccggccagcacagcatgacaccaatccagcaccaccagcccaatcttccaccgcctgcgcagcagccataccagcctcaaccagttcagcctcagccgcaccagcccatgcagccccagccacctgttcatcctatgcagcccctgccaccacagcctcccctccctcctatgttccctatgcagccgttacccccaatgctgcctgacctgaccctggaagcatggccaagtactgataagaccaaaagagaagaagtggattag

SEQ ID NO: 342905 - DNA, 618 bp, Artificial Sequence
  derived and/or modified sequence
atgggcacgtggattttgtttgcatgcctgttaggagcagctttcgccatgcccctgcccccccatcccggccatcccggttacatcaatttctcttacgaaaactctcacagccaagccatcaatgttgaccgcacagccctcgtcctgacacctttaaagtggtatcagtcaattcggccaccatacccctcttacggatatgagcccatgggcggctggctgcatcaccaaatcattcctgtcctcagtcagcagcatcctcccacacacaccctccagccccaccatcacattccagtagtcccagcacaacagcctgttattccacagcagcccatgatgcctgtgcccggacagcacagtatgactccaatccagcaccaccagccaaacctccctccacctgcccagcaaccatatcaaccccagcctgttcagccgcagccccatcagccaatgcagccccaacctcccgttcaccccatgcaaccactacccccgcagccaccactcccgcctatgtttcctatgcagcctcttccaccaatgctgccggacctgaccctagaagcctggcccagcaccgataaaacgaaacgagaagaagtagattag

SEQ ID NO: 342906 - RNA, 618 nt, Artificial Sequence
  derived and/or modified sequence
augggaacuuggaucuuguuugcuugccuuuugggugccgcuuucgcuaugccacucccaccccacccgggucacccuggguauauuaauuucagcuaugaaaacucgcacucacaagcaauuaacguggaccgaaccgcccucguccugacuccccuuaagugguaccagaguauuagaccaccauauccuucuuacggauacgagccaaugggcggcugguugcaccaucagaucauacccguccugucccagcaacaccccccaacacacacccuacagccccaccaccauauaccuguaguaccugcucagcagccugugaucccccagcaaccuaugaugcccgugcccggccagcacagcaugacaccaauccagcaccaccagcccaaucuuccaccgccugcgcagcagccauaccagccucaaccaguucagccucagccgcaccagcccaugcagccccagccaccuguucauccuaugcagccccugccaccacagccuccccucccuccuauguucccuaugcagccguuacccccaaugcugccugaccugacccuggaagcauggccaaguacugauaagaccaaaagagaagaaguggauuag

SEQ ID NO: 342907 - RNA, 618 nt, Artificial Sequence
  derived and/or modified sequence
augggcacguggauuuuguuugcaugccuguuaggagcagcuuucgccaugccccugcccccccaucccggccaucccgguuacaucaauuucucuuacgaaaacucucacagccaagccaucaauguugaccgcacagcccucguccugacaccuuuaaagugguaucagucaauucggccaccauaccccucuuacggauaugagcccaugggcggcuggcugcaucaccaaaucauuccuguccucagucagcagcauccucccacacacacccuccagccccaccaucacauuccaguagucccagcacaacagccuguuauuccacagcagcccaugaugccugugcccggacagcacaguaugacuccaauccagcaccaccagccaaaccucccuccaccugcccagcaaccauaucaaccccagccuguucagccgcagccccaucagccaaugcagccccaaccucccguucaccccaugcaaccacuacccccgcagccaccacucccgccuauguuuccuaugcagccucuuccaccaaugcugccggaccugacccuagaagccuggcccagcaccgauaaaacgaaacgagaagaaguagauuag

SEQ ID NO: 342908 - protein, 186 aa, Artificial Sequence
  derived and/or modified sequence
MSPKPRASGPPAKATEAGKRKSSSQPSPSDPKKKTTKVAKKGKAVRRGRRGKKGAATKMAAVTAPEAESAPAAPGPSDQPSQELPQHELPPEEPVSEGTQHDPLSQEAELEEPLSQESEVEEPLSQESQVEEPLSQESEVEEPLSQESQVEEPLSQESEMEEPLSQESQVEEPPSQESEMEELPSV

SEQ ID NO: 342909 - DNA, 2401 bp, Artificial Sequence
  derived and/or modified sequence
gtcacccaggaaaccggccgcaatcgccggccgacctgaagctggtttcatggcagcctcaaagaaggcagttttggggccattggtgggggcggtggaccagggcaccagttcgacgcgctttttggttttcaattcaaaaacagctgaactacttagtcatcatcaagtagaaataaaacaagagttcccaagagaaggatgggtggaacaggaccctaaggaaattctacattctgtctatgagtgtatagagaaaacatgtgagaaacttggacagctcaatattgatatttccaacataaaagataaccctacctcctgcttcatggagaaagttgagggtctgcggccttaaatcctcaccttcctgttgctgtgcttaatatctggatctcctgccaactttccttcatcacaagggcagcaatagccttctgccccacttggagctcctccctccacttgtgctgctattggtgtcagcaaccagagggaaaccactgtagtctgggacaagataactggagagcctctctacaatgctgtggtgtggcttgatctaagaacccagtctaccgttgagagtcttagtaaaagaattccaggaaataataactttgtcaagtccaagacaggccttccacttagcacttacttcagtgcagtgaaacttcgttggctccttgacaatgtgagaaaagttcaaaaggccgttgaagaaaaacgagctctttttgggactattgattcatggcttatttggagtttgacaggaggagtcaatggaggtgtccactgtacagatgtaacaaatgcaagtaggactatgcttttcaacattcattctttggaatgggataaacaactctgcgaattttttggaattccaatggaaattcttccaaatgtccggagttcttctgagatctatggcctaatgaaaatctctcatagcgtgaaagctggggccttggaaggtgtgccaatatctgggtgtttaggggaccagtctgctgcattggtgggacaaatgtgcttccagattggacaagccaaaaatacgtatggaacaggatgtttcttactatgtaatacaggccataagtgtgtattttctgatcatggccttctcaccacagtggcttacaaacttggcagagacaaaccagtatattatgctttggaaggttctgtagctatagctggtgctgttattcgctggctaagagacaatcttggaattataaagacctcagaagaaattgaaaaacttgctaaagaagtaggtacttcttatggctgctacttcgtcccagcattttcggggttatatgcaccttattgggagcccagcgcaagagggataatctgtggactcactcagttcaccaataaatgccatattgcttttgctgcattagaagctgtttgtttccaaactcgagagattttggatgccatgaatcgagactgtggaattccactcagtcatttgcaggtagatggaggaatgaccagcaacaaaattcttatgcagctacaagcagacattctgtatataccagtagtgaagccctcaatgcccgaaaccactgcactgggtgcggctatggcggcaggggctgcagaaggagtcggcgtatggagtctcgaacccgaggatttgtctgccgtcacgatggagcggtttgaacctcagattaatgcggaggaaagtgaaattcgttattctacatggaagaaagctgtgatgaagtcaatgggttgggttacaactcaatctccagaaagtggtgaccctagtatcttctgtagtctgcccttgggcttttttatagtgagtagcatggtaatgttaatcggagcaaggtacatctcaggtattccataaaacctaccaactcatggattcccaagatgtgagctttttacataatgaaagaacccagcaattctgtctcttaatgcaatgacactattcatagactttgattttatttataagccacttgctgcatgaccctccaagtagacctgtggcttaaaataaagaaaatgcagcaaaaagaatgctatagaaatatttggtggttttttttttttttaaacatccacagttaaggttgggccagctacctttggggctgaccccctccattgccataacatcctgctccattccctctaagatgtaggaagaattcggatccttaccattggaatcttccatcgaacatactcaaacacttttggaccaggatttgagtctctgcatgacatatacttgattaaaaggttattactaacctgttaaaaatcagcagctctttgcttttaacagacaccctaaaagtcttcttttctacatagttgaagacagcaacatcttcactgaatg

SEQ ID NO: 342910 - protein, 367 aa, Artificial Sequence
  derived and/or modified sequence
MAYLDNFKTNARHFILFVNISSLTGGVNGGVHCTDVTNASRTMLFNIHSLEWDKQLCEFFGIPMEILPNVRSSSEIYGLMKISHSVKAGALEGVPISGCLGDQSAALVGQMCFQIGQAKNTYGTGCFLLCNTGHKCVFSDHGLLTTVAYKLGRDKPVYYALEGSVAIAGAVIRWLRDNLGIIKTSEEIEKLAKEVGTSYGCYFVPAFSGLYAPYWEPSARGIICGLTQFTNKCHIAFAALEAVCFQTREILDAMNRDCGIPLSHLQVDGGMTSNKILMQLQADILYIPVVKPSMPETTALGAAMAAGAAEGVGVWSLEPEDLSAVTMERFEPQINAEESEIRYSTWKKAVMKSMGWVTTQSPESGIP

SEQ ID NO: 342911 - DNA, 1065 bp, Artificial Sequence
  derived and/or modified sequence
atgctgtttaatatacactcacttgaatgggataagcaactgtgcgaattcttcggaattcctatggagatccttccaaacgtgcgttcttcctcagagatatacgggctgatgaaaatcagccatagcgtgaaggccggcgctctggagggagtcccaatttctggctgccttggagatcagtctgccgcgttggtgggacaaatgtgctttcagatcgggcaggcgaagaacacttacggcacgggttgtttcctcctatgtaatactggccacaaatgcgtgttttcagatcatggattgctaactactgtggcctacaaattgggcagggacaagcctgtgtattacgccttggaggggtctgtggcgatcgccggagccgtaatacgctggcttcgagataatctcgggatcatcaagacctccgaggagatagaaaagctcgctaaagaggtgggcacctcctacggctgctactttgttccagccttcagtgggctgtacgccccctactgggaaccatcagctcgaggtatcatatgcggacttactcaattcaccaacaaatgtcacatcgcattcgctgccctggaggctgtgtgcttccagacccgggagatcctggatgctatgaatcgagattgtgggatcccgctaagtcacctgcaggtggacggcggaatgacatccaacaagatcctgatgcagctccaggccgacatcttatacatacccgtcgtcaagccgagtatgcccgaaactacggccctcggggccgccatggctgccggagctgccgaaggtgtcggggtgtggagcctggagcctgaggatctgtcagccgtgactatggaacggttcgaaccgcagatcaatgccgaagagtctgagatccggtacagcacctggaaaaaggctgtgatgaagtcgatgggctgggtcaccactcagagccccgaatctggagacccctccatcttttgtagcctgcctctgggattcttcattgtttcttctatggttatgttgatcggggcccgctatatttctgggataccttag

SEQ ID NO: 342912 - DNA, 1065 bp, Artificial Sequence
  derived and/or modified sequence
atgctgttcaacatccacagcctggagtgggacaagcagctgtgtgagttcttcggcatccccatggagatcctgcccaacgtgcgcagcagcagcgagatctacggcctgatgaagatcagccacagcgtgaaggccggggccctggagggcgtgcccatcagcggctgcctgggggaccagagcgctgccctggtgggccagatgtgcttccagatcggccaggccaagaacacctacggcaccggctgcttcctgctgtgcaacacaggccacaagtgtgtgttcagtgaccacggcctgctgaccaccgtggcctacaagctgggccgggacaagcctgtgtactatgccctggagggctctgtggccatcgccggggccgtcatccgctggctgcgggacaacctgggcatcatcaagaccagcgaggagattgagaagctggccaaggaggtgggcaccagctatggctgctactttgtgcctgccttcagcggcctgtatgccccctactgggagcccagcgcccggggcatcatctgtggcctgacccagttcaccaacaagtgccacatcgcctttgctgccctggaggccgtgtgcttccagacccgggagatcctggatgccatgaacagagactgtggcatccccctgagccacctgcaggtggatggcggcatgaccagcaacaagatcctgatgcagctgcaggccgacatcctgtacatccctgtggtgaagcccagcatgcctgagaccacagccctgggcgccgccatggccgccggggctgctgagggcgtgggcgtgtggagcctggagcctgaggacctgtctgctgtgaccatggagagatttgagccccagatcaatgctgaggagagcgagatccgctacagcacctggaagaaggctgtgatgaagtccatgggctgggtgaccacccagagccctgagagcggggaccccagcatcttctgcagcctgcccctgggcttcttcatcgtgtcctccatggtgatgctgattggagcccgctacatcagcggcatcccctag

SEQ ID NO: 342913 - DNA, 1065 bp, Artificial Sequence
  derived and/or modified sequence
atgctgttcaacatccacagcctggagtgggacaagcagctgtgcgagttctttgggatccctatggagattctgccaaacgttcggagttcttccgaaatttatggattaatgaaaatttcccattcagtcaaggcaggcgccctcgagggagtacccattagcggttgtctgggagaccagagtgctgctctggttggacagatgtgtttccagattggacaagcaaaaaacacttatggaactggctgctttctgttatgcaatacaggccacaagtgtgtttttagcgaccacgggcttctaacgaccgtggcgtacaaactagggcgagataagcctgtttattatgcactcgaagggtcggttgccatcgcgggcgctgttatacgatggctgagagataacctgggaataatcaagacaagcgaggaaattgaaaagcttgccaaagaagtgggcacttcttacggatgctatttcgtcccagctttttccggattatacgccccatattgggagccatctgcccgcggtatcatttgcgggctgactcaatttacaaacaagtgtcacatcgctttcgccgcactcgaggcagtctgtttccagactagagagattcttgatgctatgaacagggactgcggcattcccctttcacatttgcaggttgacggtggaatgacaagcaataagattctgatgcagctccaggcggatatactgtacataccagttgttaaaccaagcatgcccgagactaccgctctgggtgcggcaatggcagccggcgcagccgaaggcgtcggcgtgtggtcactggaaccagaggatctctctgctgtaactatggagaggtttgagcctcagattaatgcggaagagagcgaaattagatacagcacctggaaaaaggcagtcatgaaaagcatgggatgggtgacaacacaaagccctgaaagcggggacccatcaatattctgcagcttgcctctcggattctttatcgtgagcagtatggttatgcttatcggagcccgatatatatccggcattccatag

SEQ ID NO: 342914 - DNA, 1065 bp, Artificial Sequence
  derived and/or modified sequence
atgctgttcaacatccattcactggagtgggataaacagctgtgtgaattttttggaattccgatggagattctcccaaatgttagaagttctagcgagatctatggcctgatgaaaatctctcactcggtaaaagccggagcactagagggcgttccaatatccgggtgcctaggcgaccagtctgctgcactagttggccagatgtgcttccagattggacaggcgaaaaacacctacggaaccggatgtttcctgctctgcaataccggtcataagtgcgtgttttctgaccacggattacttactaccgtggcttataagttagggcgagataaacccgtgtactacgcccttgaggggagtgtggctatcgccggagcagtcatcaggtggctcagagataatctgggaatcattaaaactagcgaagagatcgagaaactggccaaagaagttggtacgtcatacgggtgctacttcgtgcccgctttctctgggctttatgcaccttattgggagccgtccgccaggggaataatatgtggactgactcagtttaccaacaagtgtcacattgccttcgccgctctggaggccgtgtgttttcagactcgagaaattttagatgctatgaatagggactgcgggattcccttatcccacctccaggttgacgggggaatgacctctaacaaaatacttatgcagcttcaggcagatatactgtacatcccagtggtgaagccaagtatgcctgagacgactgccctgggtgctgccatggctgctggcgcagccgagggcgtgggagtgtggagtttggagcccgaagacctgtctgccgtgaccatggaaagattcgagccccaaatcaatgctgaagaaagtgaaatacgatattcaacttggaagaaagccgtgatgaagtccatgggatgggtcacaactcagagtcccgagtctggcgatccgtcaatcttctgctcactgccgcttggattctttatcgtaagtagcatggtgatgctgatcggcgctaggtatattagcggaattccgtag

SEQ ID NO: 342915 - DNA, 1065 bp, Artificial Sequence
  derived and/or modified sequence
atgctgttcaacatccacagcctggagtgggacaagcagctgtgcgagttcttcggcatccccatggagatcctgcccaacgtgagaagcagcagcgagatctacggcctgatgaagatcagccacagcgtgaaggccggcgccctggagggcgtgcccatcagcggctgcctgggcgaccagagcgccgccctggtgggccagatgtgcttccagatcggccaggccaagaacacctacggcaccggctgcttcctgctgtgcaacaccggccacaagtgcgtgttcagcgaccacggcctgctgaccaccgtggcctacaagctgggcagagacaagcccgtgtactacgccctggagggcagcgtggccatcgccggcgccgtgatcagatggctgagagacaacctgggcatcatcaagaccagcgaggagatcgagaagctggccaaggaggtgggcaccagctacggctgctacttcgtgcccgccttcagcggcctgtacgccccctactgggagcccagcgccagaggcatcatctgcggcctgacccagttcaccaacaagtgccacatcgccttcgccgccctggaggccgtgtgcttccagaccagagagatcctggacgccatgaacagagactgcggcatccccctgagccacctgcaggtggacggcggcatgaccagcaacaagatcctgatgcagctgcaggccgacatcctgtacatccccgtggtgaagcccagcatgcccgagaccaccgccctgggcgccgccatggccgccggcgccgccgagggcgtgggcgtgtggagcctggagcccgaggacctgagcgccgtgaccatggagagattcgagccccagatcaacgccgaggagagcgagatcagatacagcacctggaagaaggccgtgatgaagagcatgggctgggtgaccacccagagccccgagagcggcgaccccagcatcttctgcagcctgcccctgggcttcttcatcgtgagcagcatggtgatgctgatcggcgccagatacatcagcggcatcccctag

SEQ ID NO: 342916 - DNA, 909 bp, Artificial Sequence
  derived and/or modified sequence
atggaaattggacggtatcattggatgtatcccggctcaaagaaccatcaatatcacccggtgcctacgctgggagacagagcctcccccctctcctccccaggatgctttgaatgctgcatcaaatgtctggggggcgttccatatgcatccctggtggccaccattctttgtttcagcggggtcgcgctgttctgtgggtgtggacacgtggcactcgctggtacagtggcaatcctcgagcagcacttctcaacgaacgcttccgaccatgcattactgagcgaggttattcagctgatgcagtatgtcatctatggcatagcatcgttcttcttcctctatgggatcatactgctggccgagggattctatacaacctcagccgtgaaggagctgcatggggaatttaaaactacagcttgtggcaggtgcatctctggtatgtttgtgtttctgacttacgttttaggcgttgcttggctcggggtcttcggattctccgctgtgcccgtttttatgttttacaatatctggtcgacctgcgaggtcattaagtctccccagactaatggcaccactggagtggagcagatctgcgtggatattcggcaatatggcatcataccatggaacgcgtttccaggcaaaatctgtggttccgctttagagaacatttgcaacacaaatgagttttacatgagttaccaccttttcattgtggcatgtgcaggggcaggcgcaactgtgattgccctgattcatttcctgatgatcttaagcagcaactgggcctatctcaaggatgcctctaaaatgcaagcatatcaagacatcaaggccaaagaagaacaggagctgcaggacattcagagccggagcaaagaacagcttaacagttatacatag

SEQ ID NO: 342917 - DNA, 1372 bp, Artificial Sequence
  derived and/or modified sequence
cttttgcatcttggaagggactgtaatctactgtagtgaagaacagagcctctcaatcagacgggtgtaaataagagacggaggggagtccaaaagaaaaggaagaggaggaaaaacaagtgtgtgttggggggaacagggggaaaagcatttttggtggatggtatgaagccagccatggaaactgcagccgaggaaaatactgaacaaagccaagagagaaaagaacatttaaatgtggaaaagatctcaacgagccatttgtgaacagcagagctgaaatggaaattggcaggtaccactggatgtacccaggctcaaagaaccaccagtaccatcccgtgccaaccctgggggacagggctagccccttgagcagtccaggctgctttgaatgctgcatcaagtgtctgggaggagtcccctacgcctccctggtggccaccatcctctgcttctccggggtggccttattctgcggctgtgggcatgtggctctcgcaggcaccgtggcgattcttgagcaacacttctccaccaacgccagtgaccatgccttgctgagcgaggtgatacaactgatgcagtatgtcatctatggaattgcgtcctttttcttcttgtatgggatcattctgttggcagaaggcttttacaccacaagtgcagtgaaagaactgcacggtgagtttaaaacaaccgcttgtggccgatgcatcagtggaatgttcgttttcctcacctatgtgcttggagtggcctggctgggtgtgtttggtttctcagcggtgcccgtgtttatgttctacaacatatggtcaacttgtgaagtcatcaagtcaccgcagaccaacgggaccacgggtgtggagcagatctgtgtggatatccgacaatacggtatcattccttggaatgctttccccggaaaaatatgtggctctgccctggagaacatctgcaacacaaacgagttctacatgtcctatcacctgttcattgtggcctgtgcaggagctggtgccaccgtcattgccctgatccacttcctcatgatactgtcttctaactgggcttacttaaaggatgcgagcaaaatgcaggcttaccaggatatcaaagcaaaggaagaacaggaactgcaagatatccagtctcggtcaaaagaacaactcaattcttacacataaatgtttgccagagtgtttcggccgacgtatttacagctctgacaaatcatcagacagctgctctgcagtacagatgtgtatcccaccaaactaatgtagatgtacaaacacttcactgtctgtctcaagctgctgggatgtatctctaggaaaaccttccagtgggtaaatctttttcttta

SEQ ID NO: 342918 - DNA, 909 bp, Artificial Sequence
  derived and/or modified sequence
atggagatcggccgctaccactggatgtacccaggcagcaagaaccaccagtaccaccctgtgcccaccctgggggaccgggccagccccctgagcagccctggctgctttgagtgctgcatcaagtgcctgggcggcgtgccctatgccagcctggtggccaccatcctgtgcttcagcggcgtggccctcttctgtggctgcggccacgtggccctggccggcaccgtggccatcctggagcagcacttcagcaccaatgccagtgaccacgccctgctgtctgaggtgatccagctgatgcagtatgtgatctacggcatcgccagcttcttcttcctgtatggcatcatcctgctggccgagggcttctacaccaccagcgctgtgaaggagctgcacggggagttcaagaccacagcctgtggccgctgcatcagcggcatgtttgtgttcctgacctacgtgctgggcgtggcctggctgggcgtgtttggcttctctgctgtgcctgtgttcatgttctacaacatctggagcacctgtgaggtgatcaagagcccccagaccaacggcaccaccggggtggagcagatctgtgtggacatccggcagtatggcatcatcccctggaatgccttccctgggaagatctgtggcagcgccctggagaacatctgcaacaccaatgagttctacatgagctaccacctgttcatcgtggcctgtgccggggccggggccaccgtgattgccctgatccacttcctgatgatcctgagcagcaactgggcctacctgaaggatgccagcaagatgcaggcctaccaggacatcaaggccaaggaggagcaggagctgcaggacatccagagccgcagcaaggagcagctgaacagctacacctag

SEQ ID NO: 342919 - DNA, 909 bp, Artificial Sequence
  derived and/or modified sequence
atggagatcggccggtaccactggatgtaccccggcagcaagaaccaccagtaccaccctgtaccaactctaggtgatcgagcaagccccctcagcagccccggctgcttcgagtgctgcattaaatgcctgggtggcgtaccatatgctagtctcgtggctacgattctgtgctttagcggcgtggccctattctgtgggtgtggccacgtagccctcgcaggtactgtggccatcctcgagcagcatttttccaccaacgcatctgatcatgccctacttagcgaagtcattcaattgatgcagtatgtcatctacgggattgcgagctttttcttcctgtacggaatcatcctcctggccgaggggttctacaccaccagtgcagtcaaagaactacacggtgaattcaaaacaactgcctgcgggcggtgcatctcaggaatgtttgtttttctgacttacgtgttaggcgtagcctggctgggcgtttttggctttagcgctgtcccagtgttcatgttttacaatatctggagtacctgtgaggtcatcaagagcccacagactaatgggacaacaggggtggagcagatttgcgtagacatccggcagtatggaattataccgtggaatgctttccctggtaaaatctgtgggagcgccctggagaacatttgcaatactaacgagttttacatgtcctatcacttgttcattgtggcgtgcgctggcgcaggcgccactgtgatcgcattaatccactttctgatgatattatctagcaactgggcatacctgaaagacgcgagcaagatgcaagcctatcaggatataaaagccaaggaagaacaagagctgcaagacattcagagcagatcaaaagagcagctgaacagttatacatag

SEQ ID NO: 342920 - DNA, 909 bp, Artificial Sequence
  derived and/or modified sequence
atggaaatcggacgataccactggatgtacccgggatctaagaatcaccaataccaccccgttccgaccctgggcgatagagcatcaccactgtcttcgcccggatgttttgaatgctgcatcaagtgcctgggaggagtgccctacgcaagcctggtcgccacaatcctctgcttcagcggcgtggccctgttttgcgggtgtggtcatgttgccctcgcaggcaccgtcgccatcctggaacagcacttcagtacgaatgcttctgatcacgctctgctttccgaagttatccaactcatgcaatatgttatttacggcattgcctccttcttctttctgtatggcattatactgctggccgaaggattttacactacaagcgctgttaaggaactgcatggcgagtttaagacaaccgcctgcggccgttgcatttccggaatgtttgtttttttaacttacgttttaggggttgcatggctgggggtgttcggtttctcagccgtgcccgtgtttatgttttacaacatctggtcaacatgtgaagttatcaagtcaccgcagaccaacggcaccacaggcgtggaacagatttgcgtggatattaggcaatacgggatcataccatggaatgcttttccaggcaagatctgcggaagtgctttggagaatatttgtaatacaaatgaattttacatgtcttaccacttgtttatagttgcatgcgcaggagcaggagccaccgtcatcgccttgattcactttttaatgatcttatcttccaactgggcctatctcaaggacgcttccaaaatgcaggcctaccaggacatcaaagccaaagaggagcaggagctgcaagacatccagtctcggtcgaaggaacagttgaactcctatacatag

SEQ ID NO: 342921 - DNA, 909 bp, Artificial Sequence
  derived and/or modified sequence
atggagatcggcagataccactggatgtaccccggcagcaagaaccaccagtaccaccccgtgcccaccctgggcgacagagccagccccctgagcagccccggctgcttcgagtgctgcatcaagtgcctgggcggcgtgccctacgccagcctggtggccaccatcctgtgcttcagcggcgtggccctgttctgcggctgcggccacgtggccctggccggcaccgtggccatcctggagcagcacttcagcaccaacgccagcgaccacgccctgctgagcgaggtgatccagctgatgcagtacgtgatctacggcatcgccagcttcttcttcctgtacggcatcatcctgctggccgagggcttctacaccaccagcgccgtgaaggagctgcacggcgagttcaagaccaccgcctgcggcagatgcatcagcggcatgttcgtgttcctgacctacgtgctgggcgtggcctggctgggcgtgttcggcttcagcgccgtgcccgtgttcatgttctacaacatctggagcacctgcgaggtgatcaagagcccccagaccaacggcaccaccggcgtggagcagatctgcgtggacatcagacagtacggcatcatcccctggaacgccttccccggcaagatctgcggcagcgccctggagaacatctgcaacaccaacgagttctacatgagctaccacctgttcatcgtggcctgcgccggcgccggcgccaccgtgatcgccctgatccacttcctgatgatcctgagcagcaactgggcctacctgaaggacgccagcaagatgcaggcctaccaggacatcaaggccaaggaggagcaggagctgcaggacatccagagcagaagcaaggagcagctgaacagctacacctag

SEQ ID NO: 342922 - protein, 553 aa, Artificial Sequence
  derived and/or modified sequence
MVEAIVEFDYQAQHDDELTISVGEIITNIRKEDGGWWEGQINGRRGLFPDNFVREIKKEMKKDPLTNKAPEKPLHEVPSGNSLLSSETILRTNKRGERRRRRCQVAFSYLPQNDDELELKVGDIIEVVGEVEEGWWEGVLNGKTGMFPSNFIKELSGESDELGISQDEQLSKSRPEGLPPASLLPFPAHGAKGKTTFEGTILYRAAPGKTEGHRRYYSLRETTGSESDGGDSSSTKSEGANGTVATAAIQPKKVKGVGFGDIFKDKPIKLRPRSIEVENDFLPVEKTIGKKLPATTATPDSSKTEMDSRTKSKDYCKVIFPYEAQNDDELTIKEGDIVTLINKDCIDVGWWEGELNGRRGVFPDNFVKLLPPDFEKEGNRPKKPPPPSAPVIKQGAGTTERKHEIKKIPPERPEMLPNRTEEKERPEREPKLDLQKPSVPAIPPKKPRPPKTNSLSRPGALPPRRPERPVGPLTHTRYCCALTSGAGVGWLWKEHRRGTDCHRPWEEGRGEGGAQASLLHPPAKLSEDTGHFCPCSCTQAGVSVRLRGAVWVS

SEQ ID NO: 342923 - DNA, 4873 bp, Artificial Sequence
  derived and/or modified sequence
cgcaatttccactcgcggggagcaggaaacccggcgcagccgggcgcattgggccgcgatgcaacagcagcagcaggagtcgccccggggcagcagcggcagcagcagcagaggcagcagcgggcggcgctgagccgccgccgccgccactgaggaagaagccggcccagccgccgccgcgtccggaccctcgcgcctggatcccagcgccccgatcccggcgccccaacccccacgcccgcctccgccaactttcacgctgcctcggcggcccggcccggctcgacgccaatggtggaggccatagtggagtttgactaccaggcccagcacgatgatgagctgacgatcagcgtgggtgaaatcatcaccaacatcaggaaggaggatggaggctggtgggagggacagatcaacggcaggagaggtttgttccctgacaactttgtaagagaaataaagaaagagatgaagaaagaccctctcaccaacaaagctccagaaaagcccctgcacgaagtgcccagtggaaactctttgctgtcttctgaaacgattttaagaaccaataagagaggcgagcgacggaggcgccggtgccaggtggcattcagctacctgccccagaatgacgatgaacttgagctgaaagttggcgacatcatagaggtggtaggagaggtagaggaaggatggtgggaaggtgttctcaacgggaagactggaatgtttccttccaacttcatcaaggagctgtcaggggagtcggatgagcttggcatttcccaggatgagcagctatccaagtcaaggcctgaaggtctccctccagcttctctgctgccctttccagctcacggagcaaaaggaaagactacctttgaagggacaattctgtaccgagctgcaccgggaaagacggagggccacagacgctattacagtttaagggaaaccacaggctccgagagtgatgggggtgactcaagcagcaccaagtctgaaggtgccaacgggacagtggcaactgcagcaatccagcccaagaaagttaagggagtgggctttggagacattttcaaagacaagccaatcaaactaagaccaaggtcaattgaagtagaaaatgactttctgccggtagaaaagactattgggaagaagttacctgcaactacagcaactccagactcatcaaaaacagaaatggacagcaggacaaagagcaaggattactgcaaagtaatatttccatatgaggcacagaatgatgatgaattgacaatcaaagaaggagatatagtcactctcatcaataaggactgcatcgacgtaggctggtgggaaggagagctgaacggcagacgaggcgtgttccccgataacttcgtgaagttacttccaccggactttgaaaaggaagggaatagacccaagaagccaccgcctccatccgctcctgtcatcaaacaaggggcaggcaccactgagagaaaacatgaaattaaaaagatacctcctgaaagaccagaaatgcttccaaacagaacagaagaaaaagaaagaccagagagagagccaaaactggatttacagaagccctccgttcctgccataccgccaaaaaagcctcggccacctaagaccaattctctcagcagacctggcgcactgcccccgagaaggccggagagaccggtgggtccgctgacacacaccaggggtgacagtccaaagattgacttggccggcagttcgctatctggcatcctggacaaagatctctcggaccgcagcaatgacattgacttagaaggttttgactccgtggtatcatctactgagaaactcagtcatccgaccacaagcagaccaaaagctacagggaggcggcctccgtcccagtccctcacatcttcatccctttcaagccctgatatcttcgactccccaagtcccgaagaggataaggaggaacacatttcacttgcgcacagaggagtggacgcgtcaaagaaaacttccaagactgttaccatatcccaagtgtctgacaacaaagcatccctgccgcccaagccggggaccatggcagcaggtggcggtgggccagcccctctgtcctcagcggcgccctcccccctgtcatcctctttgggaacagctggacacagagccaactccccgtctctgttcggcacggaaggaaaaccaaagatggagcctgcggccagcagccaggcggccgtggaggagctaaggacacaggtccgcgagctgaggagcatcatcgagaccatgaaggaccagcagaaacgagagattaaacagttattgtctgagttggatgaagagaagaaaatccggcttcggttgcagatggaagtgaacgacataaagaaagctctacaatcaaaatgaatacttgatcaatgaaatgtcacattattcatcctgagtccgagactcaaattttctgccccagccaaaataatcttgtgccaaaagattaaaggtttgcctcaaaatgtccctgtttgaaagattagcacaaaagtcttgatagcacaacacaaattccatccaagaggagaatcttccccagggtttagtcctggggctggcactcgttgtgacttacacagagcaaaattgtgctaaaggcttttctactctgagatctcaatgcgaaatgaaaactcaggcagtttagtccatagtggtactattttgatgatattttccattaataaaatgtaatttcagattattcgtttacaagctttataattttatgattttttaatcgtgttttgtcacagacttccctagtgtttgtactacacgtagtcagaagcgagtgtccttttcttttgcttcaggctaagagctgcctcgctctttgtccccccattaggattctattacatatgcaattgtaggttcaacctgtccctttccctgccagcaaaccccaccaccctaagagaaattttagcttatatatgacggtatatttacaaaaagagaaagagaaaatctggtatttgcaatgatctgtgccttctttttaccaccctcttgattggagcttttgtgatgcagctaccatgattcaaaaaaattaaaaattaaaaaaaaaaaatctgccacttatccaagtccactagaggccactgtcttcaaagcttctctcaccctagccaaaggtcctaagaggagacagctgtgaagttgggcgtgctctgtggtaccagctgtgacttttctatttctcctagttttaggttgttcatgaaactagaaatgtcatcctgcttgatttttcatcagccaagttaaacccctgctttctgtcctttgcaccttttgcgtgaacagaatatgcattattaaagcaaaaataaataaaagtaaaatgcaaatgaaaacaagggagggaaagttgtattatttcctgcactgggttacccgtgtgtgttatcgtttaaactgtattcacataatgtcatttgccttgctcacttgtaaccccttcctcaggtccaagagaatgggaggagggtcatgttgaagtgtagccactggaactttcttgcatttatggagttgctttttctttcccaaggaaactgatgtttgcctgtccgctttatctttgtagtacatgaacagttcagccttagactatgtaactgttttctcatccttagctgaaaatgaggggcctactgtattgcgagactgttcaggggtaggggtggagggggtggtcccttaatggcccctgaagatgttggatgtgtttctcaaaagctgctttgtctctttcctgagtttaatagtgaaactactaaacattaatagatttgcacagccacaaagaatgagagttgataataccgaagaagtgatgcaaaaacaaaaaatcacattactgatcattgatagtattacaaataaatgtctcttcctttctcttcctcccttcctccccctgccttcctcttaacctatgtgctcatccttgctacttgaggctgttatttccctccgagtatttaaggagcccaaacaccttggtcttcctgggtgggggcataattaagggaagggagtgtataaggaaggaaacctcataccctccattcccatccctggatatattgccttttcagcagcctcgggttcagtgtgcttggggtcaggagtgccaggttcccaagagcagcgtaaaacatccctgtaccccttgacagttataagcatttctgcgttaaacttgaagattccagagattccccacgacctaatgatctaagaatgcagattggattctttgatgttcaaatttctcatttacttatgaaaatccctaattatatagttttatataatgtgtatacagagtaggattgttgatgaaattgagcggttggaacaccctcatggaacactggcaacatggaatgtagagagctgatgtcttccccctcatagaggccattggcttcctttgtataaggagagggagaagtgattctggaaggagaagttggtatgtctagcttcattgcggcccctcgggctacccagcaagaggattctgcatcaaggaactggacgagccgctacccaaactgccaccatctttactctttacaaaatggacccatcgagaatgttgaaaagcttggaagtatcacttttgaaaaaaaaaaaaattattttgcattcagcatggactcgaccaggcatctatggagattatttttttgcttcattttataaagttgtatttagaaaagtcttaagtattgtgctttgtaaagaagatgattaaaatgaaattttgtgagaatagttttgttca

SEQ ID NO: 342924 - protein, 650 aa, Artificial Sequence
  derived and/or modified sequence
MKKDPLTNKAPEKPLHEVPSGNSLLSSETILRTNKRGERRRRRCQVAFSYLPQNDDELELKVGDIIEVVGEVEEGWWEGVLNGKTGMFPSNFIKELSGESDELGISQDEQLSKSRPEGLPPASLLPFPAHGAKGKTTFEGTILYRAAPGKTEGHRRYYSLRETTGSESDGGDSSSTKSEGANGTVATAAIQPKKVKGVGFGDIFKDKPIKLRPRSIEVENDFLPVEKTIGKKLPATTATPDSSKTEMDSRTKSKDYCKVIFPYEAQNDDELTIKEGDIVTLINKDCIDVGWWEGELNGRRGVFPDNFVKLLPPDFEKEGNRPKKPPPPSAPVIKQGAGTTERKHEIKKIPPERPEMLPNRTEEKERPEREPKLDLQKPSVPAIPPKKPRPPKTNSLSRPGALPPRRPERPVGPLTHTRGDSPKIDLAGSSLSGILDKDLSDRSNDIDLEGFDSVVSSTEKLSHPTTSRPKATGRRPPSQSLTSSSLSSPDIFDSPSPEEDKEEHISLAHRGVDASKKTSKTVTISQVSDNKASLPPKPGTMAAGGGGPAPLSSAAPSPLSSSLGTAGHRANSPSLFGTEGKPKMEPAASSQAAVEELRTQVRELRSIIETMKDQQKREIKQLLSELDEEKKIRLRLQMEVNDIKKALQSK

SEQ ID NO: 342925 - protein, 645 aa, Artificial Sequence
  derived and/or modified sequence
LTNKAPEKPLHEVPSGNSLLSSETILRTNKRGERRRRRCQVAFSYLPQNDDELELKVGDIIEVVGEVEEGWWEGVLNGKTGMFPSNFIKELSGESDELGISQDEQLSKSRPEGLPPASLLPFPAHGAKGKTTFEGTILYRAAPGKTEGHRRYYSLRETTGSESDGGDSSSTKSEGANGTVATAAIQPKKVKGVGFGDIFKDKPIKLRPRSIEVENDFLPVEKTIGKKLPATTATPDSSKTEMDSRTKSKDYCKVIFPYEAQNDDELTIKEGDIVTLINKDCIDVGWWEGELNGRRGVFPDNFVKLLPPDFEKEGNRPKKPPPPSAPVIKQGAGTTERKHEIKKIPPERPEMLPNRTEEKERPEREPKLDLQKPSVPAIPPKKPRPPKTNSLSRPGALPPRRPERPVGPLTHTRGDSPKIDLAGSSLSGILDKDLSDRSNDIDLEGFDSVVSSTEKLSHPTTSRPKATGRRPPSQSLTSSSLSSPDIFDSPSPEEDKEEHISLAHRGVDASKKTSKTVTISQVSDNKASLPPKPGTMAAGGGGPAPLSSAAPSPLSSSLGTAGHRANSPSLFGTEGKPKMEPAASSQAAVEELRTQVRELRSIIETMKDQQKREIKQLLSELDEEKKIRLRLQMEVNDIKKALQSK

SEQ ID NO: 342926 - DNA, 1953 bp, Artificial Sequence
  derived and/or modified sequence
atgaaaaaagatcctctgactaataaagcaccggagaagcccctgcatgaggtcccttcaggcaatagcctgctctctagcgagaccattctgagaacaaataagaggggcgaacggaggcgcagaagatgccaggttgccttttcttatctgccccagaacgatgacgagctggagctgaaagtgggcgatatcattgaagtggtgggcgaggttgaggagggatggtgggaaggcgtcctgaacggtaagacaggaatgtttccgagcaattttattaaggagctcagcggcgagtctgatgagttgggaatttcccaggatgagcagctgagcaaaagcaggcccgagggtctcccacctgcttccttactgcccttcccggcacatggagccaaaggcaagaccacatttgagggaactattctatacagagccgccccgggcaaaacagaaggacaccgcaggtactatagtctgagagagactacaggctctgagtccgatggaggcgatagcagctcaaccaagtccgagggggccaatggcacggttgctaccgctgcaatacagcccaagaaagtgaagggcgttggcttcggtgacatatttaaagacaaacctatcaagctccggccacgcagcattgaggtggaaaatgatttcctaccagtcgagaagacaatcgggaagaagctgcccgccacaacggcgactccagatagctctaaaacagagatggacagcagaacgaaaagtaaggactattgcaaggtgattttcccttatgaggcccagaatgatgatgaacttacaattaaagaaggagatatcgtcaccctgatcaacaaggattgtatagacgtgggatggtgggaaggcgagctgaatggtcgaagaggcgtgttccccgataactttgtgaagctgcttcccccagattttgaaaaggaggggaaccggcccaaaaagcctccgcctccttcagcccccgtgattaaacaaggggccggaaccactgagcggaagcatgaaatcaaaaaaatcccacccgagcgtccagaaatgctcccaaaccggaccgaagagaaagaacggcctgagcgagagcctaaacttgatcttcagaagcccagcgtacccgccatccctcctaaaaaaccccggccgcccaaaaccaactccctatctaggcctggagcattaccaccaagacggccggaacgcccggtgggtcccctgacacacacacggggagacagccccaagatcgatcttgctggttctagcctttctggaatattagacaaagatctctctgatcggtccaatgatatcgatctggaaggattcgacagcgtggtgagctccacggaaaagctctctcatccgacgacttctagaccaaaagcgaccggtcgtaggccacctagccagtctctcaccagcagctctctgtcaagccccgatattttcgattctccatcccccgaggaggataaggaggaacatatttcactagcccaccgaggagtggacgcaagcaagaagacgtcaaagaccgtcaccattagccaggttagcgacaataaagccagcctacccccgaaacccggcactatggcggctggcggcggcgggcccgccccactgagctcggccgcaccatcgcccctatctagctctctgggaacagccggccatcgggcaaacagcccatctttgttcggaaccgaggggaagcccaagatggagcccgcggctagctcccaagccgccgtggaggaactgagaacgcaggttcgggaactgagaagcatcatcgagaccatgaaggatcaacaaaagagggagatcaagcagcttctcagcgaactggacgaggaaaagaaaatccgccttagactgcagatggaggtgaacgatattaaaaaggccttacagtccaaatag

SEQ ID NO: 342927 - DNA, 1938 bp, Artificial Sequence
  derived and/or modified sequence
ctgacaaacaaggccccggagaaaccgctgcacgaggtgccgtctggcaactcccttcttagcagtgaaaccattctgagaacgaataaacggggcgagcgtcggcgtaggagatgtcaggtcgctttttcctacttgccccagaatgatgatgagctagagctgaaagtgggcgacatcattgaagtcgtgggcgaagtcgaggagggttggtgggagggagtgctaaacgggaagacaggcatgttcccgtcaaacttcattaaagagctaagtggcgagtctgacgagcttggcatcagccaggacgagcaactttcaaagtcacggccagagggtctcccccccgcttctcttctgccctttccagcccacggtgccaaggggaagaccacattcgaaggcactatcttatatcgcgccgccccaggaaaaaccgagggtcatagacggtattactccctccgtgaaaccaccggatctgaatccgatggaggggattctagtagcacaaagagcgaaggcgccaatggcactgtcgcaacagctgccattcagcccaagaaagtgaagggcgttggcttcggggatatattcaaggataaaccaatcaagctgcgccccaggtcaatcgaggtcgaaaacgacttcttgcctgttgaaaagaccatcgggaagaagctgcctgcaacgacagccactccggattccagtaaaacagaaatggattcacgtacaaagtccaaggattattgtaaggtgatctttccatacgaggcgcagaacgacgatgaactgaccattaaggagggagatattgtaaccttgattaataaggattgcattgacgtggggtggtgggagggcgagctcaacggccgcagaggcgtattcccagacaactttgtgaagctgctgccacccgattttgaaaaggagggaaataggcccaaaaaacccccgcccccgagcgcacccgtaatcaagcagggcgcaggcactactgagcgcaaacacgaaatcaaaaagataccacccgaacgacccgaaatgctcccgaatagaaccgaggaaaaggagaggcctgaacgggaaccaaagctggatctgcagaaaccttcagtccccgccattccacctaaaaagccccggccccccaaaacgaattccctttcccgcccaggagccttaccaccaagacggccagaacgccccgtgggccctcttacccacacccgaggcgattcacctaagatcgacctggctggtagtagtctgtcaggcattttggataaagacctgagcgatcgctccaatgacatcgatctagagggtttcgacagcgtggtgtcttcgactgagaagctctctcacccaacaacatcaaggcccaaagccaccggtcgaaggcccccttcccagtctcttaccagttccagcttgtcgtcgccagatatttttgactctccatcaccagaggaagataaggaggagcatattagtctcgcccatagaggtgttgacgcatctaaaaaaactagtaagaccgtcactatttctcaggtgtccgacaataaggcttccctgcctccaaagcccggcactatggccgcaggaggggggggcccggctccactgagttctgcagctccctcaccactatcttctagcctgggcacagccggtcaccgggcaaactcgcccagcttgttcgggaccgaagggaagcctaagatggaacctgctgcatcatcccaagccgcagtggaggagttgagaacccaagtgcgcgaactgcgaagcatcatcgagactatgaaagaccagcagaagagggagattaaacagctgttgtcagagctcgacgaggaaaagaagattcgtttgcggttgcaaatggaagtgaatgacattaaaaaagcactacagagcaagtag

SEQ ID NO: 342928 - DNA, 1953 bp, Artificial Sequence
  derived and/or modified sequence
atgaagaaggaccccctgaccaacaaggcccctgagaagcccctgcacgaggtgcccagcggcaacagcctgctgagcagcgagaccatcctgcggaccaacaagagaggagagaggagaagaagacgctgccaggtggccttctcctacctgccccagaatgatgatgagctggagctgaaggtgggggacatcatcgaggtggtgggggaggtggaggagggctggtgggagggcgtgctgaatggcaagacaggcatgttccccagcaacttcatcaaggagctgtctggagagagtgatgagctgggcatcagccaggatgagcagctgagcaagagcaggcctgagggcctgcccccagccagcctgctgcccttccctgcccacggggccaagggcaagaccacctttgagggcaccatcctgtaccgggccgcccctgggaagacagagggccaccggcgctactacagcctgcgggagaccaccggcagcgagagtgatggaggagacagcagcagcaccaagtctgagggcgccaacggcaccgtggccacagctgccatccagcccaagaaggtgaagggcgtgggctttggagacatcttcaaggacaagcccatcaagctgcggcccaggagcattgaggtggagaatgacttcctgcctgtggagaagaccatcggcaagaagctgcctgccaccacagccaccccagacagcagcaagacagagatggacagcaggaccaagagcaaggactactgcaaggtgatcttcccctatgaggcccagaatgatgatgagctgaccatcaaggagggggacatcgtgaccctcatcaacaaggactgcattgatgtgggctggtgggagggggagctgaatggaagaagaggagtcttcccagacaactttgtgaagctgctgcccccagactttgagaaggagggcaaccggcccaagaagcccccacctccttctgcccctgtgatcaagcagggcgccggcaccacagagaggaagcatgagatcaagaagatccccccagagaggcctgagatgctgcccaacagaacagaggagaaggagaggcctgagcgggagcccaagctggacctgcagaagcccagcgtgcctgccatcccccccaagaagccccggccccccaagaccaacagcctgagcaggcctggggccctgcccccaagaagacctgagaggcctgtgggccccctgacccacaccaggggggacagccccaagattgacctggccggcagcagcctgagcggcatcctggacaaggacctgagtgacaggagcaatgacatcgacctggagggctttgattctgtggtgagcagcacagagaagctgagccaccccaccaccagccggcccaaggccaccggccggcggccccccagccagagcctgaccagcagcagcctgagcagcccagacatctttgacagccccagccctgaggaggacaaggaggagcacatcagcctggcccacagaggagtggatgccagcaagaagaccagcaagacagtgaccatcagccaggtgtctgacaacaaggccagcctgccccccaagccaggcaccatggctgctgggggcggcggccctgcccccctgagcagcgctgcccccagccccctgagcagcagcctgggcacagctggccaccgggccaacagccccagcctgtttggaacagagggcaagcccaagatggagcctgctgccagcagccaggccgctgtggaggagctgcggacccaggtgcgggagctgcggagcatcatcgagaccatgaaggaccagcagaagcgggagatcaagcagctgctgtctgagctggatgaggagaagaagatccggctgcggctgcagatggaggtgaatgacatcaagaaggccctgcagagcaagtag

SEQ ID NO: 342929 - DNA, 1938 bp, Artificial Sequence
  derived and/or modified sequence
ctgaccaacaaggcccctgagaagcccctgcacgaggtgcccagcggcaacagcctgctgagcagcgagaccatcctgcggaccaacaagagaggagagaggagaagaagacgctgccaggtggccttctcctacctgccccagaatgatgatgagctggagctgaaggtgggggacatcatcgaggtggtgggggaggtggaggagggctggtgggagggcgtgctgaatggcaagacaggcatgttccccagcaacttcatcaaggagctgagcggggagagtgatgagctgggcatcagccaggatgagcagctgagcaagagcaggcctgagggcctgcccccagccagcctgctgcccttccctgcccatggagccaagggcaagaccacctttgagggcaccatcctgtacagagctgcccctgggaagacagagggccaccggcgctactacagcctgcgggagaccactggaagtgaaagtgatggaggagacagcagcagcaccaagtctgagggcgccaatggaacagtggccacagctgccatccagcccaagaaggtgaagggcgtgggctttggagacatcttcaaggacaagcccatcaagctgcggcccaggagcattgaggtggagaatgacttcctgcctgtggagaagaccatcggcaagaagctgcctgccaccacagccaccccagacagcagcaagacagagatggacagcaggaccaagagcaaggactactgcaaggtgatcttcccctatgaggcccagaatgatgatgagctgaccatcaaggagggggacatcgtgaccctcatcaacaaggactgcattgatgtgggctggtgggagggggagctgaatggccggcggggcgtcttcccagacaactttgtgaagctgctgcccccagactttgagaaggagggcaaccggcccaagaagcccccaccacccagcgcccctgtgatcaagcagggcgccggcaccacagagaggaagcatgagatcaagaagatccccccagagaggcctgagatgctgcccaacagaacagaggagaaggagaggcctgagcgggagcccaagctggacctgcagaagcccagcgtgcctgccatcccccccaagaagcccaggcctcccaagaccaacagcctgagcaggcctggggccctgcccccccggcggcctgagaggcctgtgggccccctgacccacaccaggggggacagccccaagattgacctggccggcagcagcctgagcggcatcctggacaaggacctgagtgacaggagcaatgacatcgacctggagggctttgacagcgtggtgagcagcacagagaagctgagccaccccaccaccagccggcccaaggccactggaagaagaccacccagccagagcctgaccagcagcagcctgagcagcccagacatctttgacagccccagccctgaggaggacaaggaggagcacatcagcctggcccaccggggcgtggatgccagcaagaagaccagcaagacagtgaccatcagccaggtgtctgacaacaaggccagcctgccccccaagccaggcaccatggccgccggcggcggcggccctgcccccctgagcagcgctgcccccagccccctgagcagcagcctgggcacagctggccaccgggccaacagccccagcctgtttggaacagagggcaagcccaagatggagcctgctgccagcagccaggccgctgtggaggagctgcggacccaggtgcgggagctgcggagcatcatcgagaccatgaaggaccagcagaagcgggagatcaagcagctgctgtctgagctggatgaggagaagaagatccggctgcggctgcagatggaggtgaatgacatcaagaaggccctgcagagcaagtag

SEQ ID NO: 342930 - DNA, 1953 bp, Artificial Sequence
  derived and/or modified sequence
atgaagaaggaccccctgaccaacaaggcccccgagaagcccctgcacgaggttccatccgggaactctctcctctcaagtgagaccatactccggaccaataagcgaggagaaaggagacgtcgcagatgccaagtggcctttagttacctaccacagaacgacgacgagctagagttgaaggtgggcgacataatcgaggtggtaggcgaggtggaggaaggatggtgggagggcgttctgaacggcaagacgggcatgtttccctctaactttatcaaggaactttccggggagtctgacgagctgggaattagtcaggatgaacaactgagcaagtcgaggcctgaggggctgcctccggcgtctttgctgccatttcccgcacacggtgctaaaggcaagaccacctttgagggcacaatcctgtaccgcgccgctcctgggaaaaccgagggacaccggagatactactccctgcgcgagactactggctctgagtccgatggtggggacagctcttcaaccaagagcgaaggtgctaacggtaccgtggcaacagcggccatacaacctaagaaagtcaagggcgtcgggttcggagatatatttaaagataagcccattaaactgagacctcgatctatcgaggttgagaatgacttcctccctgtggaaaaaacaatcgggaaaaagcttcccgctaccaccgcgacacctgattcttccaagactgagatggacagcaggactaagtcgaaagattactgtaaggtcatattcccctacgaggctcagaacgacgatgaactcactattaaggagggtgacatcgtgaccctgatcaacaaagattgtatagatgtcggctggtgggagggggagctcaatggaagacgcggcgtgttccccgacaatttcgttaaactcttacctccagattttgaaaaggaaggcaacagacccaaaaagcccccccccccttcagcacccgttatcaaacagggagctggaactactgagcgcaagcacgagattaagaaaattccacctgagcgccctgaaatgctgccgaaccgcactgaagagaaagaacgacctgaacgggagcccaaactggacctgcaaaagccttctgtacctgccatcccccccaaaaagccaaggcctccgaagactaacagcctgtccaggcccggtgcactgccacctagacgccctgaaaggccagtgggaccattaacccacacaagaggcgactcaccaaaaattgatctagccggatcgtcactgtcaggcattctcgacaaagacctgtctgataggtcgaacgacatagacctcgagggatttgatagcgttgtgagctctacagaaaagttatctcatccaaccacaagtcgaccaaaggccaccggacgcaggccaccaagccagagcttgacctcaagttctctaagctcgccagatatttttgacagtccctccccggaggaggataaggaggagcatatctctctggcccatcgaggtgtcgacgcctctaaaaaaacgtccaaaactgtgaccatctcacaggtgtccgacaacaaggcttcccttccacccaaaccgggtacaatggcggccggcgggggaggtcctgcacccctctcatccgccgcgccttcacccctcagctcctcactcggcacagccgggcacagagccaacagtcctagcttatttgggacggaaggcaagccaaaaatggagccagcggccagctcacaagccgctgtagaggaactgcgtactcaggtgcgtgaactgaggagtatcatcgagaccatgaaagatcagcagaaacgggagattaagcagctcttaagtgagttagacgaggaaaagaagataaggctacgcctccagatggaagtaaatgacataaaaaaggcacttcagtccaagtag

SEQ ID NO: 342931 - DNA, 1938 bp, Artificial Sequence
  derived and/or modified sequence
ctgaccaacaaggcccccgagaagcccctgcacgaggtgcccagcggtaatagcctgctgagtagtgagaccattttgagaaccaataagcggggagaaagacgaagacggagatgccaggtggcattcagttacctgccccaaaatgacgacgaactggaactgaaggtcggagacattatcgaagtagtaggcgaggtagaagaaggatggtgggaaggagtactgaatggcaagactggaatgtttccatccaactttataaaggagctgagtggtgagagtgacgagctcgggatttcccaagatgagcagctgtccaaaagccgtccagagggcctccctccagctagtctgctcccattccctgcccatggggctaaagggaagacgacctttgaaggtacaattctgtatcgggccgcccctggcaagacggagggccataggcgctactacagcctcagagagacgacaggtagcgagagcgacgggggcgactcgtcctccaccaaatctgaaggtgcgaacgggaccgttgccacagctgcaatccagccaaaaaaagtcaagggggtggggtttggtgatattttcaaagacaagcctatcaagctgaggcccagaagcattgaagtagagaacgatttcctccctgtcgagaaaaccattggcaaaaaattacccgccacaactgcgacacctgactcctcaaagaccgagatggactccaggaccaagagcaaggattattgtaaagtgatcttcccgtacgaagcccagaatgatgacgaactcactattaaggagggagacatcgtaactttgatcaataaagattgtatagatgtcggctggtgggagggtgagcttaatgggcgtcgcggggtattcccggacaatttcgtgaagttactacctccagatttcgagaaagaaggcaataggccaaaaaagcctccccctcctagcgctccggtgatcaagcagggagctggcactactgaacgcaaacatgaaatcaagaagattccaccggagagaccagagatgttgcccaataggaccgaagagaaggagaggcctgagagggagcccaagttagacctgcagaaaccatcggtgccagctattccaccaaagaagcctagaccacccaaaactaactccctatccaggcccggcgcactgcccccacgaaggccagagcgcccagtgggccctctaactcatacccgcggcgatagccccaaaatcgatctagcgggatcaagcctatctggcattcttgataaggatctgagtgatagatctaacgacatcgatctggagggctttgactccgtggtcagttccaccgagaagctgagtcatccaacaactagccgaccgaaagccaccggcagacggcctccttctcagagcctcacatcttcttccttatccagcccagacatcttcgactctccatcccccgaggaggataaggaagagcacatttccttagcccaccgcggagttgacgcatcaaaaaaaacaagtaagactgtcactatttctcaagtgagcgacaacaaagccagcctgcctccaaagcccggaaccatggccgcagggggtggcgggccagcacccctttctagcgcagcccccagcccgctttcttcgagtctcggcacagctggtcatcgcgccaacagtccaagcttgttcgggaccgagggaaagcccaagatggagcctgcggcctcatcgcaggccgctgtcgaggaactccgcactcaggtgcgcgagctacgatcaattattgaaaccatgaaggaccagcagaagagggagatcaaacagctgctgtcggagctcgatgaggagaagaagatacgactgaggttgcaaatggaagtcaacgacataaagaaggccctgcagtctaagtag

SEQ ID NO: 342932 - DNA, 1953 bp, Artificial Sequence
  derived and/or modified sequence
atgaagaaagacccccttacaaataaggcccctgagaaaccccttcatgaggtgccctctgggaactctctgttgtcgagtgagactattttgcgcacaaacaaacgcggagagagaaggcgacgccgttgtcaagttgccttctcctatctgcctcaaaacgacgatgaactggaactgaaggtgggagacattatcgaggttgttggagaggtagaggaaggctggtgggaaggcgtcttgaatggcaaaaccggaatgttcccctctaactttataaaggagctgagtggtgagtccgacgaactgggcatctctcaggatgagcagctgtccaagagccgcccagaggggctgccacctgcatccctcctcccatttccagcacatggagccaagggcaagacaacattcgagggcacaattctgtatagagccgcaccaggaaagaccgaaggccataggagatactacagtctcagagagaccactggatccgaatccgatggcggagattccagctcaacgaaaagcgagggcgctaacggcacggtcgctactgctgctatacaacccaagaaggttaagggggtgggtttcggcgatatttttaaggacaagcctattaagcttagaccccgatctatagaggtggaaaacgacttcctgcctgtggagaagacgatcggcaaaaagctgccagcgaccaccgcaacgcccgattcatccaaaaccgaaatggatagccgtacaaagtccaaggactattgtaaggtcatcttcccatacgaagcgcaaaatgatgacgagctcactattaaagagggggacatcgtgacactgatcaataaagactgtattgacgtcgggtggtgggaaggcgaactcaacggcaggcgcggtgtgttcccggacaactttgttaagttactgccacccgactttgagaaggagggcaaccggccaaagaagcccccacctccttccgccccagtgattaagcagggtgccggaaccacagaaaggaagcacgagatcaaaaaaattcctccagaacggccagaaatgctgcccaaccgaactgaggaaaaggagagaccagagcgcgaaccaaaactcgacttgcagaagccctctgttcccgctatccccccaaaaaaaccccgtccaccaaaaaccaactctttgtccaggcctggagcactaccgccacggagacctgaaagacccgtgggcccactcacacacacccggggagattctcctaagattgacctggcgggttcttctttgagcgggattctggacaaggacctgtcggaccggtccaatgacattgatctggaaggattcgactcagtagtgtcttcaaccgaaaagctgtcacatcccacaacatccagacctaaagctacaggtcggagaccaccgtcccagagtctaacatcttcttcactgagctctcccgatatctttgacagccctagtcctgaggaggataaagaggaacacatcagcctggcacatcggggagttgatgccagcaagaagacttccaagactgtaactatttcacaggtctcagataacaaagctagtttgcctccaaaaccgggaacaatggccgctggcggaggagggcctgccccactgtcatccgcagcgccatcgccactgtccagctccctcggcaccgcagggcaccgtgctaattcgccttctcttttcggcactgaaggcaaaccaaagatggagcctgctgccagcagccaagccgctgtagaggagcttcggactcaggtccgagaactgagatccattatcgaaactatgaaagatcagcagaagcgagagattaagcaactgttatcggaactcgacgaggaaaagaaaatccgattaaggctgcagatggaggttaacgatattaaaaaagctctccagtctaaatag

SEQ ID NO: 342933 - DNA, 1938 bp, Artificial Sequence
  derived and/or modified sequence
ctaacaaataaggctccagaaaagcccctgcatgaggtccctagcggtaacagcctgttgagttcggagacgatcctgcgaacaaacaagcgaggcgagcgcaggagacggaggtgccaagttgcttttagctacctaccccagaacgatgatgagttagaactgaaagttggggatattattgaagtggtaggggaagtagaagagggatggtgggaaggagtcctgaatggcaagacaggaatgttcccatcgaattttatcaaggaactgtccggcgaaagcgatgagctggggattagccaggatgagcaactgagcaaaagccggcctgagggcctcccccctgcatccctactgccgttcccagctcacggggctaaaggaaaaaccaccttcgagggcacgattttgtatagggccgctccgggtaagaccgagggtcataggcgatattacagtctccgcgaaaccacaggttctgagtctgatgggggtgacagttcatcaacaaagtcggaaggggcaaatggaacggtcgctaccgccgctattcagccgaagaaggtgaagggcgtcggatttggggatatcttcaaggacaagccaatcaaactccgtcccagatctattgaggtggagaatgattttttgcctgtggagaaaactatcggtaaaaaactgcccgcaactacggccacccctgatagttctaaaacagaaatggactcccgcactaaatccaaagactattgtaaggtaatttttccgtatgaagcccagaatgacgatgagctgaccataaaggagggggacatcgtgacactgatcaataaagactgcattgatgttggatggtgggaaggggagcttaacggtaggcggggagtgtttccggacaatttcgtcaagctgttgcctccggattttgagaaagaaggcaatcgcccaaagaaaccaccgcctccttctgcaccagttatcaagcagggggcagggaccactgagcgcaagcatgaaattaaaaaaattccccctgaacgccctgaaatgttaccgaatcggaccgaggagaaagaacggccagagagagaacccaaattagatttgcagaaaccctctgtccccgctatccctcccaagaagccgcgtcctccaaaaacaaacagtttgtctcggcctggggcactgccacccaggaggccagagcgaccggtgggccctctgacccatacaaggggagattcgcccaagatcgacctggcaggttcatccttatcaggtatcctggacaaggaccttagcgaccgctccaatgatatagacctagaaggcttcgactccgtggtttcttcaacggaaaagctgtcccacccaaccacttctagaccaaaggctacagggcgacgcccaccatcgcaatcactaactagcagttccctgtcaagccctgacattttcgattccccatcccccgaagaggataaggaggaacatatcagcctggctcaccggggagtggatgcttccaagaagacgtccaagacagtaacaatttcacaggtgtctgacaacaaggccagcctcccgcctaagccaggaacaatggccgcaggaggcggaggaccagctcctctgtcatctgccgctccttccccacttagctcctccttggggactgctggccatcgtgcgaattcaccgagtctctttggcaccgaggggaagcccaaaatggaacccgctgcatcctctcaggcagccgtggaggaactgaggacccaggtgcgggagctgaggagcatcatcgagactatgaaggatcagcagaagagggagatcaagcagttactgtccgagctggatgaggaaaaaaagattcgcctgcgcctgcagatggaagtgaacgacattaaaaaggccctgcagtccaaatag

SEQ ID NO: 342934 - DNA, 1941 bp, Artificial Sequence
  derived and/or modified sequence
ctcaccaacaaagctccagaaaagcccctgcacgaagtgcccagtggaaactctttgctgtcttctgaaacgattttaagaaccaataagagaggcgagcgacggaggcgccggtgccaggtggcattcagctacctgccccagaatgacgatgaacttgagctgaaagttggcgacatcatagaggtggtaggagaggtagaggaaggatggtgggaaggtgttctcaacgggaagactggaatgtttccttccaacttcatcaaggagctgtcaggggagtcggatgagcttggcatttcccaggatgagcagctatccaagtcaaggcctgaaggtctccctccagcttctctgctgccctttccagctcacggagcaaaaggaaagactacctttgaagggacaattctgtaccgagctgcaccgggaaagacggagggccacagacgctattacagtttaagggaaaccacaggctccgagagtgatgggggtgactcaagcagcaccaagtctgaaggtgccaacgggacagtggcaactgcagcaatccagcccaagaaagttaagggagtgggctttggagacattttcaaagacaagccaatcaaactaagaccaaggtcaattgaagtagaaaatgactttctgccggtagaaaagactattgggaagaagttacctgcaactacagcaactccagactcatcaaaaacagaaatggacagcaggacaaagagcaaggattactgcaaagtaatatttccatatgaggcacagaatgatgatgaattgacaatcaaagaaggagatatagtcactctcatcaataaggactgcatcgacgtaggctggtgggaaggagagctgaacggcagacgaggcgtgttccccgataacttcgtgaagttacttccaccggactttgaaaaggaagggaatagacccaagaagccaccgcctccatccgctcctgtcatcaaacaaggggcaggcaccactgagagaaaacatgaaattaaaaagatacctcctgaaagaccagaaatgcttccaaacagaacagaagaaaaagaaagaccagagagagagccaaaactggatttacagaagccctccgttcctgccataccgccaaaaaagcctcggccacctaagaccaattctctcagcagacctggcgcactgcccccgagaaggccggagagaccggtgggtccgctgacacacaccaggggtgacagtccaaagattgacttggccggcagttcgctatctggcatcctggacaaagatctctcggaccgcagcaatgacattgacttagaaggttttgactccgtggtatcatctactgagaaactcagtcatccgaccacaagcagaccaaaagctacagggaggcggcctccgtcccagtccctcacatcttcatccctttcaagccctgatatcttcgactccccaagtcccgaagaggataaggaggaacacatttcacttgcgcacagaggagtggacgcgtcaaagaaaacttccaagactgttaccatatcccaagtgtctgacaacaaagcatccctgccgcccaagccggggaccatggcagcaggtggcggtgggccagcccctctgtcctcagcggcgccctcccccctgtcatcctctttgggaacagctggacacagagccaactccccgtctctgttcggcacggaaggaaaaccaaagatggagcctgcggccagcagccaggcggccgtggaggagctaaggacacaggtccgcgagctgaggagcatcatcgagaccatgaaggaccagcagaaacgagagattaaacagttattgtctgagttggatgaagagaagaaaatccggcttcggttgcagatggaagtgaacgacataaagaaagctctacaatcaaaatgaata

SEQ ID NO: 342935 - DNA, 1953 bp, Artificial Sequence
  derived and/or modified sequence
atgaagaaggaccccctgaccaacaaggcccccgagaagcccctgcacgaggtgcccagcggcaacagcctgctgagcagcgagaccatcctgagaaccaacaagagaggcgagagaagaagaagaagatgccaggtggccttcagctacctgccccagaacgacgacgagctggagctgaaggtgggcgacatcatcgaggtggtgggcgaggtggaggagggctggtgggagggcgtgctgaacggcaagaccggcatgttccccagcaacttcatcaaggagctgagcggcgagagcgacgagctgggcatcagccaggacgagcagctgagcaagagcagacccgagggcctgccccccgccagcctgctgcccttccccgcccacggcgccaagggcaagaccaccttcgagggcaccatcctgtacagagccgcccccggcaagaccgagggccacagaagatactacagcctgagagagaccaccggcagcgagagcgacggcggcgacagcagcagcaccaagagcgagggcgccaacggcaccgtggccaccgccgccatccagcccaagaaggtgaagggcgtgggcttcggcgacatcttcaaggacaagcccatcaagctgagacccagaagcatcgaggtggagaacgacttcctgcccgtggagaagaccatcggcaagaagctgcccgccaccaccgccacccccgacagcagcaagaccgagatggacagcagaaccaagagcaaggactactgcaaggtgatcttcccctacgaggcccagaacgacgacgagctgaccatcaaggagggcgacatcgtgaccctgatcaacaaggactgcatcgacgtgggctggtgggagggcgagctgaacggcagaagaggcgtgttccccgacaacttcgtgaagctgctgccccccgacttcgagaaggagggcaacagacccaagaagccccccccccccagcgcccccgtgatcaagcagggcgccggcaccaccgagagaaagcacgagatcaagaagatcccccccgagagacccgagatgctgcccaacagaaccgaggagaaggagagacccgagagagagcccaagctggacctgcagaagcccagcgtgcccgccatcccccccaagaagcccagaccccccaagaccaacagcctgagcagacccggcgccctgccccccagaagacccgagagacccgtgggccccctgacccacaccagaggcgacagccccaagatcgacctggccggcagcagcctgagcggcatcctggacaaggacctgagcgacagaagcaacgacatcgacctggagggcttcgacagcgtggtgagcagcaccgagaagctgagccaccccaccaccagcagacccaaggccaccggcagaagaccccccagccagagcctgaccagcagcagcctgagcagccccgacatcttcgacagccccagccccgaggaggacaaggaggagcacatcagcctggcccacagaggcgtggacgccagcaagaagaccagcaagaccgtgaccatcagccaggtgagcgacaacaaggccagcctgccccccaagcccggcaccatggccgccggcggcggcggccccgcccccctgagcagcgccgcccccagccccctgagcagcagcctgggcaccgccggccacagagccaacagccccagcctgttcggcaccgagggcaagcccaagatggagcccgccgccagcagccaggccgccgtggaggagctgagaacccaggtgagagagctgagaagcatcatcgagaccatgaaggaccagcagaagagagagatcaagcagctgctgagcgagctggacgaggagaagaagatcagactgagactgcagatggaggtgaacgacatcaagaaggccctgcagagcaagtag

SEQ ID NO: 342936 - DNA, 1938 bp, Artificial Sequence
  derived and/or modified sequence
ctgaccaacaaggcccccgagaagcccctgcacgaggtgcccagcggcaacagcctgctgagcagcgagaccatcctgagaaccaacaagagaggcgagagaagaagaagaagatgccaggtggccttcagctacctgccccagaacgacgacgagctggagctgaaggtgggcgacatcatcgaggtggtgggcgaggtggaggagggctggtgggagggcgtgctgaacggcaagaccggcatgttccccagcaacttcatcaaggagctgagcggcgagagcgacgagctgggcatcagccaggacgagcagctgagcaagagcagacccgagggcctgccccccgccagcctgctgcccttccccgcccacggcgccaagggcaagaccaccttcgagggcaccatcctgtacagagccgcccccggcaagaccgagggccacagaagatactacagcctgagagagaccaccggcagcgagagcgacggcggcgacagcagcagcaccaagagcgagggcgccaacggcaccgtggccaccgccgccatccagcccaagaaggtgaagggcgtgggcttcggcgacatcttcaaggacaagcccatcaagctgagacccagaagcatcgaggtggagaacgacttcctgcccgtggagaagaccatcggcaagaagctgcccgccaccaccgccacccccgacagcagcaagaccgagatggacagcagaaccaagagcaaggactactgcaaggtgatcttcccctacgaggcccagaacgacgacgagctgaccatcaaggagggcgacatcgtgaccctgatcaacaaggactgcatcgacgtgggctggtgggagggcgagctgaacggcagaagaggcgtgttccccgacaacttcgtgaagctgctgccccccgacttcgagaaggagggcaacagacccaagaagccccccccccccagcgcccccgtgatcaagcagggcgccggcaccaccgagagaaagcacgagatcaagaagatcccccccgagagacccgagatgctgcccaacagaaccgaggagaaggagagacccgagagagagcccaagctggacctgcagaagcccagcgtgcccgccatcccccccaagaagcccagaccccccaagaccaacagcctgagcagacccggcgccctgccccccagaagacccgagagacccgtgggccccctgacccacaccagaggcgacagccccaagatcgacctggccggcagcagcctgagcggcatcctggacaaggacctgagcgacagaagcaacgacatcgacctggagggcttcgacagcgtggtgagcagcaccgagaagctgagccaccccaccaccagcagacccaaggccaccggcagaagaccccccagccagagcctgaccagcagcagcctgagcagccccgacatcttcgacagccccagccccgaggaggacaaggaggagcacatcagcctggcccacagaggcgtggacgccagcaagaagaccagcaagaccgtgaccatcagccaggtgagcgacaacaaggccagcctgccccccaagcccggcaccatggccgccggcggcggcggccccgcccccctgagcagcgccgcccccagccccctgagcagcagcctgggcaccgccggccacagagccaacagccccagcctgttcggcaccgagggcaagcccaagatggagcccgccgccagcagccaggccgccgtggaggagctgagaacccaggtgagagagctgagaagcatcatcgagaccatgaaggaccagcagaagagagagatcaagcagctgctgagcgagctggacgaggagaagaagatcagactgagactgcagatggaggtgaacgacatcaagaaggccctgcagagcaagtag

SEQ ID NO: 342937 - DNA, 1662 bp, Artificial Sequence
  derived and/or modified sequence
atggtggaagccatagttgaatttgactaccaggcacaacatgacgacgaactgacgatctctgtgggggaaatcattacgaacatccgaaaggaagacggaggttggtgggagggtcagattaatggtcgccgaggcctctttccggataacttcgttcgcgaaattaaaaaggaaatgaagaaggatccccttaccaacaaggcacccgaaaagcccctacatgaggtacctagcggcaattctctgttgagctctgagacaatcctgcggacgaataagcgtggcgagcgtcgtcgcagacggtgccaggtggcattttcctacctcccgcagaacgatgacgagctggaacttaaagtgggcgacatcattgaagtggtgggcgaggtcgaagagggatggtgggagggcgtcctcaacggaaagaccggaatgtttccttccaacttcattaaagagttgtccggggagagtgatgaactgggtatcagtcaggatgagcagctgagcaaatctagacctgaaggcttaccccccgctagtcttctccccttccccgctcatggcgcgaagggaaagactacctttgagggaaccattctgtaccgggctgctcctggcaaaacggaagggcatcgaaggtactactccctcagagagactacaggtagcgaatctgacggaggggacagttcatccaccaagagcgagggggcaaatgggacagtcgccactgccgccatccaacctaagaaggtgaagggcgttggcttcggggacatctttaaggacaaacctattaaactgagacccagatctattgaggtcgaaaatgatttcctgcccgtggaaaagacaattggcaagaagcttccggcaactacagctacccccgactctagcaagaccgagatggactcccgtacaaagtcgaaggattactgcaaggtcatctttccgtatgaggcgcaaaatgatgatgaacttactataaaagaaggagacatcgtgacacttatcaacaaggactgcattgatgtaggatggtgggaaggagagctcaacggccgacggggagtatttccggataactttgtgaagctgctgcctccggattttgagaaggaagggaaccggccgaaaaaaccaccccctcccagtgcccctgtcatcaagcagggggcaggcactacagagagaaagcacgaaatcaagaaaatcccccctgaaagacctgaaatgctccccaatcgcaccgaagaaaaggagcgccccgaacgcgagccgaaacttgatctgcagaaaccgagtgtgccggccatcccgcccaagaagcctcgccctccgaaaaccaattctttgtcccgtcccggggcactgcctccgcgccggcctgaaagaccagttgggcctctcactcacactcgatactgttgcgccttgacttcgggggcaggggtgggctggttatggaaagaacacagaagagggactgactgccaccggccctgggaggagggaaggggagagggtggagcacaagcctcacttctgcaccccccggccaagctgagcgaggacaccggacatttttgcccatgcagctgtacccaagccggcgtctctgtcagattgagaggtgcggtatgggtcagctag

SEQ ID NO: 342938 - DNA, 1662 bp, Artificial Sequence
  derived and/or modified sequence
atggtggaggccatcgtggagtttgactaccaggcccagcatgatgatgagctgaccatctctgtgggggagatcatcaccaacatcaggaaggaggatggcggctggtgggagggccagatcaatggccggcggggcctcttcccagacaactttgtgcgggagatcaagaaggagatgaagaaggaccccctgaccaacaaggcccctgagaagcccctgcacgaggtgcccagcggcaacagcctgctgagcagcgagaccatcctgcggaccaacaagagaggagagaggagaagaagacgctgccaggtggccttctcctacctgccccagaatgatgatgagctggagctgaaggtgggggacatcatcgaggtggtgggggaggtggaggagggctggtgggagggcgtgctgaatggcaagacaggcatgttccccagcaacttcatcaaggagctgagcggggagagtgatgagctgggcatcagccaggatgagcagctgagcaagagcaggcctgagggcctgcccccagccagcctgctgcccttccctgcccatggagccaagggcaagaccacctttgagggcaccatcctgtacagagctgcccctgggaagacagagggccaccggcgctactacagcctgcgggagaccactggaagtgaaagtgatggaggagacagcagcagcaccaagtctgagggcgccaatggaacagtggccacagctgccatccagcccaagaaggtgaagggcgtgggctttggagacatcttcaaggacaagcccatcaagctgcggcccaggagcattgaggtggagaatgacttcctgcctgtggagaagaccatcggcaagaagctgcctgccaccacagccaccccagacagcagcaagacagagatggacagcaggaccaagagcaaggactactgcaaggtgatcttcccctatgaggcccagaatgatgatgagctgaccatcaaggagggggacatcgtgaccctcatcaacaaggactgcattgatgtgggctggtgggagggggagctgaatggccggcggggcgtcttcccagacaactttgtgaagctgctgcccccagactttgagaaggagggcaaccggcccaagaagcccccaccacccagcgcccctgtgatcaagcagggcgccggcaccacagagaggaagcatgagatcaagaagatccccccagagaggcctgagatgctgcccaacagaacagaggagaaggagaggcctgagcgggagcccaagctggacctgcagaagcccagcgtgcctgccatcccccccaagaagcccaggcctcccaagaccaacagcctgagcaggcctggggccctgcccccccggcggcctgagaggcctgtgggccccctgacccacacccgctactgctgtgccctgaccagcggggccggcgtgggctggctgtggaaggagcaccggcggggcacagactgccaccggccctgggaggagggccgcggggagggcggggcccaggccagcctgctgcaccccccagccaagctgtctgaggacaccggccacttctgcccctgcagctgcacccaggccggcgtgtctgtgcggctgcggggagctgtgtgggtgtcctag

SEQ ID NO: 342939 - DNA, 1662 bp, Artificial Sequence
  derived and/or modified sequence
atggtggaggccatcgtggagttcgactaccaggcccagcacgacgacgaactcaccatctctgtgggcgaaatcattactaacatccgcaaggaggacggagggtggtgggagggacagattaacggcagacggggcctgttcccagataacttcgtgagagaaattaaaaaagagatgaagaaggatccactcaccaacaaagctccggagaaaccacttcatgaggtgccctccgggaatagtctgctctccagtgaaactatcctgcggaccaacaagaggggagagagacgtagaagacggtgccaagttgcattctcatacctcccccaaaatgacgacgaattggagctgaaggtgggtgatatcattgaggtggttggcgaagtggaggaaggatggtgggagggggtactgaacggtaaaaccgggatgttcccaagtaacttcattaaggagttgtcaggtgagagtgatgagttggggatatcacaggatgagcagctgagcaagtcacgacccgaaggactcccgcccgcctcactactgccgtttcccgcacatggggctaaagggaagactacctttgaggggacaatcctgtatagagccgcccctggaaaaacagagggccaccgcagatattactccttgagggaaaccaccggtagcgagagtgacggcggcgattcctcatcgacaaaatcggaaggtgccaatggcacggtcgctacagctgccatacaaccaaaaaaagtgaagggcgtgggcttcggtgacatctttaaagacaaacccatcaaattgagacccagatctattgaggtggagaatgatttcctgcctgtggagaagacaattggcaagaaattacctgccaccactgcaaccccagactcatcgaaaaccgaaatggatagccgcaccaagagcaaagattactgcaaggtgatcttcccatacgaagcgcaaaatgatgacgagcttaccatcaaagaaggggacattgtaactttgataaataaagactgcatcgatgttggttggtgggagggtgagctgaatggcaggaggggtgtgttccctgataattttgttaaactgctgccgcccgattttgagaaggagggcaacaggcctaagaagcctcctcccccatccgcccctgtcatcaaacaaggggctggcacgaccgagaggaagcatgagattaaaaaaatccccccggaacgaccggagatgcttcccaatcgcaccgaggagaaggagagacctgagagagagcctaagctagacctgcagaagccctccgtccccgcgattcctccaaagaagcccagaccccccaagactaactccctatcaaggccgggagccttgccaccccgacggcccgaacgtcctgttggcccactcacccatacccgctattgctgtgccttaacctcaggggcaggcgtcggctggctctggaaggaacatagaaggggaaccgattgccaccggccttgggaagagggcagaggagaggggggcgcccaggccagtctgctccatcccccagctaaactgtccgaggatacaggacacttttgtccctgcagctgtacccaggctggagtctcagtgagacttagaggggccgtttgggtcagctag

SEQ ID NO: 342940 - DNA, 1662 bp, Artificial Sequence
  derived and/or modified sequence
atggtggaggcgatcgtggaattcgactaccaggcacagcacgatgacgagctcactattagcgtaggtgagatcattacgaacataagaaaagaggacggcggttggtgggagggacagattaatggacgcaggggactctttccagacaattttgttcgggagattaaaaaagagatgaagaaggatcctctgactaataaggccccagaaaagcccctgcacgaggtgccctccggaaattccttgctcagctccgaaaccattttacgcacaaataaacggggagaaagaagacggagacgatgtcaggttgccttttcctacctcccccaaaatgatgatgaactggagctcaaagtaggggatatcatagaggtggtcggggaggtggaggaggggtggtgggaaggagtgctgaatggcaagactgggatgttccccagcaactttatcaaggaattatccggtgaatccgacgagctgggaattagccaggatgaacagctgagtaaaagccggccagagggcctgccccctgcgtctctgcttccatttccagcgcacggggcaaagggcaaaaccaccttcgagggcaccattctctacagggcagcacccggtaagactgaaggacatcgccgttactatagtctgcgcgagaccacggggtccgagagtgacggaggggatagctcaagcactaagagcgagggggcaaatgggacagtggccaccgccgctatacagcccaaaaaggtgaagggggtgggttttggcgatatcttcaaggataagcccatcaagctgcgaccgagatccattgaggttgagaacgactttttgcctgtggaaaagaccataggaaaaaagctccccgcaacaacggccactcctgattcaagcaagactgaaatggactcacggacaaagtcgaaggactactgtaaggtcatctttccgtatgaggcccagaatgacgacgagttaaccatcaaagaaggtgacatcgtgacactgatcaataaggactgtatcgacgtgggctggtgggaaggagaactcaacggtcggaggggcgtgttccctgacaacttcgtgaagctgctcccaccagacttcgaaaaagagggcaaccgcccaaagaaacctcctccaccttctgcgcctgtgatcaaacagggcgcaggtacgaccgaacgcaaacatgagatcaaaaaaatccccccagaaaggccagaaatgctgccaaaccgcactgaagagaaggaacggccagagcgggagcctaaactggatcttcaaaagccttccgttcccgctataccccctaaaaagcctcgcccaccgaagactaactctctcagtagacctggagccttaccccctcgaagaccagagcggccagtcggccctctgacacacacccgctactgttgcgccctcacttctggcgctggggtgggttggctgtggaaggagcaccgtagaggtaccgattgccacagaccgtgggaggaggggcgaggcgaggggggtgctcaggcgtcgcttctacatccaccagcgaaactctctgaggatacaggtcacttctgtccgtgctcttgtacccaggcaggggtcagcgtccgcctgagaggagcagtgtgggttagctag

SEQ ID NO: 342941 - DNA, 1944 bp, Artificial Sequence
  derived and/or modified sequence
gccgccactgaggaagaagccggcccagccgccgccgcgtccggaccctcgcgcctggatcccagcgccccgatcccggcgccccaacccccacgcccgcctccgccaactttcacgctgcctcggcggcccggcccggctcgacgccaatggtggaggccatagtggagtttgactaccaggcccagcacgatgatgagctgacgatcagcgtgggtgaaatcatcaccaacatcaggaaggaggatggaggctggtgggagggacagatcaacggcaggagaggtttgttccctgacaactttgtaagagaaataaagaaagagatgaagaaagaccctctcaccaacaaagctccagaaaagcccctgcacgaagtgcccagtggaaactctttgctgtcttctgaaacgattttaagaaccaataagagaggcgagcgacggaggcgccggtgccaggtggcattcagctacctgccccagaatgacgatgaacttgagctgaaagttggcgacatcatagaggtggtaggagaggtagaggaaggatggtgggaaggtgttctcaacgggaagactggaatgtttccttccaacttcatcaaggagctgtcaggggagtcggatgagcttggcatttcccaggatgagcagctatccaagtcaaggcctgaaggtctccctccagcttctctgctgccctttccagctcacggagcaaaaggaaagactacctttgaagggacaattctgtaccgagctgcaccgggaaagacggagggccacagacgctattacagtttaagggaaaccacaggctccgagagtgatgggggtgactcaagcagcaccaagtctgaaggtgccaacgggacagtggcaactgcagcaatccagcccaagaaagttaagggagtgggctttggagacattttcaaagacaagccaatcaaactaagaccaaggtcaattgaagtagaaaatgactttctgccggtagaaaagactattgggaagaagttacctgcaactacagcaactccagactcatcaaaaacagaaatggacagcaggacaaagagcaaggattactgcaaagtaatatttccatatgaggcacagaatgatgatgaattgacaatcaaagaaggagatatagtcactctcatcaataaggactgcatcgacgtaggctggtgggaaggagagctgaacggcagacgaggcgtgttccccgataacttcgtgaagttacttccaccggactttgaaaaggaagggaatagacccaagaagccaccgcctccatccgctcctgtcatcaaacaaggggcaggcaccactgagagaaaacatgaaattaaaaagatacctcctgaaagaccagaaatgcttccaaacagaacagaagaaaaagaaagaccagagagagagccaaaactggatttacagaagccctccgttcctgccataccgccaaaaaagcctcggccacctaagaccaattctctcagcagacctggcgcactgcccccgagaaggccggagagaccggtgggtccgctgacacacaccaggtactgctgtgctctcacctccggggcgggtgtggggtggctatggaaggaacacaggaggggaactgactgccacagaccttgggaggaagggagaggagaagggggtgctcaagcttccctcttacatcctccagcaaaattatctgaagacaccggccacttctgtccttgctcctgcactcaggcaggagtgagtgtgaggttgaggggtgcggtgtgggtttcatgaggactgggtacccagcatttaggccctgctcacacacaggggtttttcctgggccttattagaagcaaggccaactgcccttcagcctggaaatgcaggtggcgtgtccctctttgtccccctggatgttgtg

SEQ ID NO: 342942 - DNA, 1662 bp, Artificial Sequence
  derived and/or modified sequence
atggtggaggccatcgtggagttcgactaccaggcccagcacgacgacgagctgaccatcagcgtgggcgagatcatcaccaacatcagaaaggaggacggcggctggtgggagggccagatcaacggcagaagaggcctgttccccgacaacttcgtgagagagatcaagaaggagatgaagaaggaccccctgaccaacaaggcccccgagaagcccctgcacgaggtgcccagcggcaacagcctgctgagcagcgagaccatcctgagaaccaacaagagaggcgagagaagaagaagaagatgccaggtggccttcagctacctgccccagaacgacgacgagctggagctgaaggtgggcgacatcatcgaggtggtgggcgaggtggaggagggctggtgggagggcgtgctgaacggcaagaccggcatgttccccagcaacttcatcaaggagctgagcggcgagagcgacgagctgggcatcagccaggacgagcagctgagcaagagcagacccgagggcctgccccccgccagcctgctgcccttccccgcccacggcgccaagggcaagaccaccttcgagggcaccatcctgtacagagccgcccccggcaagaccgagggccacagaagatactacagcctgagagagaccaccggcagcgagagcgacggcggcgacagcagcagcaccaagagcgagggcgccaacggcaccgtggccaccgccgccatccagcccaagaaggtgaagggcgtgggcttcggcgacatcttcaaggacaagcccatcaagctgagacccagaagcatcgaggtggagaacgacttcctgcccgtggagaagaccatcggcaagaagctgcccgccaccaccgccacccccgacagcagcaagaccgagatggacagcagaaccaagagcaaggactactgcaaggtgatcttcccctacgaggcccagaacgacgacgagctgaccatcaaggagggcgacatcgtgaccctgatcaacaaggactgcatcgacgtgggctggtgggagggcgagctgaacggcagaagaggcgtgttccccgacaacttcgtgaagctgctgccccccgacttcgagaaggagggcaacagacccaagaagccccccccccccagcgcccccgtgatcaagcagggcgccggcaccaccgagagaaagcacgagatcaagaagatcccccccgagagacccgagatgctgcccaacagaaccgaggagaaggagagacccgagagagagcccaagctggacctgcagaagcccagcgtgcccgccatcccccccaagaagcccagaccccccaagaccaacagcctgagcagacccggcgccctgccccccagaagacccgagagacccgtgggccccctgacccacaccagatactgctgcgccctgaccagcggcgccggcgtgggctggctgtggaaggagcacagaagaggcaccgactgccacagaccctgggaggagggcagaggcgagggcggcgcccaggccagcctgctgcacccccccgccaagctgagcgaggacaccggccacttctgcccctgcagctgcacccaggccggcgtgagcgtgagactgagaggcgccgtgtgggtgagctag

SEQ ID NO: 342943 - protein, 404 aa, Artificial Sequence
  derived and/or modified sequence
MDSRTKSKDYCKVIFPYEAQNDDELTIKEGDIVTLINKDCIDVGWWEGELNGRRGVFPDNFVKLLPPDFEKEGNRPKKPPPPSAPVIKQGAGTTERKHEIKKIPPERPEMLPNRTEEKERPEREPKLDLQKPSVPAIPPKKPRPPKTNSLSRPGALPPRRPERPVGPLTHTRGDSPKIDLAGSSLSGILDKDLSDRSNDIDLEGFDSVVSSTEKLSHPTTSRPKATGRRPPSQSLTSSSLSSPDIFDSPSPEEDKEEHISLAHRGVDASKKTSKTVTISQVSDNKASLPPKPGTMAAGGGGPAPLSSAAPSPLSSSLGTAGHRANSPSLFGTEGKPKMEPAASSQAAVEELRTQVRELRSIIETMKDQQKREIKQLLSELDEEKKIRLRLQMEVNDIKKALQSK

SEQ ID NO: 342944 - DNA, 1356 bp, Artificial Sequence
  derived and/or modified sequence
atggagacctctaggagtcccagtcctcagtttgccccgcaaaagctcaccgataaacctcccttgctgatccaggatgaggacagtacgagaatcgaaagggtgatggataataatacaacagtgaagatggtgcccatcaaaatcgtgcattccgaatcacaaccagagaaggaaagccggcaaagccttgcttgccccgcagagccccccgccctgcctcacggcctcgagaaggatcaaattaagactctcagtacttcagaacaattctatagtcggttttgtctgtatacacgtcagggggcagaaccagaagctccacatcgggcccaacctgccgagccccaaccgctaggcacccaggtccctcccgaaaaagaccgatgtacatctccacctggactgtcctacatgaaggcaaaggagaagacagtggaggacttgaagagcgaggagctcgcccgggagatcgtaggtaaagataagtctctcgccgacattctcgacccgagcgtcaagattaaaacaactatggatctgatggagggaatcttccctaaagatgaacacttgttggaggaagcccagcaacggagaaagctgctcccaaagatcccatctccccgttccacagaggagcgcaaggaggaaccatctgttcccgctgccgtgtctcttgccactaacagcacctactacagcacatctgcgccaaaagccgaactcctgatcaaaatgaaagatctgcaagagcaacaggagcacgaggaagatagcggctcagatctcgatcacgatttgtcagtgaaaaagcaggagctgatcgagagtatttcccggaagctacaagtactccgcgaagcgcgcgagagcttgcttgaagatgtccaggcgaatacagtattgggcgccgaggttgaagcgatcgtgaaaggagtctgtaaaccatccgaattcgataagtttcggatgtttatcggcgatctagacaaggtggtgaatctgctgctatcactgtccggcagactcgccagggttgaaaatgccctgaataacctagatgacggcgcctcccctggcgacagacagagcctgctggagaagcagagggtgctgatacagcagcatgaagacgccaaggaactgaaagagaacctggaccgcagggagcgaatcgtgttcgacatccttgctaattacctgtcagaggaaagcctggccgactacgagcactttgtcaagatgaagagtgccctaataatcgagcagagggaacttgaagataaaattcaccttggagaggaacaattgaaatgccttctcgattccctccagcccgagagaggcaagtag

SEQ ID NO: 342945 - DNA, 1128 bp, Artificial Sequence
  derived and/or modified sequence
atggagacctctcggagtccatcgccccagtttgctccgcagaagctgacggataagcccccactgctcatccaggacgaggacagtacacgtatcgaaagggtgatggacaataacaccaccgtgaagatggtccccattaaaatagtccatagcgagtcccagcctgaaaaggaatcccggcagagcctggcgtgccccgcagaaccgccagctctgccccatggattggaaaaggaccagattaagacgctttcaacgtccgaacagttctacagcaggttttgtctgtacacccggcagggagccgaacctgaggcacctcatagggcacagcccgcggaaccccagcccctgggaacacaggtgccccccgaaaaggatcgatgcacctctcctcccggtctgtcatatatgaaagccaaagaaaaaactgttgaggatctgaaatctgaggagctcgctcgggagatcgttgggaaagacaagtctttggccgacatcctggacccaagtgttaagataaagacgaccatggatctgatggagggcatcttcccgaaggacgagcatctgctggaagaggcacagcagaggaggaagctgcttcctaagattccaagccccagatcaacagaagagcggaaggaggagccaagtgtccctgcagccgtgagcctggccacaaattctacgtactattccacttccgccccgaaggcagagttgctgattaagatgaaagatttgcaagagcagcaggagcacgaagaggactccggcagcgatttagaccatgacctgtccgtgaagaaacaggagctgatcgagtctatcagcaggaaactgcaggtgctgcgcgaggctcgagagtcattactcgaggatgtgcaagccaatacggtcctgggtgccgaagtggaggccatcgttaagggcgtctgcaagccttctgagtttgataagtttcgaatgttcattggagatctggataaggttgtcaacctgctattatctctatcagggaggttagctagagtagaaaatgcactcaacaatttagatgatggcgcctcaccgggggatcgtcagtcccttttggaaaaacagcgagtcctcatacagtag

SEQ ID NO: 342946 - DNA, 1203 bp, Artificial Sequence
  derived and/or modified sequence
atggaaacctcacggtcaccaagcccccagtttgcaccccagaaactgaccgacaagccacctttgctcattcaggatgaagactctactagaattgagcgggtgatggacaacaacacgaccgtaaaaatggtacctatcaagatcgtacatagcgaatcgcaaccagagaaggaaagccggcaaagcctggcttgtcctgccgagcctcccgccctgccacatggcttggagaaagaccagattaaaaccctgtctaccagcgaacagttttactcccggttctgcctctatacccgacagggtgccgagcctgaagcccctcacagagcgcaaccagcggagccgcagccacttggaacacaggtccctcccgagaaggaccggtgtacaagtccccctggcttgagctatatgaaggccaaagagaaaacagtggaagaccttaagtctgaagaactagccagagagatcgtaggaaaggacaaatctctcgcagatatcctcgacccgtctgttaaaatcaaaacaaccatggatctaatggagggaattttcccaaaggacgagcacctattggaagaggctcagcagaggcgcaagcttctccctaaaataccatccccaagatcaaccgaggagaggaaggaggaaccctcagtaccagcagctgtgtcgctggcgaccaattcaacctactatagtacaagcgcccctaaggctgagctgctgatcaaaatgaaggacctacaggagcagcaggaacacgaggaagactctggaagcgatctggaccacgacctctcggtgaaaaagcaggaactcatcgaatccataagtaggaagttgcaggtcttacgggaggccagagagagcctgttggaggacgtgcaagcaaacacagtcctcggggctgaagtggaagcaatcgtaaagggagtttgtaagccaagcgagttcgataaatttcgcatgttcattggcgacctggacaaggtagtcaatctgctgttatccctctcggggcgcctggctcgcgtggaaaatgctctcaacaacctggacgatggggcgtcgcccggtgatagacaaagtcttctggaaaaacagagggtacttattcagcagatgtgcgtcgatttcatgctggacacctaccattcccccatcaatagaagttcgtgccttacagtcaccaagtag

SEQ ID NO: 342947 - DNA, 1356 bp, Artificial Sequence
  derived and/or modified sequence
atggagaccagccgcagccccagcccccagtttgccccccagaagctgacagacaagccacccctgctgatccaggatgaggacagcacccgcatcgagcgggtgatggacaacaacaccaccgtgaagatggtgcccatcaagatcgtgcacagcgagagccagcctgagaaggagagccggcagagcctggcctgcccagctgagcccccagccctgccccacggcctggagaaggaccagatcaagaccctgagcaccagcgagcagttctacagccgcttctgcctgtacacccggcagggcgctgagcctgaggccccccaccgggcccagcctgctgagccccagcccctgggcacccaggtgcccccagagaaggaccgctgcaccagccccccaggcctgagctacatgaaggccaaggagaagacagtggaggacctgaagtctgaggagctggcccgggagatcgtgggcaaggacaagagcctggccgacatcctggaccccagcgtgaagatcaagaccaccatggacctgatggagggcatcttccccaaggatgagcacctgctggaggaggcccagcagaggaggaagctgctgcccaagatccccagccccaggagcacagaggagaggaaggaggagcccagcgtgcctgctgctgtgtccctggccaccaacagcacctactacagcaccagcgcccccaaggccgagctgctgatcaagatgaaggacctgcaggagcagcaggagcacgaggaggacagcggcagtgacctggaccatgacctgtctgtgaagaagcaggagctgattgagagcatcagcaggaagctgcaggtgctgcgggaggcccgggagagcctgctggaggatgtgcaggccaacacagtgctgggcgctgaggtggaggccatcgtgaagggcgtgtgcaagcccagcgagtttgacaagttcaggatgtttattggagacctggacaaggtggtgaacctgctgctgagcctgagcggccgcctggcccgggtggagaatgccctgaacaacctggatgatggagccagccctggggaccggcagagcctgctggagaagcagagggtgctgatccagcagcatgaagatgccaaggagctgaaggagaacctggacagaagagaaagaattgtgtttgacatcctggccaactacctgtctgaggagagcctggccgactatgagcactttgtgaagatgaagagcgccctgatcatcgagcagcgggagctggaggacaagatccacctgggggaggagcagctgaagtgcctgctggacagcctgcagcctgagcggggcaagtag

SEQ ID NO: 342948 - DNA, 1128 bp, Artificial Sequence
  derived and/or modified sequence
atggagaccagccgcagccccagcccccagtttgccccccagaagctgacagacaagccacccctgctgatccaggatgaggacagcacccgcatcgagcgggtgatggacaacaacaccaccgtgaagatggtgcccatcaagatcgtgcacagcgagagccagcctgagaaggagagccggcagagcctggcctgcccagctgagcccccagccctgccccacggcctggagaaggaccagatcaagaccctgagcaccagcgagcagttctacagccgcttctgcctgtacacccggcagggcgctgagcctgaggccccccaccgggcccagcctgctgagccccagcccctgggcacccaggtgcccccagagaaggaccgctgcaccagccccccaggcctgagctacatgaaggccaaggagaagacagtggaggacctgaagtctgaggagctggcccgggagatcgtgggcaaggacaagagcctggccgacatcctggaccccagcgtgaagatcaagaccaccatggacctgatggagggcatcttccccaaggatgagcacctgctggaggaggcccagcagaggaggaagctgctgcccaagatccccagccccaggagcacagaggagaggaaggaggagcccagcgtgcctgctgctgtgtccctggccaccaacagcacctactacagcaccagcgcccccaaggccgagctgctgatcaagatgaaggacctgcaggagcagcaggagcacgaggaggacagcggcagtgacctggaccatgacctgtctgtgaagaagcaggagctgattgagagcatcagcaggaagctgcaggtgctgcgggaggcccgggagagcctgctggaggatgtgcaggccaacacagtgctgggcgctgaggtggaggccatcgtgaagggcgtgtgcaagcccagcgagtttgacaagttcaggatgtttattggagacctggacaaggtggtgaacctgctgctgagcctgagcggccgcctggcccgggtggagaatgccctgaacaacctggatgatggagccagccctggggaccggcagagcctgctggagaagcagagggtgctgatccagtag

SEQ ID NO: 342949 - DNA, 1203 bp, Artificial Sequence
  derived and/or modified sequence
atggagaccagccgcagccccagcccccagtttgccccccagaagctgacagacaagccacccctgctgatccaggatgaggacagcacccgcatcgagcgggtgatggacaacaacaccaccgtgaagatggtgcccatcaagatcgtgcacagcgagagccagcctgagaaggagagccggcagagcctggcctgcccagctgagcccccagccctgccccacggcctggagaaggaccagatcaagaccctgagcaccagcgagcagttctacagccgcttctgcctgtacacccggcagggcgctgagcctgaggccccccaccgggcccagcctgctgagccccagcccctgggcacccaggtgcccccagagaaggaccgctgcaccagccccccaggcctgagctacatgaaggccaaggagaagacagtggaggacctgaagtctgaggagctggcccgggagatcgtgggcaaggacaagagcctggccgacatcctggaccccagcgtgaagatcaagaccaccatggacctgatggagggcatcttccccaaggatgagcacctgctggaggaggcccagcagaggaggaagctgctgcccaagatccccagccccaggagcacagaggagaggaaggaggagcccagcgtgcctgctgctgtgtccctggccaccaacagcacctactacagcaccagcgcccccaaggccgagctgctgatcaagatgaaggacctgcaggagcagcaggagcacgaggaggacagcggcagtgacctggaccatgacctgtctgtgaagaagcaggagctgattgagagcatcagcaggaagctgcaggtgctgcgggaggcccgggagagcctgctggaggatgtgcaggccaacacagtgctgggcgctgaggtggaggccatcgtgaagggcgtgtgcaagcccagcgagtttgacaagttcaggatgtttattggagacctggacaaggtggtgaacctgctgctgagcctgagcggccgcctggcccgggtggagaatgccctgaacaacctggatgatggagccagccctggggaccggcagagcctgctggagaagcagagggtgctgatccagcagatgtgtgtggacttcatgctggacacctaccacagccccatcaacagaagcagctgcctgactgtgaccaagtag

SEQ ID NO: 342950 - DNA, 1356 bp, Artificial Sequence
  derived and/or modified sequence
atggagaccagccggagccccagcccccagttcgccccccagaagttaactgacaaacctcctttgctgattcaggatgaagactcaacgaggatcgaaagggtaatggacaataacacaacagtgaagatggtgcccatcaaaattgttcactctgaatcccagccggagaaggagagtcgacagagtctagcctgccctgcggagccgccagccctgccacacggcctcgagaaagatcagataaaaaccttatcaacttcggagcaattttattcgcgtttttgtctctacaccaggcagggcgctgagcccgaggcgccacacagagcccagcccgccgaacctcagcctttaggcacacaggttcctcccgagaaagacaggtgcactagccctccaggtctgtcctatatgaaagctaaggaaaaaaccgtggaagatctcaagtccgaggagctggctcgggagatcgtgggtaaggacaaatctcttgctgatattctggacccttctgtgaagattaaaaccacaatggaccttatggagggtatttttcctaaggacgagcatcttttggaggaggcccagcagaggcgaaagctgctccctaagattccgagcccgcgatccactgaggaaaggaaggaagaaccttctgtgcccgccgctgtatcactggccacaaactccacctactatagcacttcagcccccaaggccgagctgctcatcaaaatgaaagatctccaggaacagcaggaacacgaagaagactccggcagcgatctggatcatgacctaagcgttaagaagcaggaattgatcgaatcaatcagtcgaaagctgcaggtcttaagagaagcaagggagtccctcctcgaggacgtccaggccaataccgttctcggagcagaggtcgaggccattgtgaagggggtgtgtaaaccctctgaatttgacaagtttcgcatgtttattggggatctcgataaggtggtgaacctcctcctgtcactgtccgggagacttgctcgggtggagaatgcgctgaataatctcgacgacggcgcatcacctggagacagacagagcctcctggagaagcagcgggtcctgatccaacagcacgaggacgctaaagagcttaaggaaaacctagaccgcagggagaggattgtgttcgatatcctggccaactacctcagcgaggaaagcctcgccgattacgaacactttgttaagatgaaaagcgccctgattatcgagcagcgggagctggaagataagatacatcttggggaagagcagctgaaatgcttgctggactcattacagcccgagcgcggaaagtag

SEQ ID NO: 342951 - DNA, 1128 bp, Artificial Sequence
  derived and/or modified sequence
atggagaccagccggagccccagcccccagttcgccccccagaagcttacagacaagccccctctgctgatccaggacgaagatagcactcgcattgagagggtcatggacaacaatacaacagtgaagatggtgcctattaagattgtgcatagtgagtcgcagcccgagaaagagtctagacagagcctggcctgcccagccgaaccccctgcactgccccacggcctggagaaagatcaaataaagaccctgtctacttcagagcagttctattccagattttgtctgtacacccggcagggagcagagcccgaggcaccccaccgggcacaacccgccgaaccccagcccctcggtacccaggtcccgcccgagaaggacagatgtacctctccgccagggctgtcatacatgaaagcaaaggagaagactgtggaggatctgaagagcgaggagttggcgcgcgaaatcgttgggaaggataagtctctggccgatattttagatccttctgtcaaaatcaagacaaccatggatctcatggagggtatcttcccaaaagacgaacacctgctcgaggaggctcagcagagaagaaaactattacccaagataccatccccacgatctactgaggagcgcaaggaagagccctccgtgccagcagcagtctcacttgcaaccaattcaacctattacagcacttctgcgccaaaagccgaactgctcatcaagatgaaggatcttcaggaacaacaggagcacgaggaggactcaggctcagacctggatcacgacttgtcagtcaaaaaacaggagctgatagagagcatatcccggaaacttcaggtcttaagggaagcgagagaaagtctgctggaagatgtgcaggcaaacacagttcttggtgccgaggtcgaagcaatcgtgaaaggagtttgcaagccatccgaattcgataaatttcgaatgtttattggggacctggataaagtcgtgaacttgctcctttcactgtcggggaggctggccagagttgagaatgctctgaacaacttggacgatggcgccagcccaggggacagacagagtctcctagagaaacaaagagtgttgatacaatag

SEQ ID NO: 342952 - DNA, 1203 bp, Artificial Sequence
  derived and/or modified sequence
atggagaccagccggagccccagcccccagttcgccccccagaagctgaccgataagccccctctcctgatccaggacgaagattccacaagaatcgaaagagtcatggataacaataccactgtgaagatggtgcccatcaaaatagtgcactctgagtcgcagccagagaaggaaagtcgccagtctctagcttgcccggctgagccacccgccctaccgcacggactggagaaagatcaaattaaaacactatcaacgtccgagcagttttacagccgcttctgcctctacacaaggcagggggctgagcccgaggcccctcacagggcccagccagcagaaccacagcccctgggcactcaggtgccacctgaaaaggatcgctgtacttctcctcccggattaagctatatgaaagcgaaggaaaagacggtggaggatctgaaatccgaagaacttgccagagaaattgttggcaaggataagtcactggctgatatactagatcctagcgtcaaaatcaaaacaacaatggatttgatggagggcatctttcccaaggatgagcacctgttagaagaggcacagcaaaggaggaagctcttgccaaaaatcccctcacctaggtccacagaagagagaaaagaggaaccttctgtaccagccgccgtgtcactggccaccaattccacttactacagtacctccgcccctaaggccgaactgctcattaagatgaaagacttacaggagcagcaggagcatgaggaggatagtggcagcgacttagaccatgatctcagcgttaagaagcaggaactcatcgagagtatctccagaaagctgcaggttttgagagaggcgagggagagcctactggaggatgtgcaggcaaatacggtgctaggagctgaagtggaggccatagtgaaaggtgtgtgtaaaccttccgaatttgataagtttcgaatgtttattggcgacctggacaaggttgtcaacctgctgctcagtttgtctggacgcctcgctagggtggaaaacgccctgaataacctcgatgacggagcctcccccggggaccgtcagtcattgcttgaaaagcagcgggtgctcattcagcagatgtgcgtagattttatgctcgatacgtatcatagcccgatcaacagaagctcgtgtctgaccgttacaaaatag

SEQ ID NO: 342953 - DNA, 1356 bp, Artificial Sequence
  derived and/or modified sequence
atggagacatctcggtccccttcaccccagttcgctcctcagaaacttaccgacaaacctcctctcctgatccaggacgaagactcgacaagaattgaacgagtgatggacaacaacaccaccgtgaaaatggtgccaatcaagatcgtccatagcgagtcacagcctgaaaaggaaagccgtcagtccctggcctgccccgcagaaccaccggcactgccacacggactagaaaaagaccaaattaagacattgtccaccagtgagcaattctacagccggttttgcctgtacacccggcagggcgctgaaccagaagctcctcatagggcccagcctgccgaaccccagccccttgggacccaggttcccccagaaaaagatagatgcacaagtcctccgggactcagttacatgaaagcaaaggagaaaaccgtggaggatctgaaatccgaggagttggctagggagatcgtcggcaaagacaagagcctggctgacatcttagatccttcagttaagattaaaacgacaatggatctgatggaagggatctttccaaaagacgaacacctgttagaggaggcccagcaaaggaggaagctgcttccaaaaattccctctccaagaagcactgaagagagaaaggaagaacccagtgtccccgctgctgtgtccctggctacaaattccacctactactccacttccgctccaaaagccgaactgctcatcaagatgaaagaccttcaggagcagcaggagcatgaggaagactctggcagcgatcttgatcacgatctgagcgtgaaaaagcaggaactgatcgaatctataagcagaaagctgcaagtgctccgggaagccagagagtcccttctagaagatgtgcaggctaacacagtgttgggcgctgaggtggaggccatcgtgaagggggtgtgtaaaccttctgaatttgacaaattccgaatgtttatcggagacttagacaaggtcgtaaacctgttactgtcgctgtcaggacgcctggccagagtcgagaatgccctgaataacctcgacgacggagcttcccctggtgatcgacagagcctactggagaagcagcgggtgttgattcagcagcacgaagacgccaaggagctaaaggaaaatttagaccgcagagagcgcatcgttttcgacatcctggctaactatctgtcagaggagtcactcgcagactacgaacattttgtaaagatgaaatccgcgttaatcattgaacagcgagagctggaggacaaaatacatctcggcgaggaacagctcaaatgtctgctggatagtctgcaaccggaaaggggcaagtag

SEQ ID NO: 342954 - DNA, 1128 bp, Artificial Sequence
  derived and/or modified sequence
atggaaacgtcacggtcaccatccccgcagttcgcgccacagaagctgaccgataagccacctcttctgattcaagatgaagattcaacccgaatcgagagggtgatggacaacaacacaacagtcaaaatggtacctatcaagatcgtgcactccgagtcgcaaccggagaaggagtccagacaatcactcgcctgcccagctgagccaccggcattgccacacggcctggaaaaggatcagattaagacactgagcaccagcgaacagttctattctcggttctgcctgtatacccggcaaggagctgagcctgaggcaccccacagggctcagccagctgaaccacagccactcgggactcaggtgccaccagaaaaggatagatgcacctcacctcctgggctgagctacatgaaagctaaggaaaaaacagtggaggatttaaagtctgaggagctggcacgggaaatcgttggcaaggacaaatccctggctgatatacttgatccatccgttaagatcaagactacgatggacctaatggaaggaattttccccaaagatgagcacctccttgaagaggctcaacagcgcaggaagttgctacctaaaattccatccccacgtagcactgaggagcgcaaggaagagccatccgtcccagctgccgtctctctggccacaaattcgacatactactccacatccgccccaaaggccgaactcttaatcaaaatgaaggatctgcaagaacagcaggaacatgaggaggactccggtagcgatctggaccatgatttgtccgtgaagaagcaagaacttattgagagcatctctcgaaaactccaagtgctgcgcgaagccagggaatctctactggaggacgtccaggccaacactgtgctaggagccgaggtcgaagctattgtgaagggtgtgtgcaaaccatctgaattcgacaagttccgcatgttcatcggggatctggacaaggtggtaaacctcctactgtcactgtcaggcagactcgctcgggttgagaacgccctaaacaatctggacgatggcgcttcgccaggagaccgccagagccttctggagaagcagagggtcctcatccaatag

SEQ ID NO: 342955 - DNA, 1203 bp, Artificial Sequence
  derived and/or modified sequence
atggagaccagccggtccccttctccgcaattcgctccacaaaaactgaccgataagcctccactgctgatccaggacgaggactctactaggattgagagggtcatggataacaacacaaccgttaagatggtgcctataaagatcgtgcattcagagtcccaacctgagaaagaatccaggcagagcttggcgtgtccggctgaacccccagcactgcctcacggcttggaaaaggaccagattaagacacttagcactagtgaacagttttacagccgattctgcctgtatacccgccagggggcagaacctgaggctccccatcgtgcacaaccggcagagccgcagcctctgggaacgcaggtacccccagagaaggatagatgcacttcgcctccgggactttcctacatgaaagcgaaggaaaaaaccgtagaagatctcaaaagcgaggagctggcacgagaaatcgtggggaaagacaagagcttagcagatatcctcgacccctctgtgaagattaagactaccatggacttaatggaagggatctttccaaaagatgaacatctacttgaggaggctcaacagcggagaaaactcttgcctaaaatcccatctcctcggagtactgaggaacgtaaagaggaacctagtgtgccagcagcagtttctcttgcaaccaacagtacttactatagtacttcagcccctaaggcagagctattgatcaagatgaaggatttgcaggaacaacaggagcacgaggaagactcaggtagtgacctggatcatgacttaagcgtgaagaaacaagaacttatcgagagcatttctcgtaagctgcaggtgcttagagaagccagagagtctttgttggaagacgtgcaggcaaacaccgtcctcggcgctgaggtggaggctatcgtaaagggcgtctgtaagccttccgaatttgacaagttcaggatgttcattggagatctggacaaggtggttaatctattattgagcctgagcggccgactggctcgcgtagagaatgctttgaacaacttagatgatggagcttctccaggcgatcgccagtcgctcctggaaaaacaacgtgtgttaatacaacagatgtgtgtggattttatgctcgatacttatcattcccctatcaatcgatcgtcttgcctaactgttaccaaatag

SEQ ID NO: 342956 - DNA, 1356 bp, Artificial Sequence
  derived and/or modified sequence
atggagaccagcagaagccccagcccccagttcgccccccagaagctgaccgacaagccccccctgctgatccaggacgaggacagcaccagaatcgagagagtgatggacaacaacaccaccgtgaagatggtgcccatcaagatcgtgcacagcgagagccagcccgagaaggagagcagacagagcctggcctgccccgccgagccccccgccctgccccacggcctggagaaggaccagatcaagaccctgagcaccagcgagcagttctacagcagattctgcctgtacaccagacagggcgccgagcccgaggccccccacagagcccagcccgccgagccccagcccctgggcacccaggtgccccccgagaaggacagatgcaccagcccccccggcctgagctacatgaaggccaaggagaagaccgtggaggacctgaagagcgaggagctggccagagagatcgtgggcaaggacaagagcctggccgacatcctggaccccagcgtgaagatcaagaccaccatggacctgatggagggcatcttccccaaggacgagcacctgctggaggaggcccagcagagaagaaagctgctgcccaagatccccagccccagaagcaccgaggagagaaaggaggagcccagcgtgcccgccgccgtgagcctggccaccaacagcacctactacagcaccagcgcccccaaggccgagctgctgatcaagatgaaggacctgcaggagcagcaggagcacgaggaggacagcggcagcgacctggaccacgacctgagcgtgaagaagcaggagctgatcgagagcatcagcagaaagctgcaggtgctgagagaggccagagagagcctgctggaggacgtgcaggccaacaccgtgctgggcgccgaggtggaggccatcgtgaagggcgtgtgcaagcccagcgagttcgacaagttcagaatgttcatcggcgacctggacaaggtggtgaacctgctgctgagcctgagcggcagactggccagagtggagaacgccctgaacaacctggacgacggcgccagccccggcgacagacagagcctgctggagaagcagagagtgctgatccagcagcacgaggacgccaaggagctgaaggagaacctggacagaagagagagaatcgtgttcgacatcctggccaactacctgagcgaggagagcctggccgactacgagcacttcgtgaagatgaagagcgccctgatcatcgagcagagagagctggaggacaagatccacctgggcgaggagcagctgaagtgcctgctggacagcctgcagcccgagagaggcaagtag

SEQ ID NO: 342957 - DNA, 1128 bp, Artificial Sequence
  derived and/or modified sequence
atggagaccagcagaagccccagcccccagttcgccccccagaagctgaccgacaagccccccctgctgatccaggacgaggacagcaccagaatcgagagagtgatggacaacaacaccaccgtgaagatggtgcccatcaagatcgtgcacagcgagagccagcccgagaaggagagcagacagagcctggcctgccccgccgagccccccgccctgccccacggcctggagaaggaccagatcaagaccctgagcaccagcgagcagttctacagcagattctgcctgtacaccagacagggcgccgagcccgaggccccccacagagcccagcccgccgagccccagcccctgggcacccaggtgccccccgagaaggacagatgcaccagcccccccggcctgagctacatgaaggccaaggagaagaccgtggaggacctgaagagcgaggagctggccagagagatcgtgggcaaggacaagagcctggccgacatcctggaccccagcgtgaagatcaagaccaccatggacctgatggagggcatcttccccaaggacgagcacctgctggaggaggcccagcagagaagaaagctgctgcccaagatccccagccccagaagcaccgaggagagaaaggaggagcccagcgtgcccgccgccgtgagcctggccaccaacagcacctactacagcaccagcgcccccaaggccgagctgctgatcaagatgaaggacctgcaggagcagcaggagcacgaggaggacagcggcagcgacctggaccacgacctgagcgtgaagaagcaggagctgatcgagagcatcagcagaaagctgcaggtgctgagagaggccagagagagcctgctggaggacgtgcaggccaacaccgtgctgggcgccgaggtggaggccatcgtgaagggcgtgtgcaagcccagcgagttcgacaagttcagaatgttcatcggcgacctggacaaggtggtgaacctgctgctgagcctgagcggcagactggccagagtggagaacgccctgaacaacctggacgacggcgccagccccggcgacagacagagcctgctggagaagcagagagtgctgatccagtag

SEQ ID NO: 342958 - DNA, 1203 bp, Artificial Sequence
  derived and/or modified sequence
atggagaccagcagaagccccagcccccagttcgccccccagaagctgaccgacaagccccccctgctgatccaggacgaggacagcaccagaatcgagagagtgatggacaacaacaccaccgtgaagatggtgcccatcaagatcgtgcacagcgagagccagcccgagaaggagagcagacagagcctggcctgccccgccgagccccccgccctgccccacggcctggagaaggaccagatcaagaccctgagcaccagcgagcagttctacagcagattctgcctgtacaccagacagggcgccgagcccgaggccccccacagagcccagcccgccgagccccagcccctgggcacccaggtgccccccgagaaggacagatgcaccagcccccccggcctgagctacatgaaggccaaggagaagaccgtggaggacctgaagagcgaggagctggccagagagatcgtgggcaaggacaagagcctggccgacatcctggaccccagcgtgaagatcaagaccaccatggacctgatggagggcatcttccccaaggacgagcacctgctggaggaggcccagcagagaagaaagctgctgcccaagatccccagccccagaagcaccgaggagagaaaggaggagcccagcgtgcccgccgccgtgagcctggccaccaacagcacctactacagcaccagcgcccccaaggccgagctgctgatcaagatgaaggacctgcaggagcagcaggagcacgaggaggacagcggcagcgacctggaccacgacctgagcgtgaagaagcaggagctgatcgagagcatcagcagaaagctgcaggtgctgagagaggccagagagagcctgctggaggacgtgcaggccaacaccgtgctgggcgccgaggtggaggccatcgtgaagggcgtgtgcaagcccagcgagttcgacaagttcagaatgttcatcggcgacctggacaaggtggtgaacctgctgctgagcctgagcggcagactggccagagtggagaacgccctgaacaacctggacgacggcgccagccccggcgacagacagagcctgctggagaagcagagagtgctgatccagcagatgtgcgtggacttcatgctggacacctaccacagccccatcaacagaagcagctgcctgaccgtgaccaagtag

SEQ ID NO: 342959 - protein, 590 aa, Artificial Sequence
  derived and/or modified sequence
MRPRRPLVFMSLVCALLNTCQAHRVHDDKPNIVLIMVDDLGIGDLGCYGNDTMRTPHIDRLAREGVRLTQHISAASLCSPSRSAFLTGRYPIRSGMVSSGNRRVIQNLAVPAGLPLNETTLAALLKKQGYSTGLIGKWHQGLNCDSRSDQCHHPYNYGFDYYYGMPFTLVDSCWPDPSRNTELAFESQLWLCVQLVAIAILTLTFGKLSGWVSVPWLLIFSMILFIFLLGYAWFSSHTSPLYWDCLLMRGHEITEQPMKAERAGSIMVKEAISFLERHSKETFLLFFSFLHVHTPLPTTDDFTGTSKHGLYGDNVEEMDSMVGKILDAIDDFGLRNNTLVYFTSDHGGHLEARRGHAQLGGWNGIYKGGKGMGGWEGGIRVPGIVRWPGKVPAGRLIKEPTSLMDILPTVASVSGGSLPQDRVIDGRDLMPLLQGNVRHSEHEFLFHYCGSYLHAVRWIPKDDSGSVWKAHYVTPVFQPPASGGCYVTSLCRCFGEQVTYHNPPLLFDLSRDPSESTPLTPATEPLHDFVIKKVANALKEHQETIVPVTYQLSELNQGRTWLKPCCGVFPFCLCDKEEEVSQPRGPNEKR

SEQ ID NO: 342960 - DNA, 1991 bp, Artificial Sequence
  derived and/or modified sequence
gttctgctcctagacattagagagataatacggctgatagacaacaagaaggtattccaagctgcacaatgaggcccaggagacccttggtcttcatgtctttggtgtgtgcactcttgaacacatgccaggcacacagggtgcatgacgacaagcctaatattgtcctaatcatggttgatgacctgggtattggagatctgggctgctacggcaatgacaccatgaggacgcctcacatcgaccgccttgccagggaaggcgtgcgactgactcagcacatctctgccgcctccctctgcagcccaagccggtccgcgttcttgacgggaagataccccatccgatcaggtatggtttctagtggtaatagacgtgtcatccaaaatcttgcagtccccgcaggcctccctcttaatgagacaacacttgcagccttgctaaagaagcaaggatacagcacggggcttataggcaaatggcaccaaggcttgaactgcgactcccgaagtgaccagtgccaccatccatataattatgggtttgactactactatggcatgccgttcactctcgttgacagctgctggccggacccctctcgtaacacggaattagcctttgagagtcagctctggctctgtgtgcagctagttgccattgccatcctcaccctaacctttgggaagctgagcggctgggtctctgttccctggctcctgatcttctccatgattctgtttattttcctcttgggctatgcttggttctccagccacacgtcccctttatactgggactgcctcctcatgcgggggcacgagatcacggagcagcccatgaaggctgaacgagctggatccattatggtgaaggaagcgatttcctttttagaaaggcacagtaaggaaactttccttctctttttctcctttcttcacgtgcacacacctctccccaccacggacgatttcactggcaccagcaagcatggcttgtatggggataatgtggaagagatggactccatggtgggcaagattcttgatgctatcgatgattttggcctaaggaacaacacccttgtctactttacatcagatcacggagggcatttggaagctaggcgagggcatgcccaacttggtggatggaatggaatatacaaaggtggaaaaggcatggggggctgggaaggtggaatccgcgtcccaggaattgtccgatggcctggaaaggtaccagctggacggttgattaaggaacctacaagtttaatggatattttaccaactgtcgcatcagtgtcaggaggaagtctccctcaggacagggtcattgacggccgagacctcatgcccttgctgcagggcaacgtcaggcactcggagcatgaatttcttttccactactgtggctcctacctgcacgccgtgcggtggatccccaaggacgacagtgggtcagtttggaaggctcactatgtgaccccggtattccagccaccagcttctggtggctgctatgtcacctcattatgcagatgtttcggagaacaggttacctaccacaacccccctctgctcttcgatctctccagggacccctcagagtccacacccctgacacctgccacagagcccctccatgattttgtgattaaaaaggtggccaacgccctgaaggaacaccaggaaaccatcgtgcctgtgacctaccaactctcagaactgaatcagggcaggacgtggctgaagccttgctgtggggtgttcccattttgtctgtgtgacaaggaagaggaagtctctcagcctcggggtcctaacgagaagagataattacaatcaggctaccagaggaagcctttggtcctaacgagaagagataattacaatcaggctaccaaaggaagcactaactttggtgctttcaagttggcaaggagtgcatttaatagtcaataaattcatctaccattccagattatt

SEQ ID NO: 342961 - DNA, 2164 bp, Artificial Sequence
  derived and/or modified sequence
agtggagacaggctctcaccatgttgaccaggctggtctcgaactcccgacctcaagtgatccgccggcctcggcctcccaaagtgctgggattacaggcgtgaaccaccactcctggcccttctgttacttttccactgctgttgagatagaagtcactgttgggatccaacctttttgtttgtataaactgacaacaagaaggtattccaagctgcacaatgaggcccaggagacccttggtcttcatgtctttggtgtgtgcactcttgaacacatgccaggcacacagggtgcatgacgacaagcctaatattgtcctaatcatggttgatgacctgggtattggagatctgggctgctacggcaatgacaccatgaggacgcctcacatcgaccgccttgccagggaaggcgtgcgactgactcagcacatctctgccgcctccctctgcagcccaagccggtccgcgttcttgacgggaagataccccatccgatcaggtatggtttctagtggtaatagacgtgtcatccaaaatcttgcagtccccgcaggcctccctcttaatgagacaacacttgcagccttgctaaagaagcaaggatacagcacggggcttataggcaaatggcaccaaggcttgaactgcgactcccgaagtgaccagtgccaccatccatataattatgggtttgactactactatggcatgccgttcactctcgttgacagctgctggccggacccctctcgtaacacggaattagcctttgagagtcagctctggctctgtgtgcagctagttgccattgccatcctcaccctaacctttgggaagctgagcggctgggtctctgttccctggctcctgatcttctccatgattctgtttattttcctcttgggctatgcttggttctccagccacacgtcccctttatactgggactgcctcctcatgcgggggcacgagatcacggagcagcccatgaaggctgaacgagctggatccattatggtgaaggaagcgatttcctttttagaaaggcacagtaaggaaactttccttctctttttctcctttcttcacgtgcacacacctctccccaccacggacgatttcactggcaccagcaagcatggcttgtatggggataatgtggaagagatggactccatggtgggcaagattcttgatgctatcgatgattttggcctaaggaacaacacccttgtctactttacatcagatcacggagggcatttggaagctaggcgagggcatgcccaacttggtggatggaatggaatatacaaaggtggaaaaggcatggggggctgggaaggtggaatccgcgtcccaggaattgtccgatggcctggaaaggtaccagctggacggttgattaaggaacctacaagtttaatggatattttaccaactgtcgcatcagtgtcaggaggaagtctccctcaggacagggtcattgacggccgagacctcatgcccttgctgcagggcaacgtcaggcactcggagcatgaatttcttttccactactgtggctcctacctgcacgccgtgcggtggatccccaaggacgacagtgggtcagtttggaaggctcactatgtgaccccggtattccagccaccagcttctggtggctgctatgtcacctcattatgcagatgtttcggagaacaggttacctaccacaacccccctctgctcttcgatctctccagggacccctcagagtccacacccctgacacctgccacagagcccctccatgattttgtgattaaaaaggtggccaacgccctgaaggaacaccaggaaaccatcgtgcctgtgacctaccaactctcagaactgaatcagggcaggacgtggctgaagccttgctgtggggtgttcccattttgtctgtgtgacaaggaagaggaagtctctcagcctcggggtcctaacgagaagagataattacaatcaggctaccagaggaagcctttggtcctaacgagaagagataattacaatcaggctaccaaaggaagcactaactttggtgctttcaagttggcaaggagtgcatttaatagtcaataaattcatctaccattccagattattaaaggcccactggttgttcc

SEQ ID NO: 342962 - protein, 1059 aa, Artificial Sequence
  derived and/or modified sequence
MKESSLQNSSCSLGKETKKENMFLQSSMLTCIFLLISGSCELCAEENFSRSYPCDEKKQNDSVIAECSNRRLQEVPQTVGKYVTELDLSDNFITHITNESFQGLQNLTKINLNHNPNVQHQNGNPGIQSNGLNITDGAFLNLKNLRELLLEDNQLPQIPSGLPESLTELSLIQNNIYNITKEGISRLINLKNLYLAWNCYFNKVCEKTNIEDGVFETLTNLELLSLSFNSLSHVPPKLPSSLRKLFLSNTQIKYISEEDFKGLINLTLLDLSGNCPRCFNAPFPCVPCDGGASINIDRFAFQNLTQLRYLNLSSTSLRKINAAWFKNMPHLKVLDLEFNYLVGEIASGAFLTMLPRLEILDLSFNYIKGSYPQHINISRNFSKLLSLRALHLRGYVFQELREDDFQPLMQLPNLSTINLGINFIKQIDFKLFQNFSNLEIIYLSENRISPLVKDTRQSYANSSSFQRHIRKRRSTDFEFDPHSNFYHFTRPLIKPQCAAYGKALDLSLNSIFFIGPNQFENLPDIACLNLSANSNAQVLSGTEFSAIPHVKYLDLTNNRLDFDNASALTELSDLEVLDLSYNSHYFRIAGVTHHLEFIQNFTNLKVLNLSHNNIYTLTDKYNLESKSLVELVFSGNRLDILWNDDDNRYISIFKGLKNLTRLDLSLNRLKHIPNEAFLNLPASLTELHINDNMLKFFNWTLLQQFPRLELLDLRGNKLLFLTDSLSDFTSSLRTLLLSHNRISHLPSGFLSEVSSLKHLDLSSNLLKTINKSALETKTTTKLSMLELHGNPFECTCDIGDFRRWMDEHLNVKIPRLVDVICASPGDQRGKSIVSLELTTCVSDVTAVILFFFTFFITTMVMLAALAHHLFYWDVWFIYNVCLAKVKGYRSLSTSQTFYDAYISYDTKDASVTDWVINELRYHLEESRDKNVLLCLEERDWDPGLAIIDNLMQSINQSKKTVFVLTKKYAKSWNFKTAFYLALQRLMDENMDVIIFILLEPVLQHSQYLRLRQRICKSSILQWPDNPKAEGLFWQTLRNVVLTENDSRYNNMYVDSIKQY

SEQ ID NO: 342963 - DNA, 3180 bp, Artificial Sequence
  derived and/or modified sequence
atgaaggagagcagcctgcagaacagcagctgcagcctgggcaaggagaccaagaaggagaacatgttcctgcagagcagcatgctgacctgcatcttcctgctgatcagcggcagctgcgagctgtgcgccgaggagaacttcagcagaagctacccctgcgacgagaagaagcagaacgacagcgtgatcgccgagtgcagcaacagaagactgcaggaggtgccccagaccgtgggcaagtacgtgaccgagctggacctgagcgacaacttcatcacccacatcaccaacgagagcttccagggcctgcagaacctgaccaagatcaacctgaaccacaaccccaacgtgcagcaccagaacggcaaccccggcatccagagcaacggcctgaacatcaccgacggcgccttcctgaacctgaagaacctgagagagctgctgctggaggacaaccagctgccccagatccccagcggcctgcccgagagcctgaccgagctgagcctgatccagaacaacatctacaacatcaccaaggagggcatcagcagactgatcaacctgaagaacctgtacctggcctggaactgctacttcaacaaggtgtgcgagaagaccaacatcgaggacggcgtgttcgagaccctgaccaacctggagctgctgagcctgagcttcaacagcctgagccacgtgccccccaagctgcccagcagcctgagaaagctgttcctgagcaacacccagatcaagtacatcagcgaggaggacttcaagggcctgatcaacctgaccctgctggacctgagcggcaactgccccagatgcttcaacgcccccttcccctgcgtgccctgcgacggcggcgccagcatcaacatcgacagattcgccttccagaacctgacccagctgagatacctgaacctgagcagcaccagcctgagaaagatcaacgccgcctggttcaagaacatgccccacctgaaggtgctggacctggagttcaactacctggtgggcgagatcgccagcggcgccttcctgaccatgctgcccagactggagatcctggacctgagcttcaactacatcaagggcagctacccccagcacatcaacatcagcagaaacttcagcaagctgctgagcctgagagccctgcacctgagaggctacgtgttccaggagctgagagaggacgacttccagcccctgatgcagctgcccaacctgagcaccatcaacctgggcatcaacttcatcaagcagatcgacttcaagctgttccagaacttcagcaacctggagatcatctacctgagcgagaacagaatcagccccctggtgaaggacaccagacagagctacgccaacagcagcagcttccagagacacatcagaaagagaagaagcaccgacttcgagttcgacccccacagcaacttctaccacttcaccagacccctgatcaagccccagtgcgccgcctacggcaaggccctggacctgagcctgaacagcatcttcttcatcggccccaaccagttcgagaacctgcccgacatcgcctgcctgaacctgagcgccaacagcaacgcccaggtgctgagcggcaccgagttcagcgccatcccccacgtgaagtacctggacctgaccaacaacagactggacttcgacaacgccagcgccctgaccgagctgagcgacctggaggtgctggacctgagctacaacagccactacttcagaatcgccggcgtgacccaccacctggagttcatccagaacttcaccaacctgaaggtgctgaacctgagccacaacaacatctacaccctgaccgacaagtacaacctggagagcaagagcctggtggagctggtgttcagcggcaacagactggacatcctgtggaacgacgacgacaacagatacatcagcatcttcaagggcctgaagaacctgaccagactggacctgagcctgaacagactgaagcacatccccaacgaggccttcctgaacctgcccgccagcctgaccgagctgcacatcaacgacaacatgctgaagttcttcaactggaccctgctgcagcagttccccagactggagctgctggacctgagaggcaacaagctgctgttcctgaccgacagcctgagcgacttcaccagcagcctgagaaccctgctgctgagccacaacagaatcagccacctgcccagcggcttcctgagcgaggtgagcagcctgaagcacctggacctgagcagcaacctgctgaagaccatcaacaagagcgccctggagaccaagaccaccaccaagctgagcatgctggagctgcacggcaaccccttcgagtgcacctgcgacatcggcgacttcagaagatggatggacgagcacctgaacgtgaagatccccagactggtggacgtgatctgcgccagccccggcgaccagagaggcaagagcatcgtgagcctggagctgaccacctgcgtgagcgacgtgaccgccgtgatcctgttcttcttcaccttcttcatcaccaccatggtgatgctggccgccctggcccaccacctgttctactgggacgtgtggttcatctacaacgtgtgcctggccaaggtgaagggctacagaagcctgagcaccagccagaccttctacgacgcctacatcagctacgacaccaaggacgccagcgtgaccgactgggtgatcaacgagctgagataccacctggaggagagcagagacaagaacgtgctgctgtgcctggaggagagagactgggaccccggcctggccatcatcgacaacctgatgcagagcatcaaccagagcaagaagaccgtgttcgtgctgaccaagaagtacgccaagagctggaacttcaagaccgccttctacctggccctgcagagactgatggacgagaacatggacgtgatcatcttcatcctgctggagcccgtgctgcagcacagccagtacctgagactgagacagagaatctgcaagagcagcatcctgcagtggcccgacaaccccaaggccgagggcctgttctggcagaccctgagaaacgtggtgctgaccgagaacgacagcagatacaacaacatgtacgtggacagcatcaagcagtactag

SEQ ID NO: 342964 - DNA, 3180 bp, Artificial Sequence
  derived and/or modified sequence
atgaaagagtcatccttgcagaactctagttgtagtctgggcaaggagaccaagaaggagaatatgttcctccagagctctatgctgacttgcatttttcttctcatcagtggaagctgtgagctatgcgccgaagaaaacttttctaggtcttacccttgtgatgaaaaaaagcagaacgacagcgtgatagccgagtgctctaatcgccggttgcaggaggtcccccaaaccgttggcaagtatgtaactgagctggatctgtccgacaatttcattacacacatcacaaatgaaagcttccaaggccttcagaatttgactaaaattaatctgaatcataacccaaacgtgcagcaccagaacggcaatccagggatccagagtaatggactgaacattaccgatggcgcttttctgaacctgaagaatttacgagaactgcttctggaggataatcagttgcctcagattccctccggcttacccgagagtctcactgagctgagcctgatccaaaacaatatttataacattacaaaagagggaatctctcgactgatcaatcttaagaatctgtacctggcctggaactgttacttcaataaggtttgtgaaaagacgaatatcgaggatggagtgttcgagacattgacaaatttagagctcctgtccctgtccttcaacagcctctctcacgtcccccccaagctgccatccagtctgagaaaacttttcctctccaacacccagattaaatacatcagcgaggaagactttaaaggactaataaacttgacactccttgatctgagcgggaattgtccgcggtgtttcaatgctccattcccgtgcgttccatgcgatgggggcgcttccatcaacatagacaggtttgcgtttcagaatctcacccaattgaggtatttaaacctcagcagtacctccctgcggaagatcaatgcagcctggtttaagaatatgcctcacttgaaggtattggatctggagtttaattaccttgtgggagagatcgcaagcggcgcctttctaaccatgctcccgaggctggaaatcctggacctgtctttcaattatatcaagggtagttacccacagcacataaacatatctcgaaatttttcaaaactgcttagcctgcgtgccctccacctacgaggctatgtcttccaggagctcagggaagatgactttcagcccctaatgcaactgccaaatctgtctacaattaacctgggtataaatttcatcaaacagatcgatttcaagctcttccaaaatttctcgaatctggagatcatctacctcagcgagaaccgaatttcccccctggttaaggatactcgccagagttatgctaatagcagctctttccaacgccatattcgaaagagacggagtactgactttgagtttgatccccattccaatttctaccactttacccggccccttatcaagccccagtgcgctgcatatgggaaagcacttgacctatccctcaatagcatcttctttattgggcctaaccagttcgaaaatctgcctgatatcgcctgcttgaacctgtcggcaaattcaaacgcccaggtgctgagtggcaccgaattttcagccattcctcacgtcaaatacctagatctcaccaataaccggctcgacttcgacaacgcctctgccttgacagagctgtccgacctggaagtgctggacctgagctataatagtcactattttcgtattgcaggggttacgcaccacctggagttcatccagaatttcactaacctaaaggttctgaacctcagtcataataacatttacaccctaaccgacaaatacaatctcgaatctaaatccctcgtagaactagtgttcagcggaaatcgattggacattctgtggaacgatgacgataatcgatacatttcaatttttaaagggttaaaaaacctgaccagattggatctgtccctcaaccggctgaagcatatccccaatgaagcttttctcaatctgccggcatcgctgacagaactccatataaatgataatatgctaaaattttttaactggacccttttacagcaattccctcgcctagagctcctggacttacgcggcaacaaattactgttcctgacagacagtttgtctgatttcacttcttctctgcgcactctactcctctctcacaaccgaattagtcatctcccatccggttttctatcagaagtgtcctcgctgaagcatctcgatctttcctccaatctgttgaagacaattaataagagcgctctcgagaccaagaccactaccaaactgagcatgctggagcttcatggtaacccctttgagtgcacttgcgatatcggtgacttcaggagatggatggatgagcacctcaatgtgaagattcccagactggtcgacgtgatctgtgctagtcctggcgaccagaggggaaagtctatcgttagcttagaactcaccacatgcgtgagcgacgttactgctgtcatactgttctttttcacctttttcattaccactatggtaatgcttgcagccctggcacatcacctcttctattgggacgtgtggtttatttataacgtgtgcctcgctaaagttaagggctatagaagtctgtctacatcccaaactttctacgatgcctacatatcttacgatacaaaggatgcaagtgtcacagattgggtgataaatgagctgaggtaccacctggaggagagtagagataaaaacgtcttgctctgtttagaggagcgcgattgggacccaggcctggccatcatagacaacctgatgcagtccattaatcaaagcaaaaagactgtcttcgtcctgactaaaaagtatgcaaagagttggaacttcaaaacggccttctacctagcccttcagcgcctgatggatgaaaatatggacgtcatcatcttcatcctcctggagcctgtgctgcagcatagtcagtatctcagactgcgacagaggatctgtaaatccagtatcctgcaatggcccgataatccaaaggctgagggactattctggcagactctcagaaatgtggttctcacagagaatgattcccgttataataatatgtacgtggatagtattaagcagtactag

SEQ ID NO: 342965 - DNA, 3180 bp, Artificial Sequence
  derived and/or modified sequence
atgaaggagagcagcctgcagaacagcagctgcagcctgggcaaggagaccaagaaggagaacatgttcctgcagagctccatgctgacctgcatcttcctgctgatcagcggcagctgtgagctgtgtgccgaggagaacttcagccgcagctacccctgtgatgagaagaagcagaatgacagcgtgattgctgagtgcagcaacagaaggctgcaggaggtgccccagacagtgggcaagtatgtgacagagctggacctgagtgacaacttcatcacccacatcaccaatgaaagcttccagggcctgcagaacctgaccaagatcaacctgaaccacaaccccaacgtgcagcaccagaatggaaatcctggcatccagagcaatggcctgaacatcacagatggagccttcctgaacctgaagaacctgcgggagctgctgctggaggacaaccagctgccccagatccccagcggcctgcctgagagcctgacagagctgagcctcatccagaacaacatctacaacatcaccaaggagggcatcagccgcctcatcaacctgaagaacctgtacctggcctggaactgctacttcaacaaggtgtgtgagaagaccaacattgaagatggagtgtttgagaccctgaccaacctggagctgctgagcctgtccttcaacagcctgagccacgtgccccccaagctgcccagcagcctgaggaagctgttcctgagcaacacccagatcaagtacatcagcgaggaggacttcaagggcctcatcaacctgaccctgctggacctgagcggcaactgcccccgctgcttcaatgcccccttcccctgtgtgccctgtgatggaggagccagcatcaacatcgacagatttgccttccagaacctgacccagctgcgctacctgaacctgagcagcaccagcctgaggaagatcaatgctgcctggttcaagaacatgccccacctgaaggtgctggacctggagttcaactacctggtgggggagatcgccagcggggccttcctgaccatgctgccccggctggagatcctggacctgtccttcaactacatcaagggcagctacccccagcacatcaacatcagcaggaacttcagcaagctgctgagcctgcgggccctgcacctgcggggctacgtgttccaggagctgcgggaggatgacttccagcccctgatgcagctgcccaacctgagcaccatcaacctgggcatcaacttcatcaagcagattgacttcaagctgttccagaacttcagcaacctggagatcatctacctgtctgaaaatcgcatcagccccctggtgaaggacacccggcagagctatgccaacagcagcagcttccagaggcacatcaggaagaggaggagcacagactttgaatttgacccccacagcaacttctaccacttcacccggcccctcatcaagccccagtgtgccgcctacggcaaggccctggacctgagcctgaacagcatcttcttcatcggccccaaccagtttgagaacctgcctgacatcgcctgcctgaacctgagcgccaacagcaatgcccaggtgctgagcggcacagagttcagcgccatcccccacgtgaagtacctggacctgaccaacaaccggctggactttgacaatgccagcgccctgacagagctgagtgacctggaggtgctggacctgagctacaacagccactacttcagaattgctggggtgacccaccacctggagttcatccagaacttcaccaacctgaaggtgctgaacctgagccacaacaacatctacaccctgacagacaagtacaacctggagagcaagagcctggtggagctggtgttcagcggcaaccggctggacatcctgtggaatgatgatgacaaccgctacatcagcatcttcaagggcctgaagaacctgacccggctggacctgagcctgaaccggctgaagcacatccccaatgaggccttcctgaacctgcctgccagcctgacagagctgcacatcaatgacaacatgctgaagttcttcaactggaccctgctgcagcagttcccccggctggagctgctggacctgcggggcaacaagctgctcttcctgacagacagcctgagtgacttcaccagcagcctgcggaccctgctgctgagccacaaccgcatcagccacctgcccagcggcttcctgtctgaggtgagcagcctgaagcacctggacctgagcagcaacctgctgaagaccatcaacaagagcgccctggagaccaagaccaccaccaagctgtccatgctggagctgcacggcaacccctttgaatgtacctgtgacatcggggacttccgccgctggatggatgagcacctgaatgtgaagatcccccggctggtggatgtgatctgtgccagccctggggaccagaggggcaagagcatcgtgtccctggagctgaccacctgtgtgtctgatgtgacagctgtgatcctcttcttcttcaccttcttcatcaccaccatggtgatgctggccgccctggcccaccacctgttctactgggatgtgtggttcatctacaacgtgtgcctggccaaggtgaagggctaccgcagcctgagcaccagccagaccttctatgatgcctacatctcctatgacaccaaggatgcctctgtgacagactgggtgatcaatgagctgcgctaccacctggaggagagccgggacaagaatgtgctgctgtgcctggaggagcgggactgggaccccggcctggccatcatcgacaacctgatgcagagcatcaaccagagcaagaagacagtgtttgtgctgaccaagaagtatgccaagtcctggaacttcaagacagccttctacctggccctgcagaggctgatggatgagaacatggatgtgatcatcttcatcctgctggagcctgtgctgcagcacagccagtacctgcggctgcggcagaggatctgcaagagcagcatcctgcagtggccagacaaccccaaggccgagggcctcttctggcagaccctgagaaatgtggtgctgacagaaaatgacagccgctacaacaacatgtatgtggacagcatcaagcagtactag

SEQ ID NO: 342966 - DNA, 3180 bp, Artificial Sequence
  derived and/or modified sequence
atgaaggagagcagcctgcagaacagcagctgcagcctgggcaaggagacaaagaaagagaacatgttcttgcagtcatccatgctgacctgcatcttcctcctgatcagtgggtcgtgcgagctctgcgctgaggaaaacttcagtaggtcttatccctgcgatgagaaaaagcaaaatgacagcgtaattgctgaatgctccaatcgtcgcttacaggaggttccccaaaccgtggggaagtatgtgacagagctggacctttcagacaactttattactcatatcacgaacgagtctttccagggcctgcagaatctcaccaaaatcaacctgaaccacaatccaaatgtgcagcaccagaacggcaaccctgggatccagtccaacgggctgaacattactgatggggcctttctgaacttgaagaaccttcgtgagctgttgttggaggacaatcaattacctcagataccctctggactgccagagtccctcacagaattatccttgatccagaataatatttataacataacaaaggagggaatctcccgcctgattaatttgaagaacctgtacttagcttggaattgctacttcaacaaggtgtgtgaaaaaactaatatcgaagatggggtgttcgagactctgaccaatctggagctgctttctctcagctttaacagtctgtcccatgtcccacctaaactcccttcctcactgagaaaactgttcctaagcaacactcagataaaatatatcagtgaggaggatttcaaggggctgataaacctcacgcttctggatctgtccggaaactgtccaaggtgttttaacgcccccttcccatgtgttccttgtgatggcggggcctcaatcaatatcgaccgatttgcgttccaaaatctcacccaactgcgctatctcaatctaagttccacatcactccgaaaaatcaacgctgcttggttcaaaaacatgccccatcttaaggttttagacttggaattcaactacctggttggcgagatcgcatctggggccttcttaaccatgctaccccgcctggaaatattggatctgtcctttaattatataaaagggagctatccacagcatattaacataagtcggaatttcagtaagctgctgtccttgcgagccctgcatctgcgcgggtacgtgttccaggagttgcgtgaggacgatttccagcctcttatgcagttacccaatcttagcacaatcaatctaggtattaactttattaagcaaatcgactttaaattgtttcagaacttcagtaatctcgaaataatctacctgtccgagaataggatatcaccactggtgaaagatactcgacagagctacgccaactcaagttcctttcaacggcacattagaaaacggagatctaccgacttcgaattcgatcctcactcaaatttttaccacttcacccgtcctctgattaaaccccagtgcgctgcgtacggaaaagcactcgatctcagcttaaatagcattttcttcattggaccgaaccagttcgaaaatcttcccgacattgcttgtctcaatctaagcgcaaactccaatgcccaagtgctgtccggaacagagttcagcgcaatccctcatgttaaatatctcgacctgacaaataatcgcctcgattttgataacgcatcagcattgacagagttgagtgatctcgaggttctcgacctttcttacaactcacattatttccgtatcgccggggtcactcatcacctggaattcattcagaactttacgaatttgaaggttctaaacttgtcccacaacaacatatacacactcacagataagtataatttagagagcaagagcttagtggagctggttttctcaggaaacagactggatatcttgtggaatgacgacgacaaccgatacatctctatttttaaggggttgaaaaacctgactcggctcgacctttccttgaaccgactgaagcatataccgaatgaagcttttcttaatttgcctgccagtctgactgaactgcacataaatgacaatatgctgaagttcttcaactggaccctgctacagcagtttccccggctcgaactgctcgacctcagggggaacaaacttctgttccttacagactctttgagcgactttacctccagtctgcgaactctcctgctcagtcataatcgaatctcccacttgcctagtgggttcctttccgaagtaagttccctgaagcacctggatctgtctagcaatctgctgaagacgataaacaagtcggccttagagacaaaaaccaccactaagctctccatgctggagctgcacgggaacccattcgagtgtacatgtgacatcggagactttaggcggtggatggatgagcatttgaacgtaaaaatacctcggctggtggacgtgatctgcgccagtcctggagatcagcgaggtaagagtattgtgtccctcgagctcaccacgtgtgtaagcgacgtgactgctgtgatcttgttcttctttacattcttcatcacaaccatggttatgttagctgcccttgctcaccacttgttttactgggacgtgtggttcatctacaacgtctgcctggctaaagtgaagggctaccgcagcctgagtacatcacagactttctacgatgcctacatctcttacgacaccaaggatgcctctgtcaccgactgggttatcaacgagctgcggtaccaccttgaagaatcccgcgataaaaatgtactgctctgtctggaggagcgagattgggaccccggactggccattatcgacaacctgatgcagtccatcaaccagtctaaaaaaaccgtgtttgtcttgacaaaaaaatacgctaagtcgtggaacttcaagactgccttctacctcgctttgcaacgcctcatggatgagaacatggacgttattatctttatactgcttgagccagttttgcagcactcacaatacctgagattacgccagcgaatttgtaagtccagcatactgcaatggccggacaatccaaaggccgagggccttttctggcagaccctaagaaacgtggtgctgacagaaaatgattctagatacaacaatatgtatgttgattccattaagcaatactag

SEQ ID NO: 342967 - DNA, 3180 bp, Artificial Sequence
  derived and/or modified sequence
atgaaagagagcagcctgcaaaattcgagttgctcactcggcaaagaaacgaagaaggaaaatatgtttcttcagagtagcatgttaacatgcatctttctattaatctctggctcctgcgagctctgtgctgaagagaatttttcaagaagctatccttgcgacgagaaaaaacaaaacgactcggtcatcgctgaatgcagtaaccgcaggttgcaggaagtgcctcaaaccgtgggaaagtacgttacagaattggatttaagcgataattttatcacacacatcactaatgaatcattccagggtcttcagaatttaactaagatcaacctgaaccacaatccgaatgtgcagcaccagaacgggaatccaggaattcaatcaaacgggttaaacattacagacggcgctttccttaacctgaagaacttgcgtgagctgctgctcgaggataaccagctaccccagatccccagcggcctgcccgaatctttaacagaactgtcactgatccaaaacaacatatataacataacaaaggaaggaatctcccgccttatcaatttgaagaatctttacttagcctggaactgttattttaacaaagtctgtgaaaagaccaatatcgaggacggagtttttgagactctcacgaacctggagctcttatcactttctttcaatagtctgtctcacgtgccaccgaagcttccatcttcactacgcaaactcttcctgagtaacacacagatcaaatacatatctgaagaagattttaaaggactgattaatcttaccctgctggacttatcagggaactgtcctaggtgttttaacgccccttttccctgtgtgccatgcgacggtggagcgtcaattaacatcgaccgcttcgccttccagaacttaacccagttgcgctacctaaacctttcctctacctcactgagaaaaattaatgcagcttggtttaaaaacatgcctcatctcaaagtgttagaccttgagtttaactacctggtgggagaaattgcctctggcgcttttctcactatgctgcctcgcctggaaatcttggacttatcgttcaactatatcaagggtagttatccacaacacatcaatatcagtcgcaacttcagcaaactgctgtcccttagggctcttcacctacggggttacgtgttccaggaactgagggaagatgactttcagcctttaatgcagctacccaacttgagcactatcaacctggggataaatttcataaagcagattgacttcaagctgttccagaatttttccaatttggaaatcatttacttgagtgaaaaccgtatcagccccctggttaaagatacccggcagagttacgctaacagttctagcttccagaggcacattcgcaaaaggcgatctaccgattttgaattcgacccccactcaaatttctatcatttcacccggcctttgattaagccacagtgtgcagcctatgggaaggcgttagacttaagcctgaactctatcttctttatcggacccaatcagtttgaaaacctgccagacattgcatgccttaatttgtccgcaaacagtaatgcgcaggtgctctccggtacggaatttagtgctatccctcacgtaaagtacctggatctcacaaacaatcgcttggattttgataacgcttcagctctgactgagctctccgacctcgaggtactggacctgtcttataatagtcactattttcgaatcgccggtgtcacccaccacttagaattcatccaaaatttcacgaacctgaaggtgctcaatctctctcataataatatctacaccttgactgataagtacaatctggagagcaaatctcttgtcgaactggtgttctcaggaaataggctggatatcctatggaatgacgacgataaccggtacatctcaatattcaaaggcctgaaaaacctgactaggctggatctgagcctcaatcgtctgaaacacattcctaatgaagcattcctgaatctgcctgccagccttactgaactacatatcaatgacaatatgctaaaatttttcaactggactctgctgcagcaattccctcgcctcgagttgctggacttgaggggcaataagcttctattcttgaccgactctctgagtgactttaccagttccctccgtactttactgctttcccataacagaatctcccaccttccatctgggtttttatcggaggtatcatccctgaagcatcttgacctgagcagcaatttgttgaaaacaatcaacaaaagtgccctggaaacaaagactacaaccaagctgtcgatgctcgaactccacggcaatccattcgagtgcacctgcgacatcggtgacttccgcaggtggatggacgagcacctgaacgttaagatccctcgcttagtcgacgtgatatgcgccagtccgggtgaccagcgagggaagagcattgtttctctggagcttactacttgcgtaagtgacgtcacagctgtcatcctgttctttttcacgttcttcattacaacaatggttatgctcgcagccctggcccatcatctgttttactgggatgtctggttcatctataatgtgtgtctggcaaaagtcaagggttatcggagtttgtcaacatcccagacattttacgatgcatatattagttacgataccaaagacgcgtctgtcacggattgggtgatcaatgagctccgttatcacctggaagaatcccgagacaaaaatgtgctcctgtgcctcgaggaaagagattgggacccgggactggccataatcgacaacctgatgcagtccatcaatcagtcgaaaaaaaccgtatttgtgcttacaaagaaatatgcgaagtcctggaatttcaaaaccgcattttacttagccctccaacgtcttatggacgagaacatggacgtcataattttcatcctgctggagcccgtcctgcagcatagccagtatctccggctgaggcagcgaatatgcaagtcatccattttgcagtggcctgacaaccccaaggcagaaggactcttttggcaaacgcttcgtaacgtggtactaacagaaaacgactctcgatataataacatgtacgtggatagtattaaacagtactag

SEQ ID NO: 342968 - DNA, 4216 bp, Artificial Sequence
  derived and/or modified sequence
agtttctcttctcggccacctcctgcatagagggtaccattctgcgctgctgcaagttacggaatgaaaaattagaacaacagaaacatggaaaacatgttccttcagtcgtcaatgctgacctgcattttcctgctaatatctggttcctgtgagttatgcgccgaagaaaatttttctagaagctatccttgtgatgagaaaaagcaaaatgactcagttattgcagagtgcagcaatcgtcgactacaggaagttccccaaacggtgggcaaatatgtgacagaactagacctgtctgataatttcatcacacacataacgaatgaatcatttcaagggctgcaaaatctcactaaaataaatctaaaccacaaccccaatgtacagcaccagaacggaaatcccggtatacaatcaaatggcttgaatatcacagacggggcattcctcaacctaaaaaacctaagggagttactgcttgaagacaaccagttaccccaaataccctctggtttgccagagtctttgacagaacttagtctaattcaaaacaatatatacaacataactaaagagggcatttcaagacttataaacttgaaaaatctctatttggcctggaactgctattttaacaaagtttgcgagaaaactaacatagaagatggagtatttgaaacgctgacaaatttggagttgctatcactatctttcaattctctttcacacgtgccacccaaactgccaagctccctacgcaaactttttctgagcaacacccagatcaaatacattagtgaagaagatttcaagggattgataaatttaacattactagatttaagcgggaactgtccgaggtgcttcaatgccccatttccatgcgtgccttgtgatggtggtgcttcaattaatatagatcgttttgcttttcaaaacttgacccaacttcgatacctaaacctctctagcacttccctcaggaagattaatgctgcctggtttaaaaatatgcctcatctgaaggtgctggatcttgaattcaactatttagtgggagaaatagcctctggggcatttttaacgatgctgccccgcttagaaatacttgacttgtcttttaactatataaaggggagttatccacagcatattaatatttccagaaacttctctaaacttttgtctctacgggcattgcatttaagaggttatgtgttccaggaactcagagaagatgatttccagcccctgatgcagcttccaaacttatcgactatcaacttgggtattaattttattaagcaaatcgatttcaaacttttccaaaatttctccaatctggaaattatttacttgtcagaaaacagaatatcaccgttggtaaaagatacccggcagagttatgcaaatagttcctcttttcaacgtcatatccggaaacgacgctcaacagattttgagtttgacccacattcgaacttttatcatttcacccgtcctttaataaagccacaatgtgctgcttatggaaaagccttagatttaagcctcaacagtattttcttcattgggccaaaccaatttgaaaatcttcctgacattgcctgtttaaatctgtctgcaaatagcaatgctcaagtgttaagtggaactgaattttcagccattcctcatgtcaaatatttggatttgacaaacaatagactagactttgataatgctagtgctcttactgaattgtccgacttggaagttctagatctcagctataattcacactatttcagaatagcaggcgtaacacatcatctagaatttattcaaaatttcacaaatctaaaagttttaaacttgagccacaacaacatttatactttaacagataagtataacctggaaagcaagtccctggtagaattagttttcagtggcaatcgccttgacattttgtggaatgatgatgacaacaggtatatctccattttcaaaggtctcaagaatctgacacgtctggatttatcccttaataggctgaagcacatcccaaatgaagcattccttaatttgccagcgagtctcactgaactacatataaatgataatatgttaaagttttttaactggacattactccagcagtttcctcgtctcgagttgcttgacttacgtggaaacaaactactctttttaactgatagcctatctgactttacatcttcccttcggacactgctgctgagtcataacaggatttcccacctaccctctggctttctttctgaagtcagtagtctgaagcacctcgatttaagttccaatctgctaaaaacaatcaacaaatccgcacttgaaactaagaccaccaccaaattatctatgttggaactacacggaaacccctttgaatgcacctgtgacattggagatttccgaagatggatggatgaacatctgaatgtcaaaattcccagactggtagatgtcatttgtgccagtcctggggatcaaagagggaagagtattgtgagtctggagctaacaacttgtgtttcagatgtcactgcagtgatattatttttcttcacgttctttatcaccaccatggttatgttggctgccctggctcaccatttgttttactgggatgtttggtttatatataatgtgtgtttagctaaggtaaaaggctacaggtctctttccacatcccaaactttctatgatgcttacatttcttatgacaccaaagatgcctctgttactgactgggtgataaatgagctgcgctaccaccttgaagagagccgagacaaaaacgttctcctttgtctagaggagagggattgggatccgggattggccatcatcgacaacctcatgcagagcatcaaccaaagcaagaaaacagtatttgttttaaccaaaaaatatgcaaaaagctggaactttaaaacagctttttacttggctttgcagaggctaatggatgagaacatggatgtgattatatttatcctgctggagccagtgttacagcattctcagtatttgaggctacggcagcggatctgtaagagctccatcctccagtggcctgacaacccgaaggcagaaggcttgttttggcaaactctgagaaatgtggtcttgactgaaaatgattcacggtataacaatatgtatgtcgattccattaagcaatactaactgacgttaagtcatgatttcgcgccataataaagatgcaaaggaatgacatttctgtattagttatctattgctatgtaacaaattatcccaaaacttagtggtttaaaacaacacatttgctggcccacagtttttgagggtcaggagtccaggcccagcataactgggtcctctgctcagggtgtctcagaggctgcaatgtaggtgttcaccagagacataggcatcactggggtcacactcatgtggttgttttctggattcaattcctcctgggctattggccaaaggctatactcatgtaagccatgcgagcctctcccacaaggcagcttgcttcatcagagctagcaaaaaagagaggttgctagcaagatgaagtcacaatcttttgtaatcgaatcaaaaaagtgatatctcatcactttggccatattctatttgttagaagtaaaccacaggtcccaccagctccatgggagtgaccacctcagtccagggaaaacagctgaagaccaagatggtgagctctgattgcttcagttggtcatcaactattttcccttgactgctgtcctgggatggcctgctatcttgatgatagattgtgaatatcaggaggcagggatcactgtggaccatcttagcagttgacctaacacatcttcttttcaatatctaagaacttttgccactgtgactaatggtcctaatattaagctgttgtttatatttatcatatatctatggctacatggttatattatgctgtggttgcgttcggttttatttacagttgcttttacaaatatttgctgtaacatttgacttctaaggtttagatgccatttaagaactgagatggatagcttttaaagcatcttttacttcttaccattttttaaaagtatgcagctaaattcgaagcttttggtctatattgttaattgccattgctgtaaatcttaaaatgaatgaataaaaatgtttcattttacaa

SEQ ID NO: 342969 - DNA, 3367 bp, Artificial Sequence
  derived and/or modified sequence
ctcctgcatagagggtaccattctgcgctgctgcaagttacggaatgaaaaattagaacaacagaaacatggttctcttgacacttcagtgttagggaacatcagcaagacccatcccaggagaccttgaaggaagcctttgaaagggagaatgaaggagtcatctttgcaaaatagctcctgcagcctgggaaaggagactaaaaaggaaaacatgttccttcagtcgtcaatgctgacctgcattttcctgctaatatctggttcctgtgagttatgcgccgaagaaaatttttctagaagctatccttgtgatgagaaaaagcaaaatgactcagttattgcagagtgcagcaatcgtcgactacaggaagttccccaaacggtgggcaaatatgtgacagaactagacctgtctgataatttcatcacacacataacgaatgaatcatttcaagggctgcaaaatctcactaaaataaatctaaaccacaaccccaatgtacagcaccagaacggaaatcccggtatacaatcaaatggcttgaatatcacagacggggcattcctcaacctaaaaaacctaagggagttactgcttgaagacaaccagttaccccaaataccctctggtttgccagagtctttgacagaacttagtctaattcaaaacaatatatacaacataactaaagagggcatttcaagacttataaacttgaaaaatctctatttggcctggaactgctattttaacaaagtttgcgagaaaactaacatagaagatggagtatttgaaacgctgacaaatttggagttgctatcactatctttcaattctctttcacacgtgccacccaaactgccaagctccctacgcaaactttttctgagcaacacccagatcaaatacattagtgaagaagatttcaagggattgataaatttaacattactagatttaagcgggaactgtccgaggtgcttcaatgccccatttccatgcgtgccttgtgatggtggtgcttcaattaatatagatcgttttgcttttcaaaacttgacccaacttcgatacctaaacctctctagcacttccctcaggaagattaatgctgcctggtttaaaaatatgcctcatctgaaggtgctggatcttgaattcaactatttagtgggagaaatagcctctggggcatttttaacgatgctgccccgcttagaaatacttgacttgtcttttaactatataaaggggagttatccacagcatattaatatttccagaaacttctctaaacttttgtctctacgggcattgcatttaagaggttatgtgttccaggaactcagagaagatgatttccagcccctgatgcagcttccaaacttatcgactatcaacttgggtattaattttattaagcaaatcgatttcaaacttttccaaaatttctccaatctggaaattatttacttgtcagaaaacagaatatcaccgttggtaaaagatacccggcagagttatgcaaatagttcctcttttcaacgtcatatccggaaacgacgctcaacagattttgagtttgacccacattcgaacttttatcatttcacccgtcctttaataaagccacaatgtgctgcttatggaaaagccttagatttaagcctcaacagtattttcttcattgggccaaaccaatttgaaaatcttcctgacattgcctgtttaaatctgtctgcaaatagcaatgctcaagtgttaagtggaactgaattttcagccattcctcatgtcaaatatttggatttgacaaacaatagactagactttgataatgctagtgctcttactgaattgtccgacttggaagttctagatctcagctataattcacactatttcagaatagcaggcgtaacacatcatctagaatttattcaaaatttcacaaatctaaaagttttaaacttgagccacaacaacatttatactttaacagataagtataacctggaaagcaagtccctggtagaattagttttcagtggcaatcgccttgacattttgtggaatgatgatgacaacaggtatatctccattttcaaaggtctcaagaatctgacacgtctggatttatcccttaataggctgaagcacatcccaaatgaagcattccttaatttgccagcgagtctcactgaactacatataaatgataatatgttaaagttttttaactggacattactccagcagtttcctcgtctcgagttgcttgacttacgtggaaacaaactactctttttaactgatagcctatctgactttacatcttcccttcggacactgctgctgagtcataacaggatttcccacctaccctctggctttctttctgaagtcagtagtctgaagcacctcgatttaagttccaatctgctaaaaacaatcaacaaatccgcacttgaaactaagaccaccaccaaattatctatgttggaactacacggaaacccctttgaatgcacctgtgacattggagatttccgaagatggatggatgaacatctgaatgtcaaaattcccagactggtagatgtcatttgtgccagtcctggggatcaaagagggaagagtattgtgagtctggagctaacaacttgtgtttcagatgtcactgcagtgatattatttttcttcacgttctttatcaccaccatggttatgttggctgccctggctcaccatttgttttactgggatgtttggtttatatataatgtgtgtttagctaaggtaaaaggctacaggtctctttccacatcccaaactttctatgatgcttacatttcttatgacaccaaagatgcctctgttactgactgggtgataaatgagctgcgctaccaccttgaagagagccgagacaaaaacgttctcctttgtctagaggagagggattgggatccgggattggccatcatcgacaacctcatgcagagcatcaaccaaagcaagaaaacagtatttgttttaaccaaaaaatatgcaaaaagctggaactttaaaacagctttttacttggctttgcagaggctaatggatgagaacatggatgtgattatatttatcctgctggagccagtgttacagcattctcagtatttgaggctacggcagcggatctgtaagagctccatcctccagtggcctgacaacccgaaggcagaaggcttgttttggcaaactctgagaaatgtggtcttgactgaaaatgattcacggtataacaatatgtatgtcgattccattaagcaatactaactgacgttaagtcatgatttcgcgccataataaaga

SEQ ID NO: 342970 - protein, 121 aa, Artificial Sequence
  derived and/or modified sequence
MRKMLAAVSRVLSGASQKPFAGSPPPRHLTVGRKLSSRYEVTFESAQASRVLVASRNFANDATFEIKKCDLHRLEEGPPVTTVLTREDGLKYYRMMQTVRRMELKADQLYKQKIIRGFCHL

SEQ ID NO: 342971 - DNA, 366 bp, Artificial Sequence
  derived and/or modified sequence
atgagaaaaatgttggccgctgttagcagggtcctcagtggcgcttctcagaaaccgttcgccggcagcccgcctcctagacacctgaccgtggggagaaagctttcttccagatatgaagtaacctttgaatccgcccaggccagccgagtgctcgttgcttcccgcaattttgccaatgatgcaactttcgagatcaagaagtgcgacctccaccgtttagaggagggcccacctgtcaccaccgttctgacccgcgaggacggcctgaaatattaccgaatgatgcaaactgttaggagaatggagctgaaggccgatcagctctacaagcagaagatcattaggggcttctgccacctctag

SEQ ID NO: 342972 - DNA, 366 bp, Artificial Sequence
  derived and/or modified sequence
atgaggaagatgctagcagctgtttccagggtgctgagtggggccagccagaaaccgtttgctggtagccctccccctaggcacctcactgtggggcgcaagctgagttccaggtatgaagtcacctttgaatctgcacaggcctcacgagtgctcgtcgcaagcaggaattttgccaatgatgccaccttcgagattaagaagtgtgacctgcatcgcctcgaagaaggaccccccgtgacgacggttctaacacgggaagatggtcttaagtactaccgcatgatgcagactgttcggagaatggagctcaaagctgatcagctttacaaacagaaaattatccgaggtttttgccacctctag

SEQ ID NO: 342973 - DNA, 366 bp, Artificial Sequence
  derived and/or modified sequence
atgaggaagatgctggccgctgtgtcccgggtgctgagcggggccagccagaagccctttgctggcagccccccacccaggcacctgactgtgggcaggaagctgagcagccgctatgaggtgacctttgaaagtgcccaggccagccgggtgctggtggccagcaggaactttgccaatgatgccacctttgagatcaagaagtgtgacctgcaccggctggaggagggcccccctgtgaccaccgtgctgaccagagaagatggcctgaagtactacaggatgatgcagacagtgcggaggatggagctgaaggctgaccagctgtacaagcagaagatcatccggggcttctgccacctgtag

SEQ ID NO: 342974 - DNA, 366 bp, Artificial Sequence
  derived and/or modified sequence
atgcggaagatgctggccgccgtgagccgggtgctgagcggcgccagtcagaagccttttgcgggatcaccacccccacggcacttaaccgtgggccgcaagctgtccagtcggtacgaagtgaccttcgaatcggctcaggcctcccgagtgttggtggccagtcgcaattttgccaacgatgctacgtttgagataaagaagtgcgacctgcatcgcctcgaggaggggcctccggtgacgacagtgctaaccagagaggacgggcttaagtactaccgcatgatgcagacagtgcgacgcatggaactgaaggccgatcagctttataagcagaaaataattcgcggcttttgtcacctgtag

SEQ ID NO: 342975 - DNA, 366 bp, Artificial Sequence
  derived and/or modified sequence
atgcggaagatgctggccgccgtgagccgggtgctgagcggcgcctcacagaaaccgtttgctggaagtccccctcccagacatctcacagtcggaaggaagctttcctcccgttacgaagtgaccttcgagtcagcacaagcctctcgcgtgctagttgcctctcgcaatttcgcaaacgatgcgacgttcgaaatcaagaagtgcgacctgcaccggctggaggaaggaccgccagtgacaacagtactcactcgagaggatggattgaagtattatcgcatgatgcagaccgtacgccgtatggaactgaaggcagatcagttgtataaacagaaaatcattagggggttctgtcacctctag

SEQ ID NO: 342976 - DNA, 366 bp, Artificial Sequence
  derived and/or modified sequence
atgcgcaagatgctcgccgctgtctctagggttctgtccggcgcatctcagaagccttttgccggttcacctccaccccgtcatcttaccgtaggcaggaagctgagctccaggtacgaggtgacatttgagtctgctcaagcaagtcgagttcttgtggcctccagaaactttgccaatgatgctaccttcgaaatcaagaaatgcgatcttcacaggttggaggaagggcctccagtgaccacggtgttgactcgggaagacgggctgaaatattatcgtatgatgcagactgtccggagaatggagttgaaggcagatcaactgtataagcagaagattatccgcggattttgccatctgtag

SEQ ID NO: 342977 - DNA, 366 bp, Artificial Sequence
  derived and/or modified sequence
atgagaaagatgcttgccgcagtctccagagtcctcagcggagcttcacagaaaccatttgcgggatctcctcctccacgacacctgactgtgggtcggaagctttcgagtaggtatgaggtgacctttgagagtgctcaggcttcccgagtgttggtggcttcccgcaatttcgctaatgatgctacattcgaaatcaaaaaatgcgatttgcatcggctggaggaagggcctccagtgacaaccgtgctcacacgcgaggacggcttgaaatactataggatgatgcagactgtgcgacggatggagctgaaggcagatcagctttataaacaaaagatcatccgcggtttttgccacctctag

SEQ ID NO: 342978 - DNA, 471 bp, Artificial Sequence
  derived and/or modified sequence
gcgactgaggcgtggcgtctgctggggcacctgaaggagacttgggggcacccgcgtcgtgcctcctgggttgtgaggagtcgccgctgccgccactgcctgtgcttcatgaggaagatgctcgccgccgtctcccgcgtgctgtctggcgcttctcagaagccgtttgcagggtccccccccccccgccaccttacagtaggaagaaaattgagttccagatatgaagtcacctttgaaagtgcccaggcaagcagagtgctggtagcatcccgtaattttgcaaatgatgctacatttgaaattaagaaatgtgaccttcaccggctggaagaaggccctcctgtcacaacagtgctcaccagggaggatgggctcaaatactacaggatgatgcagactgtacgccgaatggagttgaaagcagatcagctgtataaacagaaaattattcgtggtttctgtcacttg

SEQ ID NO: 342979 - DNA, 366 bp, Artificial Sequence
  derived and/or modified sequence
atgagaaagatgctggccgccgtgagcagagtgctgagcggcgccagccagaagcccttcgccggcagccccccccccagacacctgaccgtgggcagaaagctgagcagcagatacgaggtgaccttcgagagcgcccaggccagcagagtgctggtggccagcagaaacttcgccaacgacgccaccttcgagatcaagaagtgcgacctgcacagactggaggagggcccccccgtgaccaccgtgctgaccagagaggacggcctgaagtactacagaatgatgcagaccgtgagaagaatggagctgaaggccgaccagctgtacaagcagaagatcatcagaggcttctgccacctgtag

SEQ ID NO: 342980 - DNA, 1359 bp, Artificial Sequence
  derived and/or modified sequence
atgattcacttgcctcgaccgcccaaggtcctgggactccagtttgactggctcgggtatataaaaaaggtgatcgatacaagactttacccacaccttaaagacatttcgccttcagagaatgtggtagtgagggtgccacagtatttcaaagatttgttcagaatacttggctcagaacgcaaaaaaacaatcgctaactacctcgtctggagaatggtctatagcagaatccctaatctatcccggcggttccagtaccgttggctagagttttccagggtgatccagggcactacaaccctgctgccccagtgggacaagtgtgtgaacttcatcgaaagcgcactaccatacgtggtgggcaagatgtttgtcgacgtctactttcaggaggataaaaaggagatgatggaggagttagttgagggggtcaggtgggcgtttattgacatgctggagaaagagaatgaatggatggatgcagggactaagagaaaggccaaggaaaaggcaagagcagtgctggccaaagttggctatcccgagttcataatgaacgacacacacgtcaacgaggacctaaaagcgatcaagttcagtgaagctgattatttcggtaatgtgctacagaccaggaaatatctggctcagagtgattttttttggctgcgcaaggcagtgcctaagacagaatggttcacgaatccaaccaccgtgaatgccttttattctgcctctaccaatcaaattaggtttccagccggagaactccaaaaaccttttttctgggggacggagtaccctagatctctgagctatggggctatcggcgtgatagtgggtcatgagttcacccacggattcgacaataacgggaggaaatacgacaagaacggcaacctagacccttggtggtcaacagagagcgaggagaagtttaaagaaaagaccaagtgcatgattaaccagtatagtaactactactggaagaaggcaggccttaacgtcaagggcaagagaaccttgggagagaacattgccgacaatgggggtctccgggaagccttcagggcctatagaaagtggataaacgacagaagacagggtctagaagagcctttgctgcccggcattactttcacaaacaatcaactgtttttcctgtcatatgctcacgtccggtgtaattcctacaggccagaggccgctcgggaacaagttcagattggcgcccattcacctccccagttccgcgtgaacggagccatctctaatttcgaggagttccagaaggcattcaactgtcctcctaacagcaccatgaaccgggggatggactcttgtcggctgtggtag

SEQ ID NO: 342981 - DNA, 1359 bp, Artificial Sequence
  derived and/or modified sequence
atgatccacctgcccaggcctcccaaggtgctgggcctgcagtttgactggctgggctacatcaagaaggtgattgacacccggctgtacccccacctgaaggacatcagccccagtgaaaatgtggtggtgcgggtgccccagtacttcaaggacctcttccgcatcctgggcagcgagaggaagaagaccatcgccaactacctggtgtggaggatggtgtacagccgcatccccaacctgagccgccgcttccagtaccgctggctggagttcagcagggtcatccagggcaccaccaccctgctgccccagtgggacaagtgtgtgaacttcattgaaagtgccctgccctacgtggtgggcaagatgtttgtggatgtgtacttccaggaggacaagaaggagatgatggaggagctggtggagggcgtgcgctgggccttcatcgacatgctggagaaggaaaatgagtggatggatgctggcaccaagaggaaggccaaggagaaggcccgggctgtgctggccaaggtgggctacccagagttcatcatgaatgacacccacgtgaatgaagacctgaaggccatcaagttcagcgaggccgactactttggaaatgtgctgcagaccaggaagtacctggcccagagcgacttcttctggctgaggaaggctgtgcccaagacagagtggttcaccaaccccaccaccgtgaatgccttctacagcgccagcaccaaccagatccgcttccctgctggggagctgcagaagcccttcttctggggcacagagtaccccaggagcctgtcctatggagccatcggggtcatcgtgggccacgagttcacccacggctttgacaacaacggcaggaaatatgacaagaatggaaacctggacccctggtggagcacagagagcgaggagaagttcaaggagaagaccaagtgcatgatcaaccagtacagcaactactactggaagaaggccggcctgaatgtgaagggcaagaggaccctgggagaaaatattgctgacaatggaggcctgcgggaggccttccgggcctacaggaagtggatcaatgaccggcggcagggcctggaggagcccctgctgcccggcatcaccttcaccaacaaccagctgttcttcctgtcctatgcccacgtgcgctgcaacagctacagacctgaggccgcccgggagcaggtgcagatcggggcccacagccccccccagttccgggtgaatggagccatcagcaactttgaggagttccagaaggccttcaactgcccccccaacagcaccatgaacagaggcatggacagctgccgcctgtggtag

SEQ ID NO: 342982 - DNA, 1359 bp, Artificial Sequence
  derived and/or modified sequence
atgatccacctgccccggccccccaaggtgctgggcctgcagttcgactggctgggttacatcaagaaggtaattgatacgcgcctttacccacatcttaaggacatctcaccatctgagaatgtggtcgtacgtgtcccacagtactttaaagacctttttaggattctgggctccgaacgtaaaaaaaccattgctaattatctggtgtggcgaatggtgtactctcgcatcccaaatctgtcgaggaggttccagtataggtggttggaatttagtagggttatccaggggacgaccacgctgttgcctcaatgggataagtgcgttaattttatagaatccgcattgccctacgtggtgggaaagatgttcgtggacgtctacttccaggaagacaagaaagagatgatggaagagctggtggagggggttcggtgggcttttattgacatgctcgagaaggagaatgagtggatggacgctggcaccaagagaaaagccaaggagaaagcaagagccgtgctagcaaaggtcggctacccagaattcataatgaatgacacccacgtgaacgaagatcttaaagccataaagttctctgaggccgactatttcgggaatgttttgcaaactaggaaatatctcgcccagagcgacttcttctggttacgtaaagccgtgcccaagacagagtggtttacaaatcctacgaccgtgaacgccttctattctgcaagtacgaaccagattcggttcccagccggagaattgcaaaagcccttcttctgggggaccgagtacccccgctcactctcttatggcgctatcggagtgatcgtcggacacgagttcacacacggctttgacaataatggcaggaaatatgataagaatggcaacctggatccttggtggtccacagagtctgaagaaaaattcaaggagaagactaaatgcatgattaaccaatactccaactattactggaagaaagccggtctgaatgtcaagggcaaacggacattgggagagaacatcgcggacaacggggggcttcgggaggcctttcgtgcctaccggaaatggattaacgataggcggcagggactcgaggagccactgctgccagggattactttcacgaataaccaactgttttttctaagctacgcccatgttcgctgtaattcctaccgacccgaggcggccagggaacaggtccagattggtgctcacagccctcctcagttccgtgtgaacggcgccatttctaatttcgaagagtttcagaaagcctttaactgtcctcccaatagcaccatgaatagaggcatggatagttgcagactttggtag

SEQ ID NO: 342983 - DNA, 1788 bp, Artificial Sequence
  derived and/or modified sequence
accatatggtgttttaggtaggatagggatgctctgaagaatggaggcatgttactttctgtgtttttatttgtttttttttgagacacagtcttgctgtgtcatccaggctggggtgcagtggtgtgatcttggctcattgcaacctctgcctcccgggttcaagtgattctcctgccttagcctctcgagtagctgggattacaggtgccggccaccacacctagctaatttttgtatttttgatagagatgggattggccaggctggtctcaaactcctgacctcaaatgatccacctgcctcggcctcccaaagtgctgggattacagttcgactggctgggctacatcaagaaggtcattgacaccagactctacccccatctgaaagacatcagcccctccgagaatgtggtggtccgcgtcccgcagtactttaaagatttgtttaggatattagggtctgagagaaagaagaccattgccaactatttggtgtggagaatggtttattccagaattccaaaccttagcaggcgctttcagtatagatggctggaattctcaagggtaatccaggggaccacaactttgctgcctcaatgggacaaatgtgtaaactttattgaaagtgccctcccttatgttgttggaaagatgtttgtagatgtgtacttccaggaagataagaaggaaatgatggaggaattggttgagggcgttcgctgggcctttattgacatgctagagaaagaaaatgagtggatggatgcaggaacgaaaaggaaagccaaagaaaaggcgagagctgttttggcaaaagttggctatccagagtttataatgaatgatactcatgttaatgaagacctcaaagctatcaagttttcagaagccgactactttggcaacgtcctacaaactcgcaagtatttagcacagtctgatttcttctggctaagaaaagccgttccaaaaacagagtggtttacaaatccgacgactgtcaatgccttctacagtgcatccaccaaccagatccgatttccagcaggagagctccagaagcctttcttttggggaacagaatatcctcgatctctgagttatggtgctataggagtaattgtcggacatgaatttacacatggatttgataataatggtagaaaatatgataaaaatggaaacctggatccttggtggtctactgaatcagaagaaaagtttaaggaaaaaacaaaatgcatgattaaccagtatagcaactattattggaagaaagctggcttaaatgtcaaggggaagaggaccctgggagaaaatattgctgataatggaggcctgcgggaagcttttagggcttacaggaaatggataaatgacagaaggcagggacttgaggagcctcttctaccaggcatcacattcaccaacaaccagctcttcttcctgagttatgctcatgtgaggtgcaattcctacagaccagaagctgcccgagaacaagtccaaattggtgctcacagtccccctcagtttagggtcaatggtgcaattagtaactttgaagaattccagaaagcttttaactgtccacccaattccacgatgaacagaggcatggactcctgccgactctggtagctgggacgctggtttatggcatcctgagacagttgcacagtgccagcggaggctgcactgagccttcatcgcccattgctttaggcctggagactttcatttttagtgcattttcattatttgggtaggtgacctgctt

SEQ ID NO: 342984 - DNA, 1359 bp, Artificial Sequence
  derived and/or modified sequence
atgattcacctcccccgtccccctaaggtcttaggactgcagtttgattggcttgggtacatcaagaaagtcattgatacgaggctctacccacacctcaaagatatatcacctagcgaaaatgtggtggtcagagtccctcagtactttaaagacctatttagaattctggggagcgagagaaagaagacaatcgccaactacctggtgtggagaatggtctattccaggatacccaacctgtctaggagatttcagtatcgctggttggagttcagccgcgtgatccagggcactaccactcttctgccacagtgggataagtgtgtgaatttcattgagtcagccttaccctacgtagtgggtaagatgtttgttgacgtttacttccaggaagacaagaaagagatgatggaggagctcgtggaaggagtcaggtgggccttcatagatatgttagagaaggagaatgagtggatggacgctgggactaagaggaaagccaaggagaaggcgagggcggtcctggccaaagtggggtatcccgagtttatcatgaatgatacccatgttaacgaggacctcaaagcgatcaaatttagcgaagcagactatttcgggaacgttctgcagactcggaaatatttggctcaaagcgacttcttttggctgcgaaaggctgtgcctaaaaccgagtggttcaccaacccaacgaccgtgaacgcgttttactctgctagcacaaatcaaatccgatttcccgctggcgaacttcaaaaaccattcttctggggaacagagtacccacgctcattaagttacggagccatcggggtgatcgtgggtcacgagttcactcatggatttgacaacaatggacgcaaatatgataaaaacggtaacctcgacccgtggtggtctacggaatctgaggagaagtttaaagagaaaaccaaatgcatgattaaccaatattcaaactattactggaagaaagccggactgaacgtgaaagggaaacggacactgggtgagaatatcgcagacaacggagggctgcgcgaggccttccgcgcttatcggaagtggataaatgatagacgccagggtctggaagagcctttgctgccaggcatcactttcaccaataatcagttgttctttctatcttatgcacacgtgaggtgcaactcctatcgtcctgaggccgctcgcgaacaggtgcagattggggcacattctcctccccaatttagggtgaacggtgcaattagcaattttgaggaattccagaaggcattcaactgcccgccaaatagcaccatgaacagaggtatggacagttgcaggttatggtag

SEQ ID NO: 342985 - DNA, 1359 bp, Artificial Sequence
  derived and/or modified sequence
atgatccacctgcccagaccccccaaggtgctgggcctgcagttcgactggctgggctacatcaagaaggtgatcgacaccagactgtacccccacctgaaggacatcagccccagcgagaacgtggtggtgagagtgccccagtacttcaaggacctgttcagaatcctgggcagcgagagaaagaagaccatcgccaactacctggtgtggagaatggtgtacagcagaatccccaacctgagcagaagattccagtacagatggctggagttcagcagagtgatccagggcaccaccaccctgctgccccagtgggacaagtgcgtgaacttcatcgagagcgccctgccctacgtggtgggcaagatgttcgtggacgtgtacttccaggaggacaagaaggagatgatggaggagctggtggagggcgtgagatgggccttcatcgacatgctggagaaggagaacgagtggatggacgccggcaccaagagaaaggccaaggagaaggccagagccgtgctggccaaggtgggctaccccgagttcatcatgaacgacacccacgtgaacgaggacctgaaggccatcaagttcagcgaggccgactacttcggcaacgtgctgcagaccagaaagtacctggcccagagcgacttcttctggctgagaaaggccgtgcccaagaccgagtggttcaccaaccccaccaccgtgaacgccttctacagcgccagcaccaaccagatcagattccccgccggcgagctgcagaagcccttcttctggggcaccgagtaccccagaagcctgagctacggcgccatcggcgtgatcgtgggccacgagttcacccacggcttcgacaacaacggcagaaagtacgacaagaacggcaacctggacccctggtggagcaccgagagcgaggagaagttcaaggagaagaccaagtgcatgatcaaccagtacagcaactactactggaagaaggccggcctgaacgtgaagggcaagagaaccctgggcgagaacatcgccgacaacggcggcctgagagaggccttcagagcctacagaaagtggatcaacgacagaagacagggcctggaggagcccctgctgcccggcatcaccttcaccaacaaccagctgttcttcctgagctacgcccacgtgagatgcaacagctacagacccgaggccgccagagagcaggtgcagatcggcgcccacagccccccccagttcagagtgaacggcgccatcagcaacttcgaggagttccagaaggccttcaactgcccccccaacagcaccatgaacagaggcatggacagctgcagactgtggtag

SEQ ID NO: 342986 - DNA, 1532 bp, Artificial Sequence
  derived and/or modified sequence
tttccttctcagtcacaggaccggatggcaagtggccgcagccagtcggtgagaccgactgagctctggggcttcagttcttgacgctacctacatggctacatctccagccaaggatgagagtttgtgaatagcacaatggaagaagctggactttgtgggttaagagagaaagcagatatgttgtgtaactctgaatcacatgatattcttcaacatcaagactcaaattgcagtgccacaagtaataaacatttattggaagatgaagaaggccgtgactttataacaaagaacaggagttgggtgagcccagtgcactgcacacaagagtcaagaagggagcttcctgagcaagaagtagcccctccgtctggtcagcaagctttacaatgcaacaggaacaaagaaaaagtcttaggtaataatctctgctctgtggttggatgttgtcacatactggtctttttgttttacattttctgcagcatgagtgattatgaacttggcctgtttggaggtaaatgttgcctggtaaacttgtttcttcacttggtttagtccacctatcatctccagttatgtgtagggaacaaaaatagcaaaatacgaagcccagttataagaaacttaattatttctctgtgtaacaagaactgaagttttaagaaagtttgaggccaatatgatgtaattagtatttgatttaccttgctttttgtacctttgaaaataacctaatagtatgaaaacaatatgtatgctaattttgcttaaaagattatacactgaaatttagagaggatataatgttatctgtagtgtagaaagagttaaataagactgatttttagaatttgttttatcccttccactcttagcttgacaattaggattaagaatatgatatgtcaaatttcatgactgaaatctgaaatgccttaatagttgccctcagtgtttcatccttatactaacatttacattgatatatatgacttatatgtgacactgaaacttggaatttttattcttaatccattttctgttaccctggaagacaaaaaaaaaagtatggtaatatataaagtaattgtaattccttgaaaataagacagatatcttcaaaattgatagccccaattatatgtgtaaaatatagcttgaggttaaaattatttaaaaagttttaaatgaaaatctttatgaaaatgtcagttatattatagttgtttcttacacatacacattcaataacaatatttatttattcttttttctagagagacaaggtctttccctgtcacccaggctggagcgcggtggtacattcatgggtcatggcagccttaaactccctgagctcgtgatcctgtctcttcagactctagagtagctggggctacaggcgtacaccaccacacatggctaattttttatttttcttttgttgtagagatgggctgtcattctcttgcccaggctggtcttggtatactgtcctgtagcagtatattttggctacctgtact

SEQ ID NO: 342987 - protein, 836 aa, Artificial Sequence
  derived and/or modified sequence
MSRPQGLLWLPLLFTPVCVMLNSNVLLWLTALAIKFTLIDSQAQYPVVNTNYGKIRGLRTPLPNEILGPVEQYLGVPYASPPTGERRFQPPEPPSSWTGIRNTTQFAAVCPQHLDERSLLHDMLPIWFTANLDTLMTYVQDQNEDCLYLNIYVPTEDGANTKKNADDITSNDRGEDEDIHDQNSKKPVMVYIHGGSYMEGTGNMIDGSILASYGNVIVITINYRLGILGFLSTGDQAAKGNYGLLDQIQALRWIEENVGAFGGDPKRVTIFGSGAGASCVSLLTLSHYSEGLFQKAIIQSGTALSSWAVNYQPAKYTRILADKVGCNMLDTTDMVECLRNKNYKELIQQTITPATYHIAFGPVIDGDVIPDDPQILMEQGEFLNYDIMLGVNQGEGLKFVDGIVDNEDGVTPNDFDFSVSNFVDNLYGYPEGKDTLRETIKFMYTDWADKENPETRRKTLVALFTDHQWVAPAVATADLHAQYGSPTYFYAFYHHCQSEMKPSWADSAHGDEVPYVFGIPMIGPTELFSCNFSKNDVMLSAVVMTYWTNFAKTGDPNQPVPQDTKFIHTKPNRFEEVAWSKYNPKDQLYLHIGLKPRVRDHYRATKVAFWLELVPHLHNLNEIFQYVSTTTKVPPPDMTSFPYGTRRSPAKIWPTTKRPAITPANNPKHSKDPHKTGPEDTTVLIETKRDYSTELSVTIAVGASLLFLNILAFAALYYKKDKRRHETHRRPSPQRNTTNDIAHIQNEEIMSLQMKQLEHDHECESLQAHDTLRLTCPPDYTLTLRRSPDDIPLMTPNTITMIPNTLTGMQPLHTFNTFSGGQNSTNLPHGHSTTRV

SEQ ID NO: 342988 - DNA, 2511 bp, Artificial Sequence
  derived and/or modified sequence
atgagcagaccccagggcctgctgtggctgcccctgctgttcacccccgtgtgcgtgatgctgaacagcaacgtgctgctgtggctgaccgccctggccatcaagttcaccctgatcgacagccaggcccagtaccccgtggtgaacaccaactacggcaagatcagaggcctgagaacccccctgcccaacgagatcctgggccccgtggagcagtacctgggcgtgccctacgccagcccccccaccggcgagagaagattccagccccccgagccccccagcagctggaccggcatcagaaacaccacccagttcgccgccgtgtgcccccagcacctggacgagagaagcctgctgcacgacatgctgcccatctggttcaccgccaacctggacaccctgatgacctacgtgcaggaccagaacgaggactgcctgtacctgaacatctacgtgcccaccgaggacggcgccaacaccaagaagaacgccgacgacatcaccagcaacgacagaggcgaggacgaggacatccacgaccagaacagcaagaagcccgtgatggtgtacatccacggcggcagctacatggagggcaccggcaacatgatcgacggcagcatcctggccagctacggcaacgtgatcgtgatcaccatcaactacagactgggcatcctgggcttcctgagcaccggcgaccaggccgccaagggcaactacggcctgctggaccagatccaggccctgagatggatcgaggagaacgtgggcgccttcggcggcgaccccaagagagtgaccatcttcggcagcggcgccggcgccagctgcgtgagcctgctgaccctgagccactacagcgagggcctgttccagaaggccatcatccagagcggcaccgccctgagcagctgggccgtgaactaccagcccgccaagtacaccagaatcctggccgacaaggtgggctgcaacatgctggacaccaccgacatggtggagtgcctgagaaacaagaactacaaggagctgatccagcagaccatcacccccgccacctaccacatcgccttcggccccgtgatcgacggcgacgtgatccccgacgacccccagatcctgatggagcagggcgagttcctgaactacgacatcatgctgggcgtgaaccagggcgagggcctgaagttcgtggacggcatcgtggacaacgaggacggcgtgacccccaacgacttcgacttcagcgtgagcaacttcgtggacaacctgtacggctaccccgagggcaaggacaccctgagagagaccatcaagttcatgtacaccgactgggccgacaaggagaaccccgagaccagaagaaagaccctggtggccctgttcaccgaccaccagtgggtggcccccgccgtggccaccgccgacctgcacgcccagtacggcagccccacctacttctacgccttctaccaccactgccagagcgagatgaagcccagctgggccgacagcgcccacggcgacgaggtgccctacgtgttcggcatccccatgatcggccccaccgagctgttcagctgcaacttcagcaagaacgacgtgatgctgagcgccgtggtgatgacctactggaccaacttcgccaagaccggcgaccccaaccagcccgtgccccaggacaccaagttcatccacaccaagcccaacagattcgaggaggtggcctggagcaagtacaaccccaaggaccagctgtacctgcacatcggcctgaagcccagagtgagagaccactacagagccaccaaggtggccttctggctggagctggtgccccacctgcacaacctgaacgagatcttccagtacgtgagcaccaccaccaaggtgcccccccccgacatgaccagcttcccctacggcaccagaagaagccccgccaagatctggcccaccaccaagagacccgccatcacccccgccaacaaccccaagcacagcaaggacccccacaagaccggccccgaggacaccaccgtgctgatcgagaccaagagagactacagcaccgagctgagcgtgaccatcgccgtgggcgccagcctgctgttcctgaacatcctggccttcgccgccctgtactacaagaaggacaagagaagacacgagacccacagaagacccagcccccagagaaacaccaccaacgacatcgcccacatccagaacgaggagatcatgagcctgcagatgaagcagctggagcacgaccacgagtgcgagagcctgcaggcccacgacaccctgagactgacctgcccccccgactacaccctgaccctgagaagaagccccgacgacatccccctgatgacccccaacaccatcaccatgatccccaacaccctgaccggcatgcagcccctgcacaccttcaacaccttcagcggcggccagaacagcaccaacctgccccacggccacagcaccaccagagtgtag

SEQ ID NO: 342989 - DNA, 2511 bp, Artificial Sequence
  derived and/or modified sequence
atgtcaagaccacagggcctcctgtggctgcccctgcttttcactccagtgtgcgtcatgctgaattccaacgtgctcctctggctaactgccctggcgattaagtttaccctgatcgactcccaggcgcagtatccagtcgttaacacaaactatggaaagattaggggactgagaactcctttgccgaacgagatcctcggccccgtggagcaatacctcggcgtgccttatgcatctccccctaccggggaaaggagattccagcctcctgagcctcccagttcttggactgggatcaggaacaccacgcagtttgccgccgtttgccctcagcatcttgatgagcggagcctgctacacgatatgttacctatctggttcaccgccaaccttgataccctaatgacctacgtgcaggaccagaatgaggactgcctgtatcttaatatttatgtgccgaccgaggacggtgctaacaccaagaagaatgctgacgacattacatcaaatgacaggggggaggacgaagatatacacgaccagaactctaagaagcccgttatggtgtacatccacggcggttcttatatggagggaaccggcaatatgatcgatggcagcatcctagcaagctacggaaatgtcattgtaattacaattaattatagattgggaatcttgggcttcctctccactggggatcaggctgctaaggggaattacgggctcttagaccagatccaggccctgaggtggatagaagagaacgtgggcgcattcggaggagatcctaagcgcgtcacaatctttggttccggcgccggcgcaagctgtgtgagtttactcaccctcagtcactattcagagggtctgtttcagaaagctatcatccaatcagggaccgctctgtcgtcatgggcggtgaattaccagccagctaagtacaccaggatactggctgataaggtgggttgcaacatgctggacacaactgacatggtggaatgtctgcgtaacaagaattacaaggaacttatccagcaaacaattacgcctgccacgtatcacatcgcgttcggacccgtgatcgacggagatgttatccctgacgacccacagatcttgatggagcaaggtgaatttctgaactatgacattatgctaggcgttaatcaaggagaggggctaaaattcgtggacgggatcgtggacaatgaggacggagtaactcccaacgattttgatttctctgtctctaattttgtggacaatttgtacggctatcctgaggggaaagacacattgagagagaccatcaaatttatgtataccgattgggcagataaggagaatcccgagacaagacggaaaactctggtcgctctattcactgatcaccaatgggttgctcccgccgtagccacagcggacctgcatgctcaatatggttcccctacctatttttacgccttctaccaccactgccagagtgagatgaaacctagctgggccgactccgctcacggagatgaagtaccctacgtcttcggcatcccgatgattggacccactgagttattctcctgcaacttctccaagaacgacgtaatgctctcagccgtggttatgacctattggacaaacttcgctaaaacaggcgatcctaatcagcccgttccccaagacactaaattcattcatacaaagcctaataggtttgaagaagtggcctggagcaaatacaacccaaaggatcagctgtatctgcatatcgggctaaagcctcgggtgcgcgaccactaccgtgccacaaaagtggcgttctggcttgagctggtcccccatctgcataatctgaatgagatctttcagtatgtgtcaactactaccaaggtgccccctccagacatgactagctttccttacggcacacggcgctcgcccgcaaagatctggcccaccacaaaacgtcccgcaatcacaccagccaataaccctaagcactccaaggacccacacaaaacgggcccagaagatacaaccgtgcttatcgagaccaagagggattattctactgagctaagtgttacaatagcagtgggcgcttccctgcttttcctgaacatcctggctttcgccgccttgtattacaagaaggataagcgtcgacatgagacacaccgtcgcccctcaccacagcgcaatacaactaatgacatagcacatattcaaaacgaggagattatgtcgcttcagatgaaacagctcgagcatgatcatgagtgtgagagtctccaggcccatgatacccttcgcttgacttgtccccccgactacactctcacactcaggaggagtcccgatgatatccccctcatgacaccaaatacgataaccatgattcccaacactcttactggaatgcagccactgcacaccttcaatacatttagcggggggcagaacagcaccaatttaccccacggtcactcaacaacacgggtgtag

SEQ ID NO: 342990 - DNA, 2511 bp, Artificial Sequence
  derived and/or modified sequence
atgagccggccccagggcctgctgtggctgcccctgctcttcacccctgtgtgtgtgatgctgaacagcaatgtgctgctgtggctgacagccctggccatcaagttcaccctgattgacagccaggcccagtaccctgtggtgaacaccaactacggcaagatccggggcctgcggacccccctgcccaatgagatcctgggccctgtggagcagtacctgggcgtgccctatgccagccccccaactggagagcggcgcttccagcccccagagccccccagctcctggacaggcatccggaacaccacccagtttgctgctgtgtgcccccagcacctggatgagaggagcctgctgcatgacatgctgcccatctggttcaccgccaacctggacaccctgatgacctacgtgcaggaccagaatgaagactgcctgtacctgaacatctacgtgcccacagaagatggagccaacaccaagaagaatgctgatgacatcaccagcaatgacagaggagaagatgaggacatccatgaccagaacagcaagaagcctgtgatggtgtacatccatggaggcagctacatggagggcactggaaacatgattgatggcagcatcctggccagctatggaaatgtgattgtcatcaccatcaactaccgcctgggcatcctgggcttcctgagcactggagaccaggccgccaagggcaactacggcctgctggaccagatccaggccctgcgctggattgaggagaatgtgggcgcctttggaggagaccccaagagggtgaccatctttggaagtggagctggggccagctgtgtgtccctgctgaccctgagccactacagcgagggcctcttccagaaggccatcatccagagcggcacagccctgagctcctgggccgtgaactaccagcctgccaagtacacccgcatcctggccgacaaggtgggctgcaacatgctggacaccacagacatggtggagtgcctgaggaacaagaactacaaggagctgatccagcagaccatcaccccagccacctaccacatcgccttcggccctgtgattgatggagatgtgatcccagatgacccccagatcctgatggagcagggcgagttcctgaactatgacatcatgctgggcgtgaaccagggcgagggcctgaagtttgtggatggcatcgtggacaatgaagatggagtgaccccaaatgactttgacttctctgtgagcaactttgtggacaacctgtatggctacccagagggcaaggacaccctgcgggagaccatcaagttcatgtacacagactgggccgacaaggaaaatcctgagaccaggaggaagaccctggtggccctcttcacagaccaccagtgggtggccccagctgtggccacagctgacctgcacgcccagtatggcagccccacctacttctacgccttctaccaccactgccagagcgagatgaagcccagctgggccgacagcgcccatggagatgaggtgccctacgtgtttggcatccccatgattggccccacagagctgttcagctgcaacttcagcaagaatgatgtgatgctgtctgctgtggtgatgacctactggaccaactttgccaagacaggagaccccaaccagcctgtgccccaggacaccaagttcatccacaccaagcccaacagatttgaggaggtggcctggagcaagtacaaccccaaggaccagctgtacctgcacatcggcctgaagccccgggtgcgggaccactaccgggccaccaaggtggccttctggctggagctggtgccccacctgcacaacctgaatgagatcttccagtatgtgtccaccaccaccaaggtgcccccaccagacatgaccagcttcccctacggcacccggcgcagccctgccaagatctggcccaccaccaagaggcctgccatcaccccagccaacaaccccaagcacagcaaggacccccacaagacaggccctgaggacaccaccgtgctgattgagaccaagagggactacagcacagagctgtctgtgaccatcgctgtgggcgccagcctgctcttcctgaacatcctggcctttgctgccctgtactacaagaaggacaagagaagacatgagacccacagaagacccagcccccagaggaacaccaccaatgacatcgcccacatccagaatgaggagatcatgagcctgcagatgaagcagctggagcatgaccatgaatgtgagagcctgcaggcccatgacaccctgcggctgacctgccccccagactacaccctgaccctgcggcgcagcccagatgacatccccctgatgacccccaacaccatcaccatgatccccaacaccctgaccggcatgcagcccctgcacaccttcaacaccttcagcggcggccagaacagcaccaacctgccccacggccacagcaccaccagggtgtag

SEQ ID NO: 342991 - DNA, 5748 bp, Artificial Sequence
  derived and/or modified sequence
atttaagcgattttttttccctccttcatctccgggcctcggataagatgacggcttgggtgatgcacgaaataacgcacgtgattgattagacctggcttggcttggctagggaacgatccaggcgcgctggagaccccgcgtgaagatgaaatgacggctgccttggagttttcataagaaattgtccctggaggtgttggatgatcacagcttccttggagcattgcagttgctggaatccagtttcaggattaagggagggctgcctccttgcaatgggctgccaagaaaacggctgtgcttgttcttaacctcaggctctgtctgtgatcagtctgagagtctctcccaggtctactgctccctggaaagccctatctctctgcaggctcgcctctgggctttgtctccttggagccacatcactgggacagctgtggatgtggatgcagatttgaaccatgtcacggccccagggactgctatggcttcctttgttgttcaccccggtctgcgtcatgttaaactccaatgtcctcctgtggttaactgctcttgccatcaagttcaccctcattgacagccaagcacagtatccagttgtcaacacaaattatggcaaaatccggggcctaagaacaccgttacccaatgagatcttgggtccagtggagcagtacttaggggtcccctatgcctcaccccccactggagagaggcggtttcagcccccagaacccccgtcctcctggactggcatccgaaatactactcagtttgctgctgtgtgcccccagcacctggatgagagatccttactgcatgacatgctgcccatctggtttaccgccaatttggatactttgatgacctatgttcaagatcaaaatgaagactgcctttacttaaacatctacgtgcccacggaagatggagccaacacaaagaaaaacgcagatgatataacgagtaatgaccgtggtgaagacgaagatattcatgatcagaacagtaagaagcccgtcatggtctatatccatgggggatcttacatggagggcaccggcaacatgattgacggcagcattttggcaagctacggaaacgtcatcgtgatcaccattaactaccgtctgggaatactagggtttttaagtaccggtgaccaggcagcaaaaggcaactatgggctcctggatcagattcaagcactgcggtggattgaggagaatgtgggagcctttggcggggaccccaagagagtgaccatctttggctcgggggctggggcctcctgtgtcagcctgttgaccctgtcccactactcagaaggtctcttccagaaggccatcattcagagcggcaccgccctgtccagctgggcagtgaactaccagccggccaagtacactcggatattggcagacaaggtcggctgcaacatgctggacaccacggacatggtagaatgcctgcggaacaagaactacaaggagctcatccagcagaccatcaccccggccacctaccacatagccttcgggccggtgatcgacggcgacgtcatcccagacgacccccagatcctgatggagcaaggcgagttcctcaactacgacatcatgctgggcgtcaaccaaggggaaggcctgaagttcgtggacggcatcgtggataacgaggacggtgtgacgcccaacgactttgacttctccgtgtccaacttcgtggacaacctttacggctaccctgaagggaaagacactttgcgggagactatcaagttcatgtacacagactgggccgataaggaaaacccggagacgcggcggaaaaccctggtggctctctttactgaccaccagtgggtggcccccgccgtggccaccgccgacctgcacgcgcagtacggctcccccacctacttctatgccttctatcatcactgccaaagcgaaatgaagcccagctgggcagattcggcccatggtgatgaggtcccctatgtcttcggcatccccatgatcggtcccaccgagctcttcagttgtaacttttccaagaacgacgtcatgctcagcgccgtggtcatgacctactggacgaacttcgccaaaactggtgatccaaatcaaccagttcctcaggataccaagttcattcacacaaaacccaaccgctttgaagaagtggcctggtccaagtataatcccaaagaccagctctatctgcatattggcttgaaacccagagtgagagatcactaccgggcaacgaaagtggctttctggttggaactcgttcctcatttgcacaacttgaacgagatattccagtatgtttcaacaaccacaaaggttcctccaccagacatgacatcatttccctatggcacccggcgatctcccgccaagatatggccaaccaccaaacgcccagcaatcactcctgccaacaatcccaaacactctaaggaccctcacaaaacagggcctgaggacacaactgtcctcattgaaaccaaacgagattattccaccgaattaagtgtcaccattgccgtcggggcgtcgctcctcttcctcaacatcttagcttttgcggcgctgtactacaaaaaggacaagaggcgccatgagactcacaggcgccccagtccccagagaaacaccacaaatgatatcgctcacatccagaacgaagagatcatgtctctgcagatgaagcagctggaacacgatcacgagtgtgagtcgctgcaggcacacgacacactgaggctcacctgcccgccagactacaccctcacgctgcgccggtcgccagatgacatcccacttatgacgccaaacaccatcaccatgattccaaacacactgacggggatgcagcctttgcacacttttaacaccttcagtggaggacaaaacagtacaaatttaccccacggacattccaccactagagtatagctttgccctatttcccttcctatccctctgccctacccgctcagcaacatagaagagggaaggaaagagagaaggaaagagagagagaaagaaagtctccagaccaggaatgtttttgtcccactgacttaagacaaaaatgcaaaaaggcagtcatcccatcccggcagacccttatcgttggtgttttccagtattacaagatcaacttctgaccctgtgaaatgtgagaagtacacatttctgttaaaataactgctttaagatctctaccactccaatcgatgtttagtgtgataggacatcaccatttcaaggccccgggtgtttccaacgtcatggaagcagctgacacttctgaaactcagccaaggacacttgatattttttaattacaatggaagtttaaacatttctttctgtgccacacaatggatggctctccttaagtgaagaaagagtcaatgagattttgcccagcacatggagctgtaatccagagagaaggaaacgtagaaatttattattaaaagaatggactgtgcagcgaaatctgtacggttctgtgcaaagaggtgttttgccagcctgaactatatttaagagactttgtaaaaaagaaaaatgtatatagctgtgagtttaaacaaaaaccacaaacagacaaacaagaaaaaaagcttttattggtgttttcactttgaaagagcttttagcaaggttgtgcttttcattgtgctctgtacgtatataaatatatatatatatacacacacacacacacattagtcatatcacctctgtttcctccccaacaaaagaggcttttcttcttaattacttgtggtaaacaaagacatgggattttcttacatgagattctcatttgtaggaggatgtgatgtcccacagaagacccagacggtctgtgtggcctatttcccccgtcaggttgcacaggtgcatgcaagagcattcttaggagaccactgttttgaaaaacttttgacttgtacgtgttagccttcatgaaattgcagtacagagatgggtccccaaagtggagtgtatttacagcttgttaaattagagacatgcacacacaaagaatcagtagggagaaacaaaaatacaagtcccgttctgtagctctggccctttgaatatgtttaggaagagttgcttcccatttcagggccctgccaaaaaaagaagaaagcttgcctttggtggggctatgccccttggagtaaatacggctctgtgttccctagcagctgcgggagggtttggccgatgaagtacctgctcagcttagctaatcagattgaaggaagacatgtgtctttcctttttgtttaagcactcggtcccttatttatcagtaagcaggtttttaaaaatcttttatatcatttatgggatcaaacatatgattgtctgaaaacatcactttttgtggatttgtgtatccggtcaccaaacggtgaatattatagaagaatgggggaagaaaggatagaatattaaaactgctttgcatgggttttctgggaaattaggataacttcactgagaagacattgaatggaaattattcacccattttaaattggtgacctagggatcagagatttgtctttccaacagcttgtcattttttcatttctcttctcatttttcaggaaagttttgagtgttataaggtggaaggaaacatagtagcaatggatacttttttgaaaaattattgcattaccaagaaacagtagccaaagatatttgaagatcatgttcctcggctccattgtgggttattctagaaatccagtcttaaatctctccgctaaagtggacattccccataaaaattgtccagctgcctggctcttttgcaataacaacctttgattactgaatccctacactcaaactatagtgatatatcagtgtttgagagtgacctctagaaaaaagaaaagtgtttttagaaatgcgtacaagtcacccccaaatcctattgcttatcttgggttaaatttgagagtgattctctgtatataaatatgtgaaatattattatctcaacttagcacacgtgaagcaacatttctttcctacagagaggtgtcatggtaagatttcattccgaattcattgtttcatagagctatgatcaggccatttctgcaagcaatgtatgaccccacctgagcaaccacaaataggctctctgtgaaactacaaaggaagttatgtgtggcatccatgttggtttcgtctgtctgtaatgtgaattccagtatttgtttagtatttccagttgtctcctgctagcaatatgtacagtaacgcgtcaggcttgtgacatttgaataaggaaaaacagagttcctgttaagtgaataactttagcttttacaggggattatgatcaaaagtgattttagtacatcttaaatgatatcttatttctacatggaaagaagttatagaatcttcatagagttctatgagaaaaaatatacttgctatctataaaaaagagaaaaaagaaaaaaaatgagaaaaaagtaagaaaaaaaaaaatcctgtcctaggcttttactcttgatcttcaaaggcacgcagggtttaatggttccttgggttattattttgcagttttgttttttattttgccttaagtaatgatagaagatatatatggccggacacatatgtataaacttttcagcagcatttttaataataaaatatcacagtattttct

SEQ ID NO: 342992 - DNA, 2511 bp, Artificial Sequence
  derived and/or modified sequence
atgagccggccccagggcctgctgtggctgcccctgctgttcaccccggtctgtgtgatgctgaacagcaatgtactcctgtggctgaccgcattagcaattaagttcaccttgatcgacagccaggcccagtacccagttgtgaatactaattacggcaaaattcgaggactcagaaccccactgcccaatgaaatcctgggacccgtagaacaatatttaggagtcccgtatgccagccctcctacgggtgagcgcagatttcaaccccctgaaccgccctcctcttggacggggattcggaatactacgcagttcgccgccgtgtgcccgcagcatctggatgaacgctcacttttgcacgatatgttgcccatctggttcacggctaatttggacaccctcatgacttatgtgcaggaccaaaatgaagactgtctgtatttgaatatctacgtaccgaccgaagatggcgccaacaccaagaagaatgccgacgatattacctctaatgacagaggtgaagacgaagatatccatgatcagaactccaagaagcctgtgatggtgtacatccatggaggcagttatatggaggggacaggaaatatgatcgatggatccatcttggcttcctacggcaacgtcattgtgattacaatcaattacagactggggatcctggggtttctgtccacgggtgatcaggccgcaaaaggtaactacggtctcctggatcaaatccaggctttgcggtggattgaagagaatgtgggcgcctttggtggcgaccccaagcgcgtcaccatctttggcagcggggcaggcgcatcttgtgtctccctgctaaccttgtcacactattctgaaggactcttccaaaaagctatcatccaatcgggcacggctcttagctcctgggctgtaaattaccaacctgccaagtacacgcggatcctggctgataaggtgggatgcaatatgctggatacaactgacatggtagagtgcctgagaaataaaaactacaaagagctaattcagcagaccataacccctgctacatatcatattgctttcggacctgtaatagatggcgacgtgattccagatgatccccagatccttatggagcagggcgagtttctgaactacgacatcatgctcggagttaatcagggagaaggcctgaagtttgtggacggtattgtcgacaatgaagacggcgtcacgcccaacgatttcgatttcagcgtgagcaatttcgtggacaatttatatggctacccagaggggaaagacaccttacgagaaactatcaagtttatgtataccgattgggccgacaaggaaaacccggagactcggcgcaagacccttgttgccctgttcacggatcatcagtgggtcgcccctgcggtggctacggccgacctgcatgcccagtatgggtcgcccacatacttctacgcattctatcatcattgccagtcagagatgaagccctcttgggccgatagtgcccatggcgatgaggtcccgtatgtgtttggaatccctatgattggccctacagaattattcagttgcaattttagcaaaaacgacgttatgcttagcgcagtagtcatgacttattggaccaactttgctaagactggagaccctaatcagccagtacctcaggatactaagttcattcacaccaagcccaatcggttcgaagaggtggcatggtccaaatataatccaaaggatcagctgtatctccatatagggcttaagccccgcgtgagagatcattaccgggctaccaaggttgcattttggctggaactcgttccccatcttcacaacctcaacgaaatcttccagtacgtctcaactactactaaggttcctccaccggatatgacatcattcccctacggcacacgcagaagcccggcaaagatctggcccactacaaaacgcccagcaataactccggccaataatcctaagcattctaaggacccccacaaaacaggaccggaggacactacagttctgatcgaaacgaaaagggattattccacagaactgtctgtgacaatcgctgtcggagcctcgctgctgtttctgaatatcctcgcgtttgccgccctatactacaagaaggacaaaaggcgacacgagacccatagacgcccatcaccacagcgcaataccacgaatgacatcgcgcacattcagaatgaagagatcatgtccttgcaaatgaagcaactggagcacgaccacgaatgcgagtccctgcaagcccacgatacccttagattgacctgcccccccgactacaccttgactctaagaaggagtccagatgacattcctctcatgacaccaaacaccatcacaatgatcccaaataccctaacaggaatgcagccgcttcacactttcaatacctttagcggaggacaaaattccacgaacctcccacacgggcacagtaccactagagtctag

SEQ ID NO: 342993 - DNA, 2511 bp, Artificial Sequence
  derived and/or modified sequence
atgtcccggccacaaggattgctttggttgccgttgttattcactcccgtctgtgtgatgctaaattccaatgttctcttgtggctgaccgctctcgctataaagttcacactcattgactcacaggcccaataccccgtagtgaatactaactatggaaagatcagagggcttagaaccccattgcctaacgagattctcggtcccgtcgagcagtacctgggagtaccatacgcatctccacccacgggggaaaggaggtttcagccccctgagccgccaagtagctggactgggatacgcaacacaacgcaattcgccgctgtgtgcccacaacacctggacgagaggtctctgttacatgatatgttaccaatctggttcactgctaatcttgatactctgatgacatatgtgcaagaccagaacgaggactgtttatatctgaacatatatgtacctacagaggatggagctaataccaagaaaaatgcagatgacatcaccagtaatgaccgtggagaggacgaagatattcatgaccagaatagcaagaagccagtcatggtttatattcacggcggttcgtacatggaaggcacaggcaacatgattgacgggtcaatcctcgcaagttacggaaacgtcatcgtcataacaatcaactacaggctcggcatcttggggtttctcagcaccggagatcaggccgctaagggcaactacggcctccttgatcagattcaggcccttagatggatcgaagaaaacgtaggcgcttttggcggagaccctaaacgcgtgaccatctttggcagcggagctggagccagctgcgtgagcctgttgaccctcagccactattcggaggggctatttcagaaagccatcatccagtcagggactgctctctcaagctgggctgtcaactatcaaccagcgaagtatactcggatactggccgacaaggttggatgtaatatgctcgacactaccgatatggtggaatgtctgaggaataagaattataaggagctcattcagcagactataactccagccacataccatatcgccttcggccctgtgatcgatggggatgtgatacctgacgacccacagatcttaatggagcaaggtgaattcctgaattatgatatcatgctcggcgtcaatcaaggcgagggcttaaaattcgtggacggcattgtcgataatgaagacggagtaacaccaaatgattttgacttttccgtgagcaatttcgtagataacctgtacggatatcccgagggcaaggataccctgagagaaacgatcaaatttatgtatactgactgggctgacaaagaaaaccccgagacacggagaaaaaccctcgtggccctctttaccgaccaccaatgggtggctccagctgttgcaaccgccgacctgcacgcacaatacggctcccccacatacttctatgccttctatcaccactgtcagtctgaaatgaagcctagttgggcagactctgctcacggcgatgaggtgccttacgtgttcggtatcccgatgatcggtccaacagaactgttttcctgcaatttttcaaaaaatgacgttatgctcagtgctgtcgtgatgacttattggacgaatttcgccaaaaccggcgacccaaatcagcctgtcccacaagacactaaatttatccatactaagcctaatagattcgaggaagtggcttggtctaaatataatcctaaagatcagctctatctccacatcggactgaagccccgtgtcagggaccattaccgcgctacaaaagtggcattctggctcgaactcgtgccccatctccacaatcttaacgaaatctttcagtatgtgagtaccactaccaaggtacccccaccggacatgacgtcattcccgtatggcaccagacgctcacctgccaaaatttggcccaccaccaaacgacccgcaattactccggctaacaatcccaaacacagtaaggatccccataagaccggcccagaagatactaccgtgctgatcgagaccaaacgggattattccacagaactaagcgttacaatcgcagttggggctagcctcctatttttgaacatcctggctttcgccgcactgtactacaagaaagataagagaaggcatgagacccaccgcagaccttcaccacaaagaaataccactaacgatatagcccacattcaaaacgaagagatcatgagccttcagatgaagcagctcgagcacgatcatgagtgcgagagcctgcaagctcacgatactctccgcctgacatgtccgcctgattacactctgaccttaaggcgtagcccggatgatattccactgatgacccccaataccattacaatgattccaaatactttgaccggtatgcagcctctccacacgttcaatacatttagtggcggtcagaactccacaaatctgcctcacggccattctacaacgcgggtgtag

SEQ ID NO: 342994 - protein, 712 aa, Artificial Sequence
  derived and/or modified sequence
MDEPMGEEEINPQTEEVSIKEIAITHHVKEGHEKADPSQFELLKVLGQGSFGKVFLVKKISGSDARQLYAMKVLKKATLKVRDRVRTKMERDILVEVNHPFIVKLHYAFQTEGKLYLILDFLRGGDLFTRLSKEVMFTEEDVKFYLAELALALDHLHSLGIIYRDLKPENILLDEEGHIKLTDFGLSKESIDHEKKAYSFCGTVEYMAPEVVNRRGHTQSADWWSFGVLMFEMLTGTLPFQGKDRKETMTMILKAKLGMPQFLSPEAQSLLRMLFKRNPANRLGAGPDGVEEIKRHSFFSTIDWNKLYRREIHPPFKPATGRPEDTFYFDPEFTAKTPKDSPGIPPSANAHQLFRGFSFVAITSDDESQAMQTVGVHSIVQQLHRNSIQFTDGYEVKEDIGVGSYSVCKRCIHKATNMEFAVKIIDKSKRDPTEEIEILLRYGQHPNIITLKDVYDDGKYVYVVTELMKGGELLDKILRQKFFSEREASAVLFTITKTVEYLHAQGVVHRDLKPSNILYVDESGNPESIRICDFGFAKQLRAENGLLMTPCYTANFVAPEVLKRQGYDAACDIWSLGVLLYTMLTGYTPFANGPDDTPEEILARIGSGKFSLSGGYWNSVSDTAKDLVSKMLHVDPHQRLTAALVLRHPWIVHWDQLPQYQLNRQDAPHLVKGAMAATYSALNRNQSPVLEPVGRSTLAQRRGIKKITSTAL

SEQ ID NO: 342995 - DNA, 2139 bp, Artificial Sequence
  derived and/or modified sequence
atggacgagcccatgggcgaggaggagatcaacccccagaccgaggaggtgagcatcaaggagatcgccatcacccaccacgtgaaggagggccacgagaaggccgaccccagccagttcgagctgctgaaggtgctgggccagggcagcttcggcaaggtgttcctggtgaagaagatcagcggcagcgacgccagacagctgtacgccatgaaggtgctgaagaaggccaccctgaaggtgagagacagagtgagaaccaagatggagagagacatcctggtggaggtgaaccaccccttcatcgtgaagctgcactacgccttccagaccgagggcaagctgtacctgatcctggacttcctgagaggcggcgacctgttcaccagactgagcaaggaggtgatgttcaccgaggaggacgtgaagttctacctggccgagctggccctggccctggaccacctgcacagcctgggcatcatctacagagacctgaagcccgagaacatcctgctggacgaggagggccacatcaagctgaccgacttcggcctgagcaaggagagcatcgaccacgagaagaaggcctacagcttctgcggcaccgtggagtacatggcccccgaggtggtgaacagaagaggccacacccagagcgccgactggtggagcttcggcgtgctgatgttcgagatgctgaccggcaccctgcccttccagggcaaggacagaaaggagaccatgaccatgatcctgaaggccaagctgggcatgccccagttcctgagccccgaggcccagagcctgctgagaatgctgttcaagagaaaccccgccaacagactgggcgccggccccgacggcgtggaggagatcaagagacacagcttcttcagcaccatcgactggaacaagctgtacagaagagagatccacccccccttcaagcccgccaccggcagacccgaggacaccttctacttcgaccccgagttcaccgccaagacccccaaggacagccccggcatcccccccagcgccaacgcccaccagctgttcagaggcttcagcttcgtggccatcaccagcgacgacgagagccaggccatgcagaccgtgggcgtgcacagcatcgtgcagcagctgcacagaaacagcatccagttcaccgacggctacgaggtgaaggaggacatcggcgtgggcagctacagcgtgtgcaagagatgcatccacaaggccaccaacatggagttcgccgtgaagatcatcgacaagagcaagagagaccccaccgaggagatcgagatcctgctgagatacggccagcaccccaacatcatcaccctgaaggacgtgtacgacgacggcaagtacgtgtacgtggtgaccgagctgatgaagggcggcgagctgctggacaagatcctgagacagaagttcttcagcgagagagaggccagcgccgtgctgttcaccatcaccaagaccgtggagtacctgcacgcccagggcgtggtgcacagagacctgaagcccagcaacatcctgtacgtggacgagagcggcaaccccgagagcatcagaatctgcgacttcggcttcgccaagcagctgagagccgagaacggcctgctgatgaccccctgctacaccgccaacttcgtggcccccgaggtgctgaagagacagggctacgacgccgcctgcgacatctggagcctgggcgtgctgctgtacaccatgctgaccggctacacccccttcgccaacggccccgacgacacccccgaggagatcctggccagaatcggcagcggcaagttcagcctgagcggcggctactggaacagcgtgagcgacaccgccaaggacctggtgagcaagatgctgcacgtggacccccaccagagactgaccgccgccctggtgctgagacacccctggatcgtgcactgggaccagctgccccagtaccagctgaacagacaggacgccccccacctggtgaagggcgccatggccgccacctacagcgccctgaacagaaaccagagccccgtgctggagcccgtgggcagaagcaccctggcccagagaagaggcatcaagaagatcaccagcaccgccctgtag

SEQ ID NO: 342996 - DNA, 2139 bp, Artificial Sequence
  derived and/or modified sequence
atggatgaacctatgggcgaagaggaaatcaatccccaaaccgaggaggtttccattaaggaaatcgctatcacccaccatgtcaaagaagggcacgaaaaggctgatcccagccagtttgaactgcttaaagtgttgggacaaggctctttcggaaaggtctttcttgtgaagaaaattagcggaagcgatgccagacagctgtacgcaatgaaagtccttaagaaagcaacgctgaaagtgcgagaccgggtcaggacgaaaatggaaagggatattctcgtcgaagtgaaccatccattcatcgtaaaactgcactacgcatttcagactgaggggaagttgtacctgatcctggacttccttcgcggcggtgatctgtttacacggttgtccaaggaggtgatgttcacagaggaggacgttaagttctacctcgcagagctcgccctcgctttagatcatctgcactcgttgggcatcatctatcgcgacctgaagcccgagaacatcctcttggatgaagaaggccatattaaactgacagactttggcttgtccaaggaatccattgatcacgagaagaaagcttattctttctgtggcacagtggagtacatggccccggaggtcgtgaacaggcggggccacacgcagtcggcagattggtggagctttggggtccttatgtttgagatgctcaccggcaccctcccatttcagggcaaagacagaaaggagacgatgaccatgatcctgaaggccaaactgggaatgccccaattcctgagccctgaagcgcaaagtctgttacgtatgttattcaagaggaatcccgccaaccggttgggcgcgggaccagacggcgtggaggagattaaacggcattcctttttttccaccatagactggaacaaactgtatcgcagggagatacaccctccctttaagcctgccaccgggcggccggaggacactttctacttcgaccccgagttcaccgcaaagacccccaaggacagccccggtatcccaccatcggctaatgcccaccagctattcaggggctttagcttcgtagccattaccagcgacgacgagagtcaagccatgcaaactgtgggcgtgcattcgatcgtgcagcagcttcatcgcaactcaatccagtttacagacggctatgaagtaaaggaggatatcggcgttggtagttacagcgtctgcaagcgatgcattcacaaagcaacaaatatggagttcgcagtcaaaattatcgataaatccaagcgggatcctactgaggagatcgagatcctcctcaggtacggacagcatccaaatataatcaccctgaaagacgtatatgatgacggcaaatacgtgtacgtcgtcacagagctgatgaagggcggcgaactcctagataagatcttgaggcagaaatttttcagcgagagggaggcgtctgccgtgctgttcacgatcacgaaaactgtggagtacttgcatgcgcaaggagttgtgcaccgcgatcttaaaccatctaacattctttacgttgacgagagcggaaatcctgaaagtatcaggatctgcgacttcggctttgcgaaacagctgcgcgccgaaaatggtctcctgatgactccttgctacaccgccaacttcgtggcccccgaagtcttgaaaagacaggggtatgacgccgcttgcgacatttggtcactgggggtacttctgtatacaatgctgacaggatacactccttttgcaaacggcccagacgatacgcccgaggagattctggctcgaattggctctgggaagttcagtctgtcaggcggctactggaactcagtgtctgataccgctaaggatctggtgtcgaaaatgctccacgtggatccccaccagaggctgactgctgctctggtcctccggcatccctggattgtccactgggaccaattgccacagtaccagttgaaccgccaggacgcaccacacctggtgaaaggggcaatggccgccacttacagcgctctcaatcggaatcaaagtcccgtcttggagcccgtgggtcggtctacattggctcagagaaggggcatcaagaagattacttccactgccctttag

SEQ ID NO: 342997 - DNA, 2139 bp, Artificial Sequence
  derived and/or modified sequence
atggatgagcccatgggagaggaggagatcaacccccagacagaggaggtgtccatcaaggagatcgccatcacccaccacgtgaaggagggccacgagaaggctgaccccagccagtttgagctgctgaaggtgctgggccagggcagctttgggaaggtgttcctggtgaagaagatcagcggcagtgatgcccggcagctgtatgccatgaaggtgctgaagaaggccaccctgaaggtgcgggacagagtgaggaccaagatggagcgggacatcctggtggaggtgaaccaccccttcatcgtgaagctgcactacgccttccagacagagggcaagctgtacctgatcctggacttcctgcggggcggggacctcttcacccggctgagcaaggaggtgatgttcacagaggaggatgtgaagttctacctggccgagctggccctggccctggaccacctgcacagcctgggcatcatctacagagacctgaagccagagaacatcctgctggatgaggagggccacatcaagctgacagactttggcctgagcaaggagagcattgaccacgagaagaaggcctacagcttctgtggcaccgtggagtacatggcccctgaggtggtgaacagaagaggccacacccagagcgctgactggtggagctttggagtgctgatgtttgagatgctgaccggcaccctgcccttccagggcaaggacaggaaggagaccatgaccatgatcctgaaggccaagctgggcatgccccagttcctgagccctgaggcccagagcctgctgaggatgctgttcaagagaaatcctgccaaccggctgggcgccggcccagatggagtggaggagatcaagaggcacagcttcttcagcaccatcgactggaacaagctgtacagaagagagatccacccccccttcaagccagccaccggccggcctgaggacaccttctactttgatcctgagttcaccgccaagacccccaaggacagccctggcatccccccatctgccaatgcccaccagctgttccggggcttctcctttgtggccatcaccagtgatgatgagagccaggccatgcagacagtgggcgtgcacagcatcgtgcagcagctgcacagaaattccatccagttcacagatggctatgaggtgaaggaggacatcggcgtgggcagctacagcgtgtgcaagcgctgcatccacaaggccaccaacatggagtttgctgtgaagatcatcgacaagagcaagagggaccccacagaggagattgagatcctgctgcgctatggccagcaccccaacatcatcaccctgaaggatgtgtatgatgatggcaagtatgtgtatgtggtgacagagctgatgaagggcggggagctgctggacaagatcctgcggcagaagttcttcagcgagcgggaggccagcgctgtgctcttcaccatcaccaagacagtggagtacctgcacgcccagggcgtggtgcaccgggacctgaagcccagcaacatcctgtatgtggatgaaagtggcaaccctgagagcatccgcatctgtgactttggatttgccaagcagctgcgggcagaaaatggcctgctgatgaccccctgctacacagccaactttgtggcccctgaggtgctgaagaggcagggctatgatgctgcctgtgacatctggagcctgggcgtgctgctgtacaccatgctgaccggctacaccccatttgccaacggcccagatgacaccccagaggagatcctggccagaattggcagcggcaagttcagcctgagcggcggctactggaacagcgtgtctgacacagccaaggacctggtgtccaagatgctgcacgtggacccccaccagaggctgacagctgccctggtgctgcggcacccctggatcgtgcactgggaccagctgccccagtaccagctgaaccggcaggatgccccccacctggtgaagggggccatggccgccacctacagcgccctgaacagaaaccagagccctgtgctggagcctgtgggccgcagcaccctggcccagaggcggggcatcaagaagatcaccagcacagccctgtag

SEQ ID NO: 342998 - DNA, 2139 bp, Artificial Sequence
  derived and/or modified sequence
atggacgagcccatgggcgaggaggagatcaacccccagaccgaggaagttagcattaaggagatcgcgatcacgcatcatgtcaaggaagggcacgaaaaggcagacccttcccaatttgagttgctgaaggtcctgggccagggtagtttcggtaaagtttttttagtcaaaaaaataagtggctctgatgcacgacagttgtacgcgatgaaggtgttaaaaaaggccaccctgaaagtaagagacagagtccggacaaagatggagagggatatcctagtggaagtcaaccacccattcatcgtaaagttgcactatgcatttcagacggaaggcaagctctatctgattcttgacttcctgcgaggaggcgacctgttcaccagactttctaaagaagttatgtttacagaagaagacgtgaagttctacttggccgagctcgctctcgctctagatcatctgcatagtttaggcatcatttatagggaccttaagcccgaaaacattctgcttgatgaagaggggcatatcaagttgaccgacttcggcctcagcaaagaaagcatagaccatgaaaagaaagcgtactcattctgcggcaccgtcgaatatatggctcccgaagtcgtcaatcgcagaggacatacacagtccgcagactggtggagctttggagtgctaatgttcgagatgctcactgggaccttacccttccaggggaaagatagaaaagaaaccatgacaatgatactgaaagcaaagctaggtatgcctcaattccttagtccagaagcccagagtctcctgaggatgctcttcaaaagaaaccccgcaaacaggttgggggctggcccggacggcgtggaggagattaagaggcactcatttttttccacaatagactggaacaagctttatcgccgggaaatacaccccccattcaaacccgctactggtagacctgaggataccttttattttgacccagaatttactgcaaagacccccaaagactccccgggaatccccccctcagccaatgctcaccagctcttccggggtttctctttcgtggccatcacctctgacgacgaaagccaagcaatgcagacggtgggtgtccactccatagttcaacagcttcacaggaactccattcagttcacagatgggtacgaggtgaaagaagacataggggttggctcctatagtgtgtgcaaaaggtgcattcacaaggccaccaacatggagttcgccgtgaagatcatagataagtctaaacgcgaccctactgaggaaattgaaatcctgctgcgctatggccagcacccgaacattatcactcttaaggacgtctacgacgacggcaaatacgtgtacgtggtcaccgagctgatgaagggcggggagctgttggacaagatcctgcggcaaaagttttttagcgagagagaagcctcagctgtccttttcaccattactaaaacagtggagtacctacacgcccagggggtagtccatcgagacttgaagccatccaatatactatatgtggatgaatccggcaacccagaaagcatcaggatttgcgatttcggttttgccaaacagttgcgggccgaaaatgggttactgatgacaccatgctatacagccaactttgtggcacctgaggtgttaaaacgtcagggctatgatgccgcttgcgacatctggagcctcggtgtgcttctgtatactatgctgaccggttatacaccattcgctaatgggccagatgatactccagaggaaattctcgcgcgaataggcagtggtaaattctctctgagcggagggtactggaactcagttagcgacacagctaaagacttggtgtccaagatgctgcacgtggatccccaccagcgcttaactgcagccctcgtcttgcggcacccctggatcgtgcattgggaccagttgccacaatatcagctcaaccggcaggatgcaccccatctggtgaaaggagccatggccgccacctactccgccctcaaccgcaatcagagtcctgtgctggagcccgtcggaagatctaccctcgcacagagacgcggcattaagaaaatcacctcaactgccctgtag

SEQ ID NO: 342999 - DNA, 2139 bp, Artificial Sequence
  derived and/or modified sequence
atggatgagcccatgggcgaggaggagattaatccccagacagaagaggtgtcaattaaggagatcgcaattacccaccacgtcaaagaggggcatgagaaggcagacccaagccagtttgaactgcttaaggtgctaggccagggaagttttgggaaggtgttcctggtaaaaaagatttccggatcagatgcaaggcagctctacgctatgaaagtcctgaagaaggccaccctcaaggtacgtgatagagtgcggaccaagatggagagggacatccttgtggaagtgaaccacccattcattgttaagctgcattacgctttccagactgaaggcaagctctacctgattttggatttcctaaggggtggagatttattcactcgcctgtcgaaggaagtgatgtttacagaggaagatgttaagttctatttggccgagttggcattggcattggatcatctacactcattaggcattatatatagagaccttaagccggagaacatcctcctggatgaagaagggcacattaaactgaccgatttcggattgtctaaggagagcatcgatcatgagaagaaagcctactcattctgcggcaccgtggagtacatggccccagaagtagttaacagaaggggtcacacgcagtcggccgattggtggtcttttggggtgctgatgttcgaaatgctcaccggcacattaccatttcagggaaaggaccggaaagaaaccatgactatgatcttaaaggccaagctcggaatgccgcaattcctgtccccagaggcccagtccctcctgcgcatgttgtttaagaggaaccctgccaatcgtctgggtgccggaccagacggagtcgaggagatcaagcgtcacagcttcttctcgacaattgattggaataaactatacagaagggagatccatcccccattcaagcctgccaccggaagaccagaggatacattttacttcgacccagagtttacagccaagacacccaaggatagtccgggaattcccccatcagccaacgctcatcagctgtttaggggcttctctttcgtggccatcacctccgacgacgagagccaggccatgcagaccgtgggggtgcattcaattgtgcagcaactgcatcggaacagtatacaattcacggatggttacgaagtgaaggaggatataggtgtagggtcctatagtgtgtgtaagagatgcatccacaaggctactaatatggagttcgccgttaaaattattgataagagtaaacgcgatcctacggaggagatcgaaatacttctgagatatggtcagcatcccaacataatcactttaaaggatgtttacgacgacggaaaatacgtgtatgtcgtcaccgaactgatgaagggcggtgaattacttgataaaattttgcgtcagaagttcttctccgaacgagaagcatcggcagtgctgtttacgattaccaagaccgtggaatatctgcacgcccagggcgttgttcatcgcgacctgaaaccaagcaacattttatatgtggacgaatctggaaatcccgaatcgattcgtatctgcgattttggctttgcgaagcagcttcgggctgaaaacggcctgttgatgacaccttgctacacggctaacttcgtggccccagaggtgctgaaacggcaggggtatgatgcagcttgtgatatatggagtctgggcgtactgctgtacaccatgctcactggctataccccgtttgcaaacggcccagatgataccccagaagagatactcgccagaatcggcagcgggaagttcagcctcagcggaggatactggaactcagttagcgacaccgcgaaagatcttgtttccaaaatgcttcacgtggatccccaccagcgactgacggctgcattggttttacgtcacccgtggattgtccactgggatcagcttccccagtaccaactgaatcgacaggacgctcctcatctggtcaaaggggcaatggcagccacgtacagtgctctcaaccgcaatcaatcccccgtgctggagccagtgggaagaagcaccctggctcaaagacggggtataaagaagattaccagcacagccctgtag

SEQ ID NO: 343000 - DNA, 423 bp, Artificial Sequence
  derived and/or modified sequence
atgagcggcagcttctacttcgtgatcgtgggccaccacgacaaccccgtgttcgagatggagttcctgcccgccggcaaggccgagagcaaggacgaccacagacacctgaaccagttcatcgcccacgccgccctggacctggtggacgagaacatgtggctgagcaacaacatgtacctgaagaccgtggacaagttcaacgagtggttcgtgagcgccttcgtgaccgccggccacatgagattcatcatgctgcacgacatcagacaggaggacggcatcaagaacttcttcaccgacgtgtacgacctgtacatcaagttcagcatgaaccccttctacgagcccaacagccccatcagaagcagcgccttcgacagaaaggtgcagttcctgggcaagaagcacctgctgagctag

SEQ ID NO: 343001 - DNA, 423 bp, Artificial Sequence
  derived and/or modified sequence
atgagcggttcattttatttcgtgatcgtcgggcaccatgataatccggtctttgagatggaattcctccctgccgggaaggctgaaagtaaagatgatcaccgccaccttaaccaatttatcgctcacgcagctctcgacctcgtggatgaaaacatgtggctgtccaataatatgtatcttaagacggtggacaagttcaacgagtggtttgtcagcgcgttcgtgacggcgggtcatatgcggtttatcatgctacacgacatcaggcaagaggatggaatcaagaacttctttactgacgtgtacgacctctacattaagttctccatgaaccccttttacgagcccaattcaccaattaggtcatctgcctttgatagaaaggtgcagttcctcggcaagaaacaccttctcagttag

SEQ ID NO: 343002 - DNA, 423 bp, Artificial Sequence
  derived and/or modified sequence
atgagcggcagcttctactttgtgattgtgggccaccacgacaaccctgtgtttgagatggagttcctgcctgctgggaaggccgagagcaaggatgaccaccgccacctgaaccagttcatcgcccacgccgccctggacctggtggatgagaacatgtggctgagcaacaacatgtacctgaagacagtggacaagttcaatgagtggtttgtgtctgcctttgtgacagctggccacatgaggttcatcatgctgcatgacatccggcaggaggatggcatcaagaacttcttcacagatgtgtatgacctgtacatcaagttctccatgaaccccttctatgagcccaacagccccatccgcagcagcgcctttgacaggaaggtgcagttcctgggcaagaagcacctgctgtcctag

SEQ ID NO: 343003 - DNA, 423 bp, Artificial Sequence
  derived and/or modified sequence
atgagcggcagcttctacttcgtgatcgtgggccaccacgacaaccccgtttttgaaatggaatttcttccagctggcaaagccgagtctaaggacgaccataggcatcttaaccagttcattgctcacgccgctttggatctagtggatgagaacatgtggttgagtaacaatatgtacctgaagacagtcgataaattcaatgagtggttcgtgtcagccttcgtcactgccggtcacatgaggtttatcatgctacacgacatcagacaggaagacggtataaaaaattttttcactgacgtgtacgacctttacatcaagttctcaatgaatcccttctacgagcctaacagccccattcgctccagtgcgttcgaccgcaaagtgcagtttttgggaaaaaagcaccttctcagctag

SEQ ID NO: 343004 - DNA, 423 bp, Artificial Sequence
  derived and/or modified sequence
atgagtgggagtttctacttcgtgatcgtaggccatcacgataatcccgtttttgaaatggagttcttgcctgccggtaaggctgagagcaaagacgaccatcgccacctgaatcaattcatcgcgcacgcagcactggacttggtagatgaaaatatgtggctctccaacaatatgtacttaaagacagttgataaatttaatgaatggttcgtgtcagcattcgtgactgcaggacacatgaggtttattatgctgcatgacatccggcaggaagacggtatcaagaattttttcacagatgtatatgacctctacattaaatttagcatgaaccccttctacgaacccaacagccctatccgaagctctgctttcgatcggaaagtgcagttcctcggtaagaaacatctgcttagctag

SEQ ID NO: 343005 - DNA, 444 bp, Artificial Sequence
  derived and/or modified sequence
atgagcggcagcttctacttcgtgatcgtgggccaccacgacaaccccgtgttcgagatggagttcctgcccgccggcaaggccgagagcaaggacgaccacagacacctgaaccagttcatcgcccacgccgccctggacctggtggacgagaacatgtggctgagcaacaacatgtacctgaagaccgtggacaagttcaacgagtggttcgtgagcgccttcgtgaccgccggccacatcctgaccttcctggtgaagatgagattcatcatgctgcacgacatcagacaggaggacggcatcaagaacttcttcaccgacgtgtacgacctgtacatcaagttcagcatgaaccccttctacgagcccaacagccccatcagaagcagcgccttcgacagaaaggtgcagttcctgggcaagaagcacctgctgagctag

SEQ ID NO: 343006 - DNA, 225 bp, Artificial Sequence
  derived and/or modified sequence
atgagcggcagcttctacttcgtgatcgtgggccaccacgacaaccccgtgttcgagatggagttcctgcccgccggcaaggccgagagcaaggacgaccacagacacctgaaccagttcatcgcccacgccgccctggacctggtggacgagaacatgtggctgagcaacaacatgtacctgaagaccgtggacaagttcaacgagtggttcgtgagcgcctag

SEQ ID NO: 343007 - DNA, 423 bp, Artificial Sequence
  derived and/or modified sequence
atgagtggaagtttctatttcgtgatcgtgggtcaccacgataacccggtgtttgagatggaattcttgccggccgggaaggcagaaagcaaggacgaccataggcacctgaaccagttcattgctcacgcggccctagatctcgtggacgagaatatgtggctgtccaataatatgtatctaaaaacagtggataaatttaatgagtggttcgtgtctgcgttcgtgacggccggccacatgcgattcatcatgctgcatgacattcgccaagaggatggcataaaaaacttcttcacggacgtgtatgatctgtacattaagttttctatgaatccattctacgaaccgaacagtcctatccgaagcagcgcctttgaccggaaggtccagttcctcgggaaaaagcacctattgtcgtag

SEQ ID NO: 343008 - DNA, 423 bp, Artificial Sequence
  derived and/or modified sequence
atgtcaggatccttttacttcgtaatcgtgggccatcacgataacccagttttcgaaatggaattcttaccagccggaaaggcagagtctaaagacgaccacagacacctgaaccaatttatcgcgcacgctgccctggacctggttgatgagaatatgtggctttcaaacaacatgtatttgaagacagtggacaaattcaacgagtggttcgtttctgccttcgtgaccgccggtcatatgcgcttcatcatgttgcacgatatcaggcaggaagatggcataaaaaattttttcactgacgtctatgacctatatatcaaattctccatgaacccgttctatgagccaaacagccccatccggtctagcgcctttgatagaaaagttcaatttctcggcaagaagcacctgctgagttag

SEQ ID NO: 343009 - DNA, 423 bp, Artificial Sequence
  derived and/or modified sequence
atgtctggatctttctacttcgtgatagtgggacatcatgacaacccagtcttcgaaatggagttcctgcccgccggcaaagctgagtcgaaagacgatcacaggcacctgaatcaatttatagcacacgccgcactggacctggtggacgagaatatgtggttaagcaataacatgtacctcaaaacagtggacaagtttaatgaatggttcgtctccgctttcgttacagcaggccacatgcgcttcattatgcttcatgatatcaggcaggaagacgggattaagaacttttttacggacgtgtacgacctttacattaagttttcgatgaatcctttctatgaaccaaactcccccattcggagtagcgcatttgaccgcaaagtgcagtttttagggaagaagcaccttctgagctag

SEQ ID NO: 343010 - DNA, 423 bp, Artificial Sequence
  derived and/or modified sequence
atgagcggctcattttattttgttatcgtcggacatcatgataaccctgttttcgagatggaattcttgccggcagggaaagccgagagcaaagatgaccatcggcatctgaatcaatttatcgcccacgcagctctggatctggtcgatgaaaatatgtggctcagcaacaatatgtacctgaagaccgtggataaatttaatgagtggttcgtgagcgcttttgtcacagctggccatatgcgcttcatcatgctgcacgatattcgccaggaagatggcattaagaactttttcaccgacgtctatgacctctacatcaaattctcaatgaatcctttttatgaacctaacagtcccatccgttcttctgcctttgatcggaaggtgcaatttctagggaagaagcacctgctttcgtag

SEQ ID NO: 343011 - DNA, 444 bp, Artificial Sequence
  derived and/or modified sequence
atgagcggcagcttttactttgtgatcgtggggcatcatgataatccagtttttgagatggagtttttgccagccggtaaggctgaaagcaaagacgaccaccgccatctcaatcagttcatcgcacatgcagcactggacctggtggacgaaaatatgtggctatcaaataatatgtatctgaagaccgtcgacaagttcaacgagtggtttgttagcgcgttcgtcacggcaggccatatattgaccttcttggtcaaaatgagattcataatgctccatgatataagacaggaggatggcatcaagaattttttcacggacgtttacgatttgtacatcaagttttcaatgaaccccttttacgagcccaactcgccaatcaggagctctgcttttgaccggaaggtgcagttcttagggaaaaaacatctcctgagttag

SEQ ID NO: 343012 - DNA, 225 bp, Artificial Sequence
  derived and/or modified sequence
atgtccgggagtttctatttcgtgatcgtcgggcaccacgacaatccagtgttcgagatggagtttcttcctgccggtaaggccgagagcaaggatgatcataggcacctgaatcagttcattgcacacgccgctctggatttggttgatgaaaacatgtggctgtcgaacaatatgtaccttaagaccgtggataagtttaatgaatggttcgtgtccgcctag

SEQ ID NO: 343013 - DNA, 444 bp, Artificial Sequence
  derived and/or modified sequence
atgagcggcagcttctactttgtgattgtgggccaccacgacaaccctgtgtttgagatggagttcctgcctgctgggaaggccgagagcaaggatgaccaccgccacctgaaccagttcatcgcccacgccgccctggacctggtggatgagaacatgtggctgagcaacaacatgtacctgaagacagtggacaagttcaatgagtggtttgtgtctgcctttgtgacagctggccacatcctgaccttcctggtgaagatgaggttcatcatgctgcatgacatccggcaggaggatggcatcaagaacttcttcacagatgtgtatgacctgtacatcaagttctccatgaaccccttctatgagcccaacagccccatccgcagcagcgcctttgacaggaaggtgcagttcctgggcaagaagcacctgctgtcctag

SEQ ID NO: 343014 - DNA, 225 bp, Artificial Sequence
  derived and/or modified sequence
atgagcggcagcttctactttgtgattgtgggccaccacgacaaccctgtgtttgagatggagttcctgcctgctgggaaggccgagagcaaggatgaccaccgccacctgaaccagttcatcgcccacgccgccctggacctggtggatgagaacatgtggctgagcaacaacatgtacctgaagacagtggacaagttcaatgagtggtttgtgtctgcctag

SEQ ID NO: 343015 - DNA, 423 bp, Artificial Sequence
  derived and/or modified sequence
atgagcggcagcttctacttcgtgatcgtgggccaccacgacaacccagtgtttgagatggagttcctccccgcgggcaaagccgagagcaaagacgaccaccgtcatctgaaccagtttattgctcacgcggccctggacctagtggatgagaatatgtggctcagcaataacatgtacctgaaaactgtggataagttcaacgagtggtttgtatcagctttcgtcactgcaggtcacatgcgctttatcatgctgcacgacatccgacaggaggacggcatcaaaaattttttcacagacgtgtacgatttgtatataaagttttctatgaacccattctatgagccaaatagtcctatcaggtcttcagcctttgaccggaaggtccagttccttggcaagaaacatcttctgtcttag

SEQ ID NO: 343016 - DNA, 423 bp, Artificial Sequence
  derived and/or modified sequence
atgagcggcagcttctacttcgtgatcgtgggccaccacgacaacccagtcttcgagatggaatttctacctgcagggaaggccgagagcaaggatgatcaccgacacctgaatcagttcatcgcgcatgcggccctggatctggttgacgaaaacatgtggctcagcaacaatatgtacctgaagaccgttgataagtttaatgaatggtttgtgtcagcctttgtcactgcaggccatatgcggttcatcatgctgcacgatattaggcaggaggacggaatcaagaactttttcaccgacgtttatgacctttacataaaattctccatgaatcccttctatgagccaaattctcccatccggtcatctgccttcgacaggaaagtgcagttccttggcaagaaacatttactttcttag

SEQ ID NO: 343017 - DNA, 423 bp, Artificial Sequence
  derived and/or modified sequence
atgagcggcagcttctacttcgtgatcgtgggccaccacgacaacccggtctttgaaatggaatttttgcccgcagggaaagctgagtccaaggacgatcaccgccacctcaaccagttcatagcccacgctgcattagacctggtcgatgaaaatatgtggctgagcaacaatatgtaccttaaaaccgtagacaaattcaatgagtggtttgtcagcgcctttgtgaccgcgggacacatgagatttatcatgcttcatgatatccggcaggaggacggaatcaaaaacttcttcactgacgtgtacgacctgtatatcaagttctccatgaacccattttatgagcccaactctccaattcggagctcagcattcgacaggaaagtgcaattccttggaaagaaacaccttctcagctag

SEQ ID NO: 343018 - DNA, 423 bp, Artificial Sequence
  derived and/or modified sequence
atgagcggcagcttctacttcgtgatcgtgggccaccacgacaaccctgtctttgagatggagttcctaccagcaggtaaagccgaatctaaagatgatcatcggcacctgaaccaattcatcgcccatgccgcactggatctggtggacgaaaatatgtggctttctaataatatgtacttgaagaccgtagataagtttaacgagtggtttgtgagtgcctttgtaacggcaggccacatgagattcatcatgctgcacgacattaggcaggaagacggcatcaagaatttctttactgacgtttatgacctctacatcaagttctccatgaacccattctacgagccaaacagtccaatcagatcctcagcattcgaccgtaaagtccagttcctgggaaaaaagcacctgcttagttag

SEQ ID NO: 343019 - DNA, 444 bp, Artificial Sequence
  derived and/or modified sequence
atgagcggcagcttctacttcgtgatcgtgggccaccacgacaaccccgtgttcgagatggagttcctgcctgcggggaaggctgaatcaaaagacgaccatcgtcacttaaaccagttcatcgcccacgccgctctggatctggtcgacgaaaacatgtggctctctaacaatatgtacctgaagaccgtggataaattcaatgaatggtttgtgagcgccttcgtaaccgccgggcatatactgacattccttgtgaagatgcggttcattatgctacacgacatcaggcaggaggatggaatcaaaaattttttcacagacgtttatgacttatacattaagtttagtatgaaccccttttacgagcctaattcgccgattcggagttccgcattcgaccggaaggtgcagtttctcggaaagaagcaccttcttagctag

SEQ ID NO: 343020 - DNA, 225 bp, Artificial Sequence
  derived and/or modified sequence
atgagcggcagcttctacttcgtgatcgtgggccaccacgacaaccccgtgtttgaaatggagttccttcctgctggcaaggcggagagcaaagacgaccaccgccacctgaaccagtttattgcacatgccgcccttgatcttgtggatgagaatatgtggttatccaataatatgtacctgaagacggttgacaagtttaacgaatggttcgtgagcgcatag

SEQ ID NO: 343021 - DNA, 423 bp, Artificial Sequence
  derived and/or modified sequence
atgtcaggcagtttctacttcgtgatcgtgggtcatcacgataatcccgttttcgagatggaattccttcctgccggaaaggccgaaagcaaagacgatcaccgacaccttaaccaatttatcgcccacgctgccttagatctggtggatgagaacatgtggctgagtaacaatatgtatttaaaaacggtcgataagttcaacgaatggttcgtgtctgctttcgtaaccgctggacacatgcggttcattatgctccacgatatcaggcaagaagacggcattaaaaacttcttcacggatgtctatgacttgtacataaaattctcaatgaacccattttatgagccgaacagcccgattaggagctctgcattcgacaggaaagtgcagtttctaggaaagaagcacctcttaagctag

SEQ ID NO: 343022 - DNA, 423 bp, Artificial Sequence
  derived and/or modified sequence
atgagtggaagcttttactttgtaatcgtcggccatcacgataatccagtcttcgagatggagttcctgccggcaggtaaggccgagtctaaggacgaccacaggcacctcaatcagtttatagctcacgccgcactcgaccttgtagacgaaaacatgtggctaagtaataacatgtaccttaagacagtggacaagttcaatgagtggtttgttagtgcattcgtgacagctggtcatatgcgcttcatcatgttacacgacatccgccaggaggacggcatcaagaactttttcacagacgtatatgatctttacatcaagtttagtatgaaccccttctacgaacctaatagccctatacgatccagcgccttcgacaggaaagtgcaatttctaggaaaaaaacacctcttgagttag

SEQ ID NO: 343023 - DNA, 423 bp, Artificial Sequence
  derived and/or modified sequence
atgagcggctccttttacttcgtcatagtcgggcaccacgataacccagtctttgagatggagttcctccccgctggaaaggctgaaagcaaggacgaccaccgccaccttaaccagtttatcgctcacgccgcattggatctggtggacgaaaatatgtggctaagtaacaatatgtacctgaaaacagttgataaattcaatgaatggttcgtgtcagcgttcgtcaccgctggacacatgaggtttatcatgctccacgacattcgccaggaagatggcatcaagaacttttttaccgacgtttacgatctgtatatcaagttctcgatgaaccccttctatgagcctaattcccccatcagaagcagcgctttcgatagaaaggtgcaattcctgggcaaaaaacacctcctttcctag

SEQ ID NO: 343024 - DNA, 423 bp, Artificial Sequence
  derived and/or modified sequence
atgtccgggtccttttacttcgttattgttggtcatcatgacaaccctgtgttcgagatggagtttctgcccgcaggcaaggctgagtcaaaggacgaccacagacacctgaaccaattcattgcgcatgccgcactcgacttagtggacgagaacatgtggttgtccaacaacatgtatctaaaaactgttgataagtttaacgaatggtttgtgtccgccttcgtcacagctggacatatgcggtttattatgctgcacgatatccgccaggaagacgggatcaagaatttctttactgacgtgtacgacctgtacattaaattctccatgaaccctttttacgaacccaacagccccattcggagctccgcgttcgatagaaaagtgcagttcttagggaagaagcacctgctgtcctag

SEQ ID NO: 343025 - DNA, 444 bp, Artificial Sequence
  derived and/or modified sequence
atgtctggcagcttttacttcgtgatcgttgggcatcacgataacccggtgtttgagatggagttcctgcctgctggaaaggcagaatcaaaggacgatcaccggcatctgaatcagttcatcgcccacgccgctcttgatctggtggacgaaaatatgtggctgtcaaataacatgtacctgaagactgtcgataagttcaatgaatggtttgtgtctgcatttgtgacggcgggacacattcttacatttttagtgaagatgagatttataatgctccacgatatcaggcaggaggacgggatcaaaaatttctttacagatgtgtatgatctttacatcaagtttagcatgaaccctttttatgagccgaacagcccaatacggtcaagcgctttcgatcgcaaagtgcagttcctgggaaaaaaacatttgttgtcctag

SEQ ID NO: 343026 - DNA, 225 bp, Artificial Sequence
  derived and/or modified sequence
atgagcggatccttctactttgtaattgtgggccaccacgataacccggtgtttgaaatggaatttctccctgcaggcaaggccgaatccaaggatgatcataggcatttaaaccagtttatcgcacatgctgctctggacctggtggatgagaatatgtggctttcaaacaatatgtacctgaagactgttgataagttcaacgagtggttcgtttcagcctag

SEQ ID NO: 343027 - DNA, 828 bp, Artificial Sequence
  derived and/or modified sequence
atgaaggagctgagccaggacagcaccggcagagtgaagagactgccccccatcgtgagaggcggcgccatcgacagatactggcccaccgccgacggcagactggtggagtacgacatcgacgaggtggtgtacgacgaggacagcccctaccagaacatcaagatcctgcacagcaagcagttcggcaacatcctgatcctgagcggcgacgtgaacctggccgagagcgacctggcctacaccagagccatcatgggcagcggcaaggaggactacaccggcaaggacgtgctgatcctgggcggcggcgacggcggcatcctgtgcgagatcgtgaagctgaagcccaagatggtgaccatggtggagatcgaccagatggtgatcgacggctgcaagaagtacatgagaaagacctgcggcgacgtgctggacaacctgaagggcgactgctaccaggtgctgatcgaggactgcatccccgtgctgaagagatacgccaaggagggcagagagttcgactacgtgatcaacgacctgaccgccgtgcccatcagcaccagccccgaggaggacagcacctgggagttcctgagactgatcctggacctgagcatgaaggtgctgaagcaggacggcaagtacttcacccagggcaactgcgtgaacctgaccgaggccctgagcctgtacgaggagcagctgggcagactgtactgccccgtggagttcagcaaggagatcgtgtgcgtgcccagctacctggagctgttcctgctgcagttctggagagtgagaagcagcaagtgcgccctggagggctag

SEQ ID NO: 343028 - DNA, 828 bp, Artificial Sequence
  derived and/or modified sequence
atgaaagaactgtctcaggattccactggccgggtaaaaagattacctcctatagtcagaggtggggccatagacagatactggcccactgcagatggtagactcgtggagtatgacatagatgaggtcgtgtacgacgaggactcaccataccagaacataaagatcctgcactcaaaacagttcggtaatatccttatcctttccggggatgtgaatctcgcagagagcgacctggcgtatacccgagccataatgggcagtgggaaagaggactacaccggcaaggatgttctgattctcggaggaggagatggcgggattctgtgtgaaatcgtgaagctgaagcctaaaatggtcacaatggtcgagatagaccagatggtaattgacggttgcaaaaagtatatgaggaaaacatgcggcgatgtcctagacaacctgaaaggcgactgttatcaagtgcttatcgaggactgcattcccgttctgaaacgttatgccaaagaggggcgcgaatttgactatgttataaatgatctcaccgctgttcccattagcaccagcccagaagaagacagtacatgggaattcctccgtctcattttggatttgtccatgaaggtgctgaagcaggatgggaaatacttcacacagggcaactgcgttaatctgacagaagccctgtccctctacgaggagcagctaggtagactctactgccctgtagaattctcaaaggaaattgtctgcgttccaagctatctcgagctgtttctgctccagttttggcgcgtgagaagcagtaagtgtgcactggaaggttag

SEQ ID NO: 343029 - DNA, 828 bp, Artificial Sequence
  derived and/or modified sequence
atgaaggagctgagccaggacagcacaggccgggtgaagaggctgccccccatcgtgcggggcggggccatcgaccgctactggcccacagcagatggccgcctggtggagtatgacattgatgaggtggtgtatgatgaggacagcccctaccagaacatcaagatcctgcacagcaagcagtttggaaacatcctgatcctgtctggagatgtgaacctggccgagagtgacctggcctacacccgggccatcatgggcagcggcaaggaggactacaccgggaaggatgtgctgatcctgggcggcggagatggcggcatcctgtgtgagatcgtgaagctgaagcccaagatggtgaccatggtggagattgaccagatggtgattgatggctgcaagaagtacatgaggaagacctgtggagatgtgctggacaacctgaagggggactgctaccaggtgctgattgaggactgcatccctgtgctgaagagatatgccaaggagggccgggagtttgattatgtgatcaatgacctgacagctgtgcccatcagcaccagccctgaggaggacagcacctgggagttcctgcggctcatcctggacctgtccatgaaggtgctgaagcaggacggcaagtacttcacccagggcaactgtgtgaacctgacagaggccctgagcctgtatgaggagcagctgggccgcctgtactgccctgtggagttcagcaaggagatcgtgtgtgtgcccagctacctggagctgttcctgctgcagttctggagggtgcgcagcagcaaatgtgccctggagggctag

SEQ ID NO: 343030 - DNA, 828 bp, Artificial Sequence
  derived and/or modified sequence
atgaaggagctgagccaggacagcaccggccgggtgaagcggctgccaccaattgtaaggggcggggctatcgacaggtattggccaacagcggacggcaggctagtggaatatgacatcgatgaagtcgtgtacgacgaggattccccttaccagaacattaaaatccttcattccaagcaattcggcaacatcctcattttatccggtgacgtaaatctcgctgagtcggaccttgcctatacccgggcaatcatgggatcagggaaggaggactacacaggaaaggatgtgctcatacttggcggcggggacggcgggatcctgtgcgagatcgtcaagctgaaacccaaaatggtaactatggtggagatcgatcagatggtaatagatgggtgtaaaaagtacatgcgcaagacctgcggcgatgtgctggacaatttgaaaggggactgctatcaggttctgatcgaggattgcatcccggtgttgaaacgctatgccaaagagggaagggagtttgactatgttattaatgacctcaccgcagttcctatttcaactagcccggaggaagacagcacttgggagttcctgaggttgatactggacttgtcaatgaaggttctgaagcaggatggaaagtacttcactcaggggaattgtgtgaacttaacggaagcactgagtctctatgaagaacagctggggagactttactgcccagtggagttttccaaggagatcgtctgtgtgcctagttacttagaacttttcctcctgcaattctggcgtgtccggtcgagcaaatgtgcactggagggatag

SEQ ID NO: 343031 - DNA, 828 bp, Artificial Sequence
  derived and/or modified sequence
atgaaagagctgagtcaggacagcactggcagagtcaaacgactgcctcctatcgtaaggggaggcgctatcgatcgttactggcccacagctgacggcaggttggtggaatatgacatcgacgaagtggtttatgatgaggactccccgtatcaaaacatcaaaattcttcacagtaagcaattcggaaatattctgattctgtccggggacgtgaacttggccgagtccgacctggcttacacgcgagcaatcatggggagcggcaaggaggactatacaggcaaggacgtgcttatcctaggaggaggcgacggtggaattctgtgcgagatcgtgaagcttaagcccaagatggtgacaatggtggagatcgatcagatggtgatcgatggctgtaagaagtacatgagaaagacctgtggagatgttctcgacaacctgaaaggcgactgttaccaggtgttgatagaagactgcatcccagtcctgaagcgttatgccaaggaaggccgtgaatttgattacgtcatcaacgaccttaccgccgtgccaatttcaacatcaccagaagaggactccacctgggaattcctccggttgattctggacctgtcaatgaaggttctgaagcaggacgggaagtacttcacacaggggaactgtgtcaacctgactgaggcgctttctttgtacgaggagcaactaggacggctctattgtccagtggaattcagcaaagagatagtatgtgttccctcttacctagaacttttcctcttgcagttctggcgcgttaggtcatcaaagtgcgcgttggagggttag

SEQ ID NO: 343032 - DNA, 1592 bp, Artificial Sequence
  derived and/or modified sequence
actcccagccggccgcagcctgacacgccgcgcggccccccagtctcccgcggctgctcccccaggcatggcacagggcctcgcctcactatggcagcagcacggcacagcacgctcgacttcatgctcggcgccaaagctgatggtgagaccattctaaaaggcctccagtccattttccaggagcaggggatggcggagtcggtgcacacctggcaggaccatggctatttagcaacctacacaaacaagaacggcagattttgaacaaagtagaggaaagaatgaaagaattgagtcaggacagtactgggcgggtgaaacgattaccacccatagtgcgaggaggagccatcgacagatactggcccaccgccgacgggcgcctggttgaatatgacatagatgaagtggtatatgacgaagattcaccttatcaaaatataaaaattctacactcgaagcagtttggaaatattctcatccttagtggggatgttaatttggcagagagtgatttggcatatacccgggccatcatgggcagtggcaaagaagattacactggcaaagatgtactcattctgggaggtggagacggaggcatattgtgtgaaatagtcaaactaaaaccaaagatggtcactatggtagagattgaccaaatggtgattgatgggtgtaagaaatacatgcgaaaaacgtgtggcgatgtcttagacaatcttaaaggagactgctatcaggttctaatagaagactgtatcccggtactgaagaggtacgccaaagaagggagagaatttgattatgtgattaatgatttgacagctgttccaatctccacgtctccagaagaagattccacatgggagtttctcagactgattcttgacctctcaatgaaagtgttgaaacaggatgggaaatattttacacaggggaactgtgtcaatctgacagaagcactgtcgctctatgaagaacagctggggcgcctgtattgtcctgtggaattttcaaaggagatcgtctgtgtcccttcatacttggaattatttctcttacagttctggagagtcagaagttcaaaatgcgccttagagggctaaaatgaaggtgttggcagggttggttccttctggaggctcctgggaaaatctgtgttctttctttaatttcagtctcaaagccagcagtggaacagtttcaagtctctctgctcctgttgtcacattgccttccatctctgtctcctgtgtccctcttgtaaggccacttgtgattacaagtcctacctagatgatccaggattctcttcctgcttcgaaatccttaaccagttcttcaaaatccttttgccatataaagtaacattcttataaggctctggagattacatggggtggggcggggtggcagggtgggggcatttatttcacctactgcatgttgcaagataaaagtaactttacagtgcagaaattggacaacatcttgaccaggtaatgaaaatcaacatccacaagggcaggtggacgtcctgtgcctccagaggtgacactctgagaagggtctgtcaccacctatgc

SEQ ID NO: 343033 - protein, 526 aa, Artificial Sequence
  derived and/or modified sequence
MSITSDEVNFLVYRYLQESGFSHSAFTFGIESHISQSNINGTLVPPAALISILQKGLQYVEAEISINEDGTVFDGRPIESLSLIDAVMPDVVQTRQQAFREKLAQQQASAAAAAAAATAAATAATTTSAGVSHQNPSKNREATVNGEENRAHSVNNHAKPMEIDGEVEIPSSKATVLRGHESEVFICAWNPVSDLLASGSGDSTARIWNLNENSNGGSTQLVLRHCIREGGHDVPSNKDVTSLDWNTNGTLLATGSYDGFARIWTEDGNLASTLGQHKGPIFALKWNRKGNYILSAGVDKTTIIWDAHTGEAKQQFPFHSAPALDVDWQNNTTFASCSTDMCIHVCRLGCDRPVKTFQGHTNEVNAIKWDPSGMLLASCSDDMTLKIWSMKQEVCIHDLQAHNKEIYTIKWSPTGPATSNPNSNIMLASASFDSTVRLWDIERGVCTHTLTKHQEPVYSVAFSPDGKYLASGSFDKCVHIWNTQSGNLVHSYRGTGGIFEVCWNARGDKVGASASDGSVCVLDLRK

SEQ ID NO: 343034 - DNA, 1581 bp, Artificial Sequence
  derived and/or modified sequence
atgagcatcaccagcgacgaggtgaacttcctggtgtacagatacctgcaggagagcggcttcagccacagcgccttcaccttcggcatcgagagccacatcagccagagcaacatcaacggcaccctggtgccccccgccgccctgatcagcatcctgcagaagggcctgcagtacgtggaggccgagatcagcatcaacgaggacggcaccgtgttcgacggcagacccatcgagagcctgagcctgatcgacgccgtgatgcccgacgtggtgcagaccagacagcaggccttcagagagaagctggcccagcagcaggccagcgccgccgccgccgccgccgccgccaccgccgccgccaccgccgccaccaccaccagcgccggcgtgagccaccagaaccccagcaagaacagagaggccaccgtgaacggcgaggagaacagagcccacagcgtgaacaaccacgccaagcccatggagatcgacggcgaggtggagatccccagcagcaaggccaccgtgctgagaggccacgagagcgaggtgttcatctgcgcctggaaccccgtgagcgacctgctggccagcggcagcggcgacagcaccgccagaatctggaacctgaacgagaacagcaacggcggcagcacccagctggtgctgagacactgcatcagagagggcggccacgacgtgcccagcaacaaggacgtgaccagcctggactggaacaccaacggcaccctgctggccaccggcagctacgacggcttcgccagaatctggaccgaggacggcaacctggccagcaccctgggccagcacaagggccccatcttcgccctgaagtggaacagaaagggcaactacatcctgagcgccggcgtggacaagaccaccatcatctgggacgcccacaccggcgaggccaagcagcagttccccttccacagcgcccccgccctggacgtggactggcagaacaacaccaccttcgccagctgcagcaccgacatgtgcatccacgtgtgcagactgggctgcgacagacccgtgaagaccttccagggccacaccaacgaggtgaacgccatcaagtgggaccccagcggcatgctgctggccagctgcagcgacgacatgaccctgaagatctggagcatgaagcaggaggtgtgcatccacgacctgcaggcccacaacaaggagatctacaccatcaagtggagccccaccggccccgccaccagcaaccccaacagcaacatcatgctggccagcgccagcttcgacagcaccgtgagactgtgggacatcgagagaggcgtgtgcacccacaccctgaccaagcaccaggagcccgtgtacagcgtggccttcagccccgacggcaagtacctggccagcggcagcttcgacaagtgcgtgcacatctggaacacccagagcggcaacctggtgcacagctacagaggcaccggcggcatcttcgaggtgtgctggaacgccagaggcgacaaggtgggcgccagcgccagcgacggcagcgtgtgcgtgctggacctgagaaagtag

SEQ ID NO: 343035 - DNA, 228 bp, Artificial Sequence
  derived and/or modified sequence
atgagcatcaccagcgacgaggtgaacttcctggtgtacagatacctgcaggagagcggcttcagccacagcgccttcaccttcggcatcgagagccacatcagccagagcaacatcaacggcaccctggtgccccccgccgccctgatcagcatcctgcagaagggcctgcagtacgtggaggccgagatcagcatcaacgaggacggcaccgtgttcgacggctag

SEQ ID NO: 343036 - DNA, 1581 bp, Artificial Sequence
  derived and/or modified sequence
atgtcaatcacatcggatgaagtcaactttttagtgtaccggtacttgcaggagagcgggttttcccactccgcctttacatttggcatagagtcccacatcagtcaatcaaatattaatggcacgttggttccgcctgccgctctgatcagcatcctgcagaaaggtctgcaatatgttgaggccgaaatttcaataaacgaagatggaacagtgttcgacggccggcctatcgagtccctctcattaatcgatgccgtgatgccagacgtggtgcagacaagacagcaggcatttagggaaaagcttgcccaacagcaggcatccgctgcagctgcggccgcagctgctaccgctgcagcaacagcagccactaccacttccgcaggcgtgtctcaccagaatccatccaagaatcgtgaagcaaccgtaaacggagaagagaatcgggcacactcagttaacaatcatgcgaagcctatggagatcgatggagaggtggagattccgagctccaaagcaacggtgcttcgggggcacgagtcggaagtattcatttgtgcttggaacccagtgagcgacctgcttgcttcagggtccggtgattcaaccgcacgaatctggaatctaaacgagaacagcaatgggggaagtacccagctggttctgaggcattgtattagagaaggtggccacgacgtcccttcgaataaggatgtaactagcttagattggaataccaacggaacgctgctggccacaggctcatacgatggttttgccaggatctggactgaagatgggaacctggccagcacccttggccagcataaaggccccatcttcgcgctcaagtggaacagaaagggaaattatatcctcagcgcaggtgtggacaagacaacgattatatgggacgcacataccggggaggcgaagcagcagttcccatttcactcggcccctgccctcgatgtagattggcagaataacaccacattcgctagttgtagcacagacatgtgcattcacgtctgccgcctgggctgtgatcggcctgttaaaaccttccaaggccacaccaacgaagtaaacgccatcaaatgggatccttcaggtatgctgctggctagttgctccgacgacatgaccctgaaaatatggagtatgaaacaagaggtgtgcatacatgacctgcaagcccacaacaaggaaatctacaccatcaaatggtctccaaccgggcctgcaactagtaaccctaatagtaacataatgttggcctctgcttcattcgactccaccgttaggctctgggatattgagcggggcgtttgcacccacactttaaccaaacaccaagaaccggtctactccgtggctttctcccctgatggcaagtatttggcgagcggcagttttgataagtgtgtgcacatctggaacacacagtccggaaatctggtgcactcttaccggggcaccggagggatttttgaggtctgctggaacgcacggggagacaaagtgggagcctccgcctctgacggatctgtttgcgtgcttgacttaagaaaatag

SEQ ID NO: 343037 - DNA, 228 bp, Artificial Sequence
  derived and/or modified sequence
atgtccatcaccagcgatgaagtgaactttctagtctataggtacctgcaagagagcggtttttctcactcagcctttaccttcgggatcgaaagccatatcagtcaaagcaatatcaatggcactctcgtgccccctgctgcattaatctctattctgcagaaaggtctccagtatgtggaggctgagattagcatcaacgaagatggtactgtctttgacgggtag

SEQ ID NO: 343038 - DNA, 1581 bp, Artificial Sequence
  derived and/or modified sequence
atgtccattaccagcgacgaagttaatttcctagtgtaccggtatcttcaggagagtgggtttagccattctgcattcactttcgggatcgaatcccatatctcacagagtaatatcaacggaacgttggtaccgcctgctgctctgataagtatactccagaagggccttcaatatgtcgaggcagaaatttcaatcaacgaggatggcacagtattcgatggccgccctattgagtctctctccctgatcgatgccgtcatgcctgatgttgtacagacgcgacagcaggcctttcgagaaaagctcgcccaacagcaggcatctgccgcagccgcagcagctgccgccacagcagcagcgactgcagcaacgacaactagcgccggcgtcagccatcagaacccaagcaagaatagggaagcaactgtgaacggtgaggagaatcgggcccattcagtgaacaatcatgctaagcccatggagatagacggcgaggttgaaatcccaagcagtaaggccactgttctgcggggccatgaaagcgaggtctttatctgtgcctggaatccagtgtccgacttactggccagcggatccggcgacagcacagctcgcatttggaatctgaacgaaaattcgaatggcgggtccactcaactggtgcttagacattgtatccgagagggtggccacgacgtgccaagcaataaggatgtgactagcttggattggaacaccaacggcaccttgctcgccacgggcagctatgatggcttcgcacggatatggacggaagacggcaacctcgcatcgactctgggtcaacacaaaggcccaatcttcgcactcaagtggaaccgtaaaggtaactacattctctctgcgggcgtggataagactaccattatttgggatgcacacaccggggaggccaaacaacagttccccttccacagcgcccctgcactcgatgtcgactggcagaacaacacaacttttgcttcttgctcaacagatatgtgcattcatgtgtgccgcctgggctgcgatcgccccgtgaagacgttccagggacacaccaacgaggttaatgccatcaaatgggacccctctggtatgctgttggcctcctgttcagacgacatgacactgaaaatttggtcgatgaaacaggaagtttgtatacacgatcttcaggcccataacaaggaaatctacaccatcaagtggagtcctacaggaccagccacctccaacccgaactccaacattatgttagccagtgctagctttgattcaaccgtccggttatgggatatcgagcgaggcgtgtgcactcacacactgaccaaacaccaggagcccgtgtatagcgtggcattcagccctgatgggaaatacctggccagcggcagttttgacaagtgtgtgcacatctggaatacccagagcggaaacctcgtacactcttatagaggcactggaggaattttcgaagtctgttggaacgctcgtggagacaaagttggcgccagcgcgtccgacggctccgtctgtgtgttggatcttagaaaatag

SEQ ID NO: 343039 - DNA, 1581 bp, Artificial Sequence
  derived and/or modified sequence
atgtctatcacttctgacgaggtgaactttctcgtctaccgctacttacaggagtccggctttagtcacagtgcctttacctttggcatagagtcccatatttctcagagcaatataaatggcacgcttgtccccccagcagctttaataagtattttgcagaaggggctgcagtacgtagaagctgaaatctccatcaatgaagacgggactgtgtttgatggaaggccaattgaaagcttatcactcattgatgccgtgatgcctgatgtcgtgcagaccagacagcaggcgttcagggagaagctggctcagcagcaagcatccgcggctgccgctgcggctgccgctaccgcagctgctacagcggctactaccactagtgctggcgtgtcccatcagaacccaagtaaaaatagggaggccacagttaatggcgaggaaaaccgcgcccactctgtcaacaaccatgccaagccaatggagatcgacggggaggtggagattccatcttccaaggccaccgtactcagaggacatgagagtgaagtgtttatttgcgcatggaaccccgtttccgacctgctggcttccggtagtggggactccacagcccgtatttggaacttgaacgagaattccaatggtggcagcacacaacttgtgctgcgccattgtatccgcgagggaggtcacgatgtcccatcgaataaggatgtgaccagcctcgattggaatacaaatggcactctacttgcgacaggaagttacgatgggttcgcaaggatctggactgaggatgggaacctggctagcacgctgggacaacacaaggggcctatttttgcccttaaatggaaccggaaagggaattacattctttctgcaggtgtagacaagacaactatcatttgggatgctcacaccggagaggcaaagcagcagttcccattccatagtgctcctgcgttggatgtggattggcagaacaacaccacctttgcatcttgttccacggatatgtgtatccatgtgtgtcgtcttggttgcgacagacctgtgaaaactttccaggggcatacaaatgaggtgaacgcgatcaagtgggatcctagcgggatgctcctggcgtcctgctcagacgacatgacattgaagatatggtcaatgaagcaggaggtgtgcattcacgacctgcaggcccataacaaagaaatctatacaataaagtggtcccccaccggtccggcaacgtctaaccccaattcaaatataatgttagcctccgcttcgttcgacagtactgttagattatgggacatagaaaggggggtgtgcacgcacacactgaccaaacatcaggaaccagtgtacagcgtcgccttttcccccgacggcaaatatctggcatccggatcttttgataagtgcgtacatatctggaacacccaatcaggaaacctcgtgcactcctatcgcggtacagggggtatattcgaggtctgctggaacgctcggggagacaaggttggtgcttcagcttccgatgggtctgtctgcgtgcttgatctcaggaagtag

SEQ ID NO: 343040 - DNA, 1581 bp, Artificial Sequence
  derived and/or modified sequence
atgagcatcaccagtgatgaggtgaacttcctggtgtaccgctacctgcaggagagcggcttcagccacagcgccttcaccttcggcatcgagagccacatcagccagagcaacatcaatggcaccctggtgcccccagctgccctgatcagcatcctgcagaagggcctgcagtatgtggaggccgagatcagcatcaatgaagatggcaccgtgtttgatggccggcccatcgagagcctgagcctgattgatgctgtgatgccagatgtggtgcagacccggcagcaggccttccgggagaagctggcccagcagcaggccagcgctgctgctgctgctgctgctgccacagctgctgccacagctgccaccaccaccagcgctggggtgagccaccagaaccccagcaagaaccgggaggccaccgtgaatggagaggagaacagagcccacagcgtgaacaaccacgccaagcccatggagattgatggagaggtggagatccccagcagcaaggccaccgtgctgcggggccacgagagcgaggtgttcatctgtgcctggaaccctgtgtctgacctgctggccagcggcagcggggacagcacagcccgcatctggaacctgaatgaaaacagcaatggaggcagcacccagctggtgctgcggcactgcatccgggagggcggccatgatgtgcccagcaacaaggatgtgaccagcctggactggaacaccaacggcaccctgctggccaccggcagctatgatggctttgcccgcatctggacagaagatggcaacctggccagcaccctgggccagcacaagggccccatctttgccctgaagtggaacagaaaaggaaactacatcctgtctgctggggtggacaagaccaccatcatctgggatgcccacactggagaggccaagcagcagttccccttccacagcgccccagccctggatgtggactggcagaacaacaccacctttgccagctgcagcacagacatgtgcatccacgtgtgccgcctgggctgtgacaggcctgtgaagaccttccagggccacaccaatgaggtgaatgccatcaagtgggaccccagcggcatgctgctggccagctgcagtgatgacatgaccctgaagatctggagcatgaagcaggaggtgtgcatccatgacctgcaggcccacaacaaggagatctacaccatcaagtggagccccaccggccctgccaccagcaaccccaacagcaacatcatgctggccagcgccagctttgacagcacagtgcggctgtgggacatcgagcggggcgtgtgcacccacaccctgaccaagcaccaggagcctgtgtacagcgtggccttctccccagatggcaagtacctggccagcggcagctttgacaagtgtgtgcacatctggaacacccagagcggcaacctggtgcacagctaccggggcactggaggcatctttgaggtgtgctggaatgcccggggggacaaggtgggcgccagcgccagtgatggctctgtgtgtgtgctggacctgaggaagtag

SEQ ID NO: 343041 - DNA, 228 bp, Artificial Sequence
  derived and/or modified sequence
atgagcatcaccagtgatgaggtgaacttcctggtgtaccgctacctgcaggagagcggcttcagccacagcgccttcaccttcggcatcgagagccacatcagccagagcaacatcaatggcaccctggtgcccccagctgccctgatcagcatcctgcagaagggcctgcagtatgtggaggccgagatcagcatcaatgaagatggcaccgtgtttgatggatag

SEQ ID NO: 343042 - DNA, 1581 bp, Artificial Sequence
  derived and/or modified sequence
atgagcatcaccagcgacgaggtgaacttcctggtgtaccggtaccttcaggagtccgggttcagccattctgcttttacctttggcatcgaatcccatatctcacaaagtaacatcaacggcactttggttcctccagccgcccttatctctattctgcaaaaaggcctacagtatgtggaggccgagatcagcatcaacgaagacgggacagtcttcgacgggagaccgattgagagtctgagcctgatcgacgctgttatgcccgatgtggtccagacaagacaacaggcatttcgggaaaagctcgcccagcagcaggcctctgcagccgccgccgctgctgcggccacagccgcagcaactgcagcgacaacaacttcggccggcgtatcacatcagaaccccagtaagaaccgggaagccaccgttaatggagaagaaaaccgagcacacagtgtgaataatcacgcaaagcctatggagatagatggcgaagttgagatcccctcatcaaaagctactgtactccgcgggcacgaatcggaagtgttcatctgcgcctggaatccagtgtccgatctgttagcgagcgggagcggagactccacggcccggatctggaaccttaacgagaatagcaacgggggctccacccagcttgtactgagacattgcatcagagaggggggccatgatgttccgtctaataaggatgtgactagcctcgattggaatacaaacggcactctcctggcgactggatcttatgacggctttgcccgaatttggactgaggatgggaacctggcttccactctggggcaacataaaggccccatattcgcactcaagtggaatcgcaaggggaattatattctctcagccggcgtggataaaactactattatatgggatgctcatacaggtgaggcaaagcagcagttccctttccattcggccccagctctggacgtagattggcagaataacaccacatttgctagctgcagtacagatatgtgcatacacgtgtgtcgtttgggctgtgaccgccccgttaagacttttcagggtcacacaaatgaagtcaatgctattaagtgggacccctcaggcatgttactggcatcctgctctgatgacatgactctgaagatctggtcaatgaaacaggaagtttgcatccacgatctccaagctcacaacaaggaaatatatacaatcaagtggagtcccaccggtcccgccacttcaaatccgaattcgaacattatgttggcttctgcctcattcgactccaccgtccgattgtgggatatcgaaagaggagtctgcacacacactctgactaagcatcaggaacctgtctattcagtggcattcagcccagacggtaaatacctcgccagcggatcatttgacaagtgcgtccacatttggaatactcagagcgggaacttagttcactcctataggggtaccggtggcatatttgaggtgtgttggaatgctagaggcgataaagtgggcgcttccgcaagcgacggatcagtgtgtgtgctggatttacggaagtag

SEQ ID NO: 343043 - DNA, 228 bp, Artificial Sequence
  derived and/or modified sequence
atgagcatcaccagcgacgaggtgaacttcctggtgtaccggtaccttcaggagtctgggttctctcactcagctttcaccttcgggatcgagtctcacatctcacagagcaacattaacggcacactggtcccgcctgctgcgttgatttcgatcctgcagaaaggcctacagtatgtggaggcagagataagtatcaacgaggatggtaccgtgttcgatggctag

SEQ ID NO: 343044 - DNA, 1581 bp, Artificial Sequence
  derived and/or modified sequence
atgagcatcaccagcgacgaggtgaacttcctggtgtaccggtacctgcaggaatccgggtttagccacagcgcttttactttcgggatcgaaagccacatctcccagagcaatattaatggaacacttgtcccaccagcagccttgataagcatactgcagaaaggactgcagtacgtggaggcagagattagcatcaacgaggatggtacggtgtttgacggtcgacccatagaaagcttgagtcttatcgatgcggtcatgccggacgtcgtccagactcgtcaacaggcattccgtgagaaattggcacagcagcaggccagtgcggccgctgccgccgctgccgctacagcggctgccactgcagcgacaacaaccagcgctggggtgtcccaccagaatccctcaaaaaatcgggaggccaccgtcaatggcgaagagaaccgggctcactctgttaacaatcatgctaagcccatggaaatcgatggagaggtggaaatccccagctccaaggccacagtgctgcgtgggcacgagagtgaagtgtttatatgtgcatggaatcccgtaagcgatctcttggcatccgggagcggagactctacagcgcgaatctggaatctgaacgagaattccaacggggggtccacacagctggtattacggcattgcatacgggaaggtggacacgatgtgccctctaataaagatgtcactagcttagactggaatactaatggaacactgctggccaccggtagctacgacggctttgcacgcatttggaccgaagacggaaatcttgcttccaccctcgggcagcacaagggtcctatttttgccctgaagtggaataggaagggcaactacattctgtcggcaggcgtggacaagacaacaatcatctgggacgcccatactggcgaagcaaagcagcagtttccatttcacagcgcgccagctttagatgtcgattggcagaacaacaccacattcgctagttgcagcactgacatgtgtatccacgtatgcagattgggatgtgatcgacctgtgaagacttttcagggacatacaaacgaagttaacgccattaagtgggatccatcaggcatgttacttgcatcctgtagtgacgatatgactcttaagatctggagcatgaaacaagaggtctgtatacatgacctgcaagctcacaacaaggagatttacaccattaagtggagccccactggccccgctacttctaatccaaattccaacattatgctcgcttccgcatcatttgactctactgttaggctttgggacatcgaacggggcgtatgcacgcacacgctgaccaaacatcaggagccggtgtatagcgtcgcattctcccccgatggcaaatatctcgctagcggtagctttgacaagtgtgtgcatatttggaatacgcagtccggaaacctggtgcactcttatcggggcaccggtggaatattcgaggtgtgctggaacgcacgcggcgataaggttggggcctcagcctcagacggcagcgtgtgcgttctcgacctccgaaaatag

SEQ ID NO: 343045 - DNA, 1581 bp, Artificial Sequence
  derived and/or modified sequence
atgagcatcaccagcgacgaggtgaacttcctggtgtaccggtacctgcaggagtctggctttagccacagcgcttttactttcggaatcgaatcacacatatctcaatcaaatataaatgggaccctggtccccccagccgccctgattagcatcctgcagaagggactccagtatgtcgaagcggaaatctctattaatgaggatggaaccgtgttcgatggcaggcctatcgagagtctctcactgatagacgctgtgatgcccgatgtggtgcaaactaggcagcaagcattcagagagaaactcgcacagcagcaggccagcgccgccgctgccgccgccgctgcaacagctgctgcaacggctgccaccacaacatccgctggcgtttcccatcaaaaccccagtaagaaccgggaagcaacagtcaatggggaggagaatcgcgctcatagcgtgaacaaccacgccaagccaatggaaatcgacggcgaggtggagatcccaagtagcaaggcaaccgtcttgcgagggcacgaatccgaagtgttcatatgtgcttggaacccagtgtctgacctattagcttccggcagcggggattcaactgcacgaatatggaatttaaatgaaaattccaatggagggagcacgcagctggtcctgaggcattgcattcgggaagggggccatgacgtgccatccaataaggacgttacttccttagattggaacacaaacggcacactgctcgctactggatcatatgacggcttcgccaggatttggacagaggatggcaacctggctagcaccctgggacagcacaagggtccgattttcgccctgaaatggaatcgaaaaggcaattatatcctgtcagccggcgttgacaagaccactatcatatgggatgcccatactggggaggcaaaacagcagttccctttccacagcgcccccgcactggacgtcgactggcagaataatactactttcgctagctgttcgactgacatgtgcatacacgtgtgtcgtcttggatgcgaccggcctgtgaagacatttcagggccacaccaatgaggttaatgcaatcaagtgggacccctctggcatgctcctggccagttgctccgatgacatgaccctgaagatctggagtatgaaacaggaggtctgtatccacgacctacaggcccataacaaagagatttacacgataaaatggagcccaactggcccagccactagtaacccaaactcaaacattatgcttgcctccgccagttttgacagtacagtccgcctgtgggatatcgaaaggggagtctgtacgcatacattgactaagcaccaggaacccgtctacagcgtggccttcagccccgatggaaagtatttggccagcgggagcttcgacaagtgcgttcatatctggaatacacagtcaggaaatctcgtgcattcataccgtgggaccggcggaatctttgaggtgtgctggaacgccaggggagacaaggtgggagcatcagcgtcagacgggtctgtatgcgtgctggatcttagaaaatag

SEQ ID NO: 343046 - DNA, 1581 bp, Artificial Sequence
  derived and/or modified sequence
atgagcattaccagcgatgaggttaacttcctcgtctacagatacttacaggaaagcgggttctctcactcagctttcacttttggcatagaatcacatatctctcagagcaatattaacggtacccttgtgccacccgctgctcttatctcaatcctccagaagggactgcagtatgtagaagcagagatctctattaatgaggacggaactgtgttcgatgggaggccaatagagagcctatctttaattgatgcagtgatgccagacgtggtacagaccagacagcaggcctttcgtgagaaactggcccagcagcaagccagcgccgcagcagccgcagctgcagccacagctgccgcaacagctgcaaccactaccagcgccggtgttagtcatcagaatccatctaagaatcgcgaagctaccgtcaacggtgaagagaacagggcccattcggtcaataaccacgccaagcccatggagatcgacggcgaagtcgaaatcccatcctcaaaagccactgtgctcaggggacacgagagcgaggtttttatttgtgcttggaatccagtgagtgatctgctcgccagcggctctggcgactctactgcacggatctggaacctgaatgaaaattctaacgggggaagtacccagttggtgcttcggcactgcattcgagagggtgggcacgacgtaccgtccaataaggatgtgacaagcttagattggaacacaaatggaacgctgctggcaaccgggagctatgatggtttcgccagaatttggacagaggacggaaacctggccagcaccctgggtcagcacaaagggccaattttcgccctgaagtggaatcggaagggtaactatattctgagtgctggggtggacaagactacaatcatttgggacgctcacacaggcgaggccaagcaacagttcccctttcacagcgcccctgctctggatgttgattggcagaataatactactttcgctagttgcagtactgacatgtgcatccacgtatgtcgcttagggtgcgatcgccctgtaaaaacctttcagggccacaccaacgaggtgaacgccataaaatgggatccttcaggtatgctgctggcgtcatgttcggatgacatgactctgaaaatttggagtatgaagcaggaagtgtgcatacacgatttgcaggctcataataaagagatctatacaataaagtggagccctaccggccctgcaacatccaaccctaattctaatattatgctggcaagcgcttcctttgactctaccgtccgcctctgggatatcgagcgcggtgtttgtacccacaccctcactaagcaccaggagcctgtgtacagcgtggctttttcacctgacggcaagtacctcgcttccggctcgttcgataaatgtgtgcacatctggaacacacaatctggaaacctagtccacagttaccgcggaactggtggtattttcgaggtttgctggaatgctagaggggataaagtgggggcttccgcttctgacggcagcgtgtgtgtcctcgacctcaggaaatag

SEQ ID NO: 343047 - DNA, 228 bp, Artificial Sequence
  derived and/or modified sequence
atgtcaatcacctctgacgaggtaaactttctggtctatcggtatcttcaagaatcaggattttcacatagtgccttcacatttggtatcgaatcacacatctctcaaagcaacatcaatggtaccctcgttcccccagccgcactcatcagtattcttcagaagggactgcagtatgttgaagcagagattagcatcaacgaggacggaacagtgtttgacggctag

SEQ ID NO: 343048 - DNA, 1581 bp, Artificial Sequence
  derived and/or modified sequence
atgtccatcacaagcgatgaggtgaatttccttgtgtaccgctatctccaagagtccggcttctcacacagcgcttttacattcggcatcgagtcccacatttctcaatcaaacattaatgggactctcgtgcccccagccgcacttatctctatcctgcagaagggcctgcaatacgtcgaagctgagatttccattaacgaagacgggaccgtatttgatgggaggcccattgagtccctgtcactgatcgatgctgttatgccagacgtcgtccagactaggcaacaggctttcagagaaaaactggcacagcaacaggccagcgccgctgccgctgcagccgcagctaccgccgcagcaacggccgcaacgacaacctccgctggcgtttctcaccagaatccctctaagaaccgtgaagccacggtgaacggggaggaaaatagggcccattcagtgaacaatcatgccaagcccatggaaattgacggagaagtggaaatccctagtagcaaggctactgtactgcggggtcacgaatctgaggtgtttatttgcgcctggaacccagtgtccgatcttttggcaagcggctctggggattctacagcaaggatatggaatctgaatgagaactccaatggaggcagcacccagctggtgctccgacactgcattagggagggaggccacgacgtcccatctaacaaagatgtgacatcccttgactggaataccaatggcacactgttggcaaccggctcttacgacggctttgcccgtatctggaccgaagatggaaatctggctagcacacttggacaacataaaggcccaatctttgcactgaagtggaatcgcaaaggaaattatatcctttcagccggagtagacaagaccactattatttgggacgcccatacaggagaggccaagcagcagttcccatttcactccgctcctgccctggatgttgattggcagaacaataccaccttcgcctcttgctctaccgatatgtgtatacatgtgtgtaggctgggctgcgataggcctgtgaagacctttcagggccacaccaacgaagtcaacgccattaagtgggacccttctggtatgctcctagcttcctgctctgacgatatgacgctcaagatatggagcatgaagcaagaggtctgcattcatgacctgcaggcacataataaagaaatctatacaatcaaatggagtcccacaggccctgccacgtctaatcccaattctaatatcatgctggcatcagccagcttcgactcaaccgtgcgactctgggatatagaacgaggtgtgtgcactcacaccttaacaaagcatcaggaacctgtttatagcgtggccttttctcccgacggcaaatacctggcgagtggttcatttgataagtgtgttcatatctggaatactcagtccggcaacctggtgcacagttaccgaggcactggaggcattttcgaggtgtgttggaacgctagaggagataaggtcggcgctagtgctagcgatggctctgtatgcgttctggatctccggaagtag

SEQ ID NO: 343049 - DNA, 1581 bp, Artificial Sequence
  derived and/or modified sequence
atgtccataactagcgatgaggtaaactttctcgtgtatcgttatctccaagagagtggtttcagccactcggcttttactttcgggatcgaaagccacatctcgcagtcgaacataaatgggacccttgtgcccccagcggctttgatctcaatcctgcagaaggggctccaatacgtcgaagccgaaatctccatcaatgaggacggaaccgttttcgacggtaggccaatcgagagcctttcactcattgatgccgtgatgcctgatgtggtgcagactaggcagcaggcattccgggaaaagctggctcagcagcaggcgtccgccgctgccgcagccgcagccgcaacagccgctgctacggccgctacgacaactagtgccggtgtgagtcatcagaacccctcgaagaaccgcgaggctaccgtcaacggcgaggagaatagggcacatagcgtgaacaaccacgctaaaccgatggaaatcgatggagaagtagagatcccgtcatcaaaagccacagtattgcggggtcacgagtcagaagtgttcatatgcgcatggaacccagtcagcgatttgctggcctcaggatccggagattccaccgctcgaatttggaatctgaacgagaacagcaatggcggtagcacccagctggtgcttcggcactgcattagggagggtggacatgatgtgccttccaacaaagatgtgacatctctcgactggaacacaaatggaactctgctggctacagggagttacgacggatttgctcgtatttggactgaggacggcaacctcgcctccaccttgggccagcacaagggtcccattttcgccctaaaatggaaccgcaaaggcaactacattctgtctgccggagtcgacaaaaccaccattatctgggatgcccacacaggggaagctaagcagcaatttcctttccacagcgcgccagccctcgatgttgactggcagaataatactacattcgctagctgcagtactgatatgtgtattcatgtatgtagactcggctgtgaccgtcccgtgaagactttccagggccacaccaacgaggttaacgccattaagtgggatccaagtggcatgctcctcgcctcgtgtagcgatgatatgacccttaagatttggagcatgaaacaggaggtctgcatacacgatcttcaggcccataataaggaaatctacaccattaaatggtctcctactggccctgccactagcaatcccaacagcaacattatgcttgcttcagcctctttcgacagtactgttaggctgtgggacattgaaaggggagtttgcacgcatacgctgaccaagcaccaggagcccgtatattccgtagctttttcacctgacggcaagtatctggcgagcggatcttttgataaatgtgttcacatatggaacactcagagcggaaatttggtgcattcttatcgtggcacagggggaatttttgaggtgtgttggaatgcacgaggcgataaggtgggggctagcgcaagcgacggaagcgtatgtgtcctggatctgagaaaatag

SEQ ID NO: 343050 - DNA, 894 bp, Artificial Sequence
  derived and/or modified sequence
tcaacaacaggagggtggagaggccgggtctcacaatccgcttggctggggagtccactgaggttcttgcatcctgaagcaaaccatggagagctggtggggacttccctgtcttgcgttcctgtgttttctaatgcacgcccgaggctggctgtcccagatccaagattagatttttcagttccgtacgaggacctctttaagaaactccaatgaactcataaagtacaggatttgaacaacggttgagtcaaagagactttgatttggcagatgcccttgatgaccctgaacccaccaagaagccaaactcagatatctacccaaagccaaaaccaccttactacccacagcccgagaatcccgacagcggtggaaatatctacccaaggccaaagccacgccctcaaccccagcctggcaattccggcaacagtggaggtagttacttcaatgatgtggaccgtgatgacggacgctacccgcccaggcccaggccacggccgcctgcaggaggtggcggcggtggctactccagttatggcaactccgacaacacgcacggtggagatcaccattcaacgtatggcaatccagaaggcaatatggtagcaaaaatcgtgtctcccatcgtatccgtggtggtggtgacactgctgggagcagcagccagttatttcaaactaaacaataggagaaattgtttcaggacccatgaaccagaaaatgtctgaagatgttaagatcccctgattactttgagaaaaacaactaaaacaagaaccgtgtttatcactgttgtggagatttccttttattcttgacacaatttgatgacctaaagtgtgttttcttctgtgtaaagtacatgagctgcctcactaagcattccca

SEQ ID NO: 343051 - protein, 576 aa, Artificial Sequence
  derived and/or modified sequence
MTMDTESEIDPCKVDGTCPEVIKVYIFKADPGEDDLGGTVDIVESEPENDHGVELLDQNSSIRVPREKMVYMTVNDSQPEDEDLNVAEIADEVYMEVIVGEEDAAAAAAAAAVHEQQMDDNEIKTFMPIAWAAAYGNNSDGIENRNGTASALLHIDESAGLGRLAKQKPKKRRRPDSRQYQTAIIIGPDGHPLTVYPCMICGKKFKSRGFLKRHMKNHPEHLAKKKYRCTDCDYTTNKKISLHNHLESHKLTSKAEKAIECDECGKHFSHAGALFTHKMVHKEKGANKMHKCKFCEYETAEQGLLNRHLLAVHSKNFPHICVECGKGFRHPSELKKHMRIHTGEKPYQCQYCEYRSADSSNLKTHVKTKHSKEMPFKCDICLLTFSDTKEVQQHALIHQESKTHQCLHCDHKSSNSSDLKRHIISVHTKDYPHKCDMCDKGFHRPSELKKHVAAHKGKKMHQCRHCDFKIADPFVLSRHILSVHTKDLPFRCKRCRKGFRQQSELKKHMKTHSGRKVYQCEYCEYSTTDASGFKRHVISIHTKDYPHRCEYCKKGFRRPSEKNQHIMRHHKEVGLP

SEQ ID NO: 343052 - protein, 844 aa, Artificial Sequence
  derived and/or modified sequence
MDEDGLELQQEPNSFFDATDRVSFCHPGWSTVAPSGSTATSASQAQVICSASRVTGATGADGTHMDGDQIVVEVQETVFVSDVVDSDITVHNFVPDDPDSVVIQDVIEDVVIEDVQCPDIMEEADVSETVIIPEQVLDSDVTEEVSLAHCTVPDDVLASDITSASMSMPEHVLTGDSIHVSDVGHVGHVGHVEHVVHDSVVEAEIVTDPLTTDVVSEEVLVADCASEAVIDANGIPVDQQDDDKGNCEDYLMISLDDAGKIEHDGSSGMTMDTESEIDPCKVDGTCPEVIKVYIFKADPGEDDLGGTVDIVESEPENDHGVELLDQNSSIRVPREKMVYMTVNDSQPEDEDLNVAEIADEVYMEVIVGEEDAAAAAAAAAVHEQQMDDNEIKTFMPIAWAAAYGNNSDGIENRNGTASALLHIDESAGLGRLAKQKPKKRRRPDSRQYQTAIIIGPDGHPLTVYPCMICGKKFKSRGFLKRHMKNHPEHLAKKKYRCTDCDYTTNKKISLHNHLESHKLTSKAEKAIECDECGKHFSHAGALFTHKMVHKEKGANKMHKCKFCEYETAEQGLLNRHLLAVHSKNFPHICVECGKGFRHPSELKKHMRIHTGEKPYQCQYCEYRSADSSNLKTHVKTKHSKEMPFKCDICLLTFSDTKEVQQHALIHQESKTHQCLHCDHKSSNSSDLKRHIISVHTKDYPHKCDMCDKGFHRPSELKKHVAAHKGKKMHQCRHCDFKIADPFVLSRHILSVHTKDLPFRCKRCRKGFRQQSELKKHMKTHSGRKVYQCEYCEYSTTDASGFKRHVISIHTKDYPHRCEYCKKGFRRPSEKNQHIMRHHKEVGLP

SEQ ID NO: 343053 - DNA, 2535 bp, Artificial Sequence
  derived and/or modified sequence
atggacgaggacggcctggagctgcagcaggagcccaacagcttcttcgacgccaccgacagagtgagcttctgccaccccggctggagcaccgtggcccccagcggcagcaccgccaccagcgccagccaggcccaggtgatctgcagcgccagcagagtgaccggcgccaccggcgccgacggcacccacatggacggcgaccagatcgtggtggaggtgcaggagaccgtgttcgtgagcgacgtggtggacagcgacatcaccgtgcacaacttcgtgcccgacgaccccgacagcgtggtgatccaggacgtgatcgaggacgtggtgatcgaggacgtgcagtgccccgacatcatggaggaggccgacgtgagcgagaccgtgatcatccccgagcaggtgctggacagcgacgtgaccgaggaggtgagcctggcccactgcaccgtgcccgacgacgtgctggccagcgacatcaccagcgccagcatgagcatgcccgagcacgtgctgaccggcgacagcatccacgtgagcgacgtgggccacgtgggccacgtgggccacgtggagcacgtggtgcacgacagcgtggtggaggccgagatcgtgaccgaccccctgaccaccgacgtggtgagcgaggaggtgctggtggccgactgcgccagcgaggccgtgatcgacgccaacggcatccccgtggaccagcaggacgacgacaagggcaactgcgaggactacctgatgatcagcctggacgacgccggcaagatcgagcacgacggcagcagcggcatgaccatggacaccgagagcgagatcgacccctgcaaggtggacggcacctgccccgaggtgatcaaggtgtacatcttcaaggccgaccccggcgaggacgacctgggcggcaccgtggacatcgtggagagcgagcccgagaacgaccacggcgtggagctgctggaccagaacagcagcatcagagtgcccagagagaagatggtgtacatgaccgtgaacgacagccagcccgaggacgaggacctgaacgtggccgagatcgccgacgaggtgtacatggaggtgatcgtgggcgaggaggacgccgccgccgccgccgccgccgccgccgtgcacgagcagcagatggacgacaacgagatcaagaccttcatgcccatcgcctgggccgccgcctacggcaacaacagcgacggcatcgagaacagaaacggcaccgccagcgccctgctgcacatcgacgagagcgccggcctgggcagactggccaagcagaagcccaagaagagaagaagacccgacagcagacagtaccagaccgccatcatcatcggccccgacggccaccccctgaccgtgtacccctgcatgatctgcggcaagaagttcaagagcagaggcttcctgaagagacacatgaagaaccaccccgagcacctggccaagaagaagtacagatgcaccgactgcgactacaccaccaacaagaagatcagcctgcacaaccacctggagagccacaagctgaccagcaaggccgagaaggccatcgagtgcgacgagtgcggcaagcacttcagccacgccggcgccctgttcacccacaagatggtgcacaaggagaagggcgccaacaagatgcacaagtgcaagttctgcgagtacgagaccgccgagcagggcctgctgaacagacacctgctggccgtgcacagcaagaacttcccccacatctgcgtggagtgcggcaagggcttcagacaccccagcgagctgaagaagcacatgagaatccacaccggcgagaagccctaccagtgccagtactgcgagtacagaagcgccgacagcagcaacctgaagacccacgtgaagaccaagcacagcaaggagatgcccttcaagtgcgacatctgcctgctgaccttcagcgacaccaaggaggtgcagcagcacgccctgatccaccaggagagcaagacccaccagtgcctgcactgcgaccacaagagcagcaacagcagcgacctgaagagacacatcatcagcgtgcacaccaaggactacccccacaagtgcgacatgtgcgacaagggcttccacagacccagcgagctgaagaagcacgtggccgcccacaagggcaagaagatgcaccagtgcagacactgcgacttcaagatcgccgaccccttcgtgctgagcagacacatcctgagcgtgcacaccaaggacctgcccttcagatgcaagagatgcagaaagggcttcagacagcagagcgagctgaagaagcacatgaagacccacagcggcagaaaggtgtaccagtgcgagtactgcgagtacagcaccaccgacgccagcggcttcaagagacacgtgatcagcatccacaccaaggactacccccacagatgcgagtactgcaagaagggcttcagaagacccagcgagaagaaccagcacatcatgagacaccacaaggaggtgggcctgccctag

SEQ ID NO: 343054 - DNA, 2535 bp, Artificial Sequence
  derived and/or modified sequence
atggacgaggacggactggaactacagcaggagcccaacagctttttcgatgccaccgatcgggtgagcttctgccatcccgggtggtccaccgtggctccctccggaagcactgctacgtccgccagtcaggcccaggtgatttgctctgcgagccgcgttaccggagcaaccggagctgatggaacacacatggacggcgatcagatcgtcgtggaggtccaggagacagtgttcgtgagtgatgtcgttgactccgacataaccgtgcacaacttcgttcccgacgacccagacagcgtggtgatccaggacgtcatagaggacgtcgtgatcgaggacgttcaatgtcctgacattatggaggaggcggatgtgagcgagactgtgatcatccccgagcaggttcttgacagcgacgtaacagaagaggtttcactcgcacattgcaccgttcccgatgacgtgctcgccagcgatataacctcagcaagtatgtctatgcccgagcatgtgctgacaggggactcaatccatgtcagcgacgtcggccatgttggtcatgtcggtcacgtagaacacgttgtgcacgattctgtagtggaagccgagatcgtaaccgatcccttgaccaccgacgtagtttccgaagaggtgcttgtggcagattgcgcgtcagaagcagtaattgatgcaaatgggatccctgtagatcagcaggatgatgataaaggaaattgtgaggattatctgatgatttctctggacgacgctggcaaaattgagcatgacgggagttccgggatgactatggatacagagtcagaaattgacccttgcaaagtggatgggacatgccctgaggtgatcaaggtttatatttttaaggcagatccgggagaagatgatctcgggggaactgtggacatcgtggaaagcgagcccgagaacgaccacggtgtggaactgcttgaccagaatagttctattcgcgttccaagggagaaaatggtgtatatgacagtgaacgacagccagcccgaggacgaagatctcaacgtcgcagagatagcagacgaagtttatatggaagtcattgtgggggaagaggacgcggcagccgctgctgccgccgcagccgtgcacgagcagcaaatggatgataacgaaatcaaaaccttcatgcctatcgcttgggctgcggcatacggcaataattcagatggcattgagaataggaatggaaccgcgtccgccctcctgcatattgacgaaagcgcaggtcttgggagactggccaaacagaagccaaagaagaggagacggcctgattctaggcagtaccagactgcaatcatcatcggccctgacggccatcccctgacggtctacccttgtatgatctgcgggaagaaatttaagagccgagggtttcttaagaggcatatgaagaaccatccagagcatcttgccaagaagaaataccggtgcactgactgcgactacacaactaacaaaaagatttcgttgcacaatcacctggagtcccataagttaactagcaaggcggaaaaagcaatcgaatgtgatgaatgtgggaagcacttttctcatgcaggagccctgttcacgcacaagatggttcacaaagagaaaggcgcaaataagatgcataagtgcaaattttgcgaatacgaaacagccgagcagggtctgcttaatcgacatctgctcgccgtgcacagtaagaacttcccccatatttgcgtggagtgcggtaaaggcttccggcacccttccgaattgaaaaaacacatgagaatccatactggcgagaagccatatcaatgccaatactgcgagtaccgcagcgcagattcgtccaatctgaaaacacacgtcaagacgaaacacagcaaagagatgccctttaagtgcgatatctgtctgttaactttttctgatacaaaagaagttcagcagcatgccttgatccatcaggagtctaaaacacatcagtgtctgcactgcgatcacaaatcctccaactcatccgaccttaagagacacatcatttccgttcatacaaaggattacccccataagtgcgatatgtgcgacaaaggctttcaccgtccttctgagctaaaaaagcatgtggctgcacacaaggggaaaaaaatgcaccagtgtagacattgcgactttaaaatcgccgatccattcgttttgagtcgacatatcctgtctgtgcacacaaaagatctgcccttcaggtgcaagcgttgtagaaaaggcttcaggcagcaatcagaactcaaaaagcatatgaagacacatagcggcagaaaagtgtatcagtgcgaatactgcgagtactctacaaccgatgcatctgggtttaagcggcacgtgatttccatccacaccaaagattatccccatcgctgcgagtattgtaagaagggcttcagacgtccatctgagaagaaccagcacattatgagacaccacaaggaagtcggactaccttag

SEQ ID NO: 343055 - DNA, 2535 bp, Artificial Sequence
  derived and/or modified sequence
atggatgaagatggcctggagctgcagcaggagcccaacagcttctttgatgccacagacagagtgtccttctgccaccctggctggagcacagtggcccccagcggcagcacagccaccagcgccagccaggcccaggtgatctgcagcgccagccgggtgactggagccaccggggctgatggcacccacatggatggagaccagatcgtggtggaggtgcaggagaccgtgtttgtgtctgatgtggtggacagcgacatcaccgtgcacaactttgtgcctgatgatcctgacagcgtggtgatccaggatgtgattgaagatgtggtgattgaagatgtgcagtgcccagacatcatggaggaggctgatgtgtctgaaacagtcatcatccctgagcaggtgctggacagtgatgtgacagaggaggtgtccctggcccactgcaccgtgcctgatgatgtgctggccagtgacatcaccagcgcctccatgtccatgcctgagcacgtgctgaccggggacagcatccacgtgtctgatgtgggccacgtgggccacgtgggccacgtggagcacgtggtgcatgattctgtggtggaggccgagatcgtgacagaccccctgaccacagatgtggtgtctgaggaggtgctggtggccgactgtgccagcgaggccgtgattgatgccaacggcatccctgtggaccagcaggatgatgacaagggcaactgtgaggactacctgatgatcagcctggatgatgctgggaagattgaacatgatggcagcagcggcatgaccatggacacagaaagtgaaattgacccctgcaaggtggatggcacctgcccagaggtgatcaaggtgtacatcttcaaggctgaccctggagaagatgacctgggcggcaccgtggacatcgtggagagcgagccagaaaatgaccatggagtggagctgctggaccagaacagcagcatccgggtgccccgggagaagatggtgtacatgacagtgaatgacagccagccagaagatgaggacctgaatgtggccgagattgctgatgaggtgtacatggaggtgattgtgggggaggaggatgctgctgctgctgctgctgctgctgctgtgcatgagcagcagatggatgacaatgagatcaagaccttcatgcccatcgcctgggccgccgcctacggcaacaacagtgatggcattgaaaatagaaatggaacagccagcgccctgctgcacattgatgagagcgctggcctgggccgcctggccaagcagaagcccaagaagagaagaagaccagacagccggcagtaccagacagccatcatcatcggcccagatggccaccccctgactgtgtacccctgcatgatctgtgggaagaagttcaagagccggggcttcctgaagaggcacatgaagaaccaccctgagcacctggccaagaagaagtaccgctgcacagactgtgactacaccaccaacaagaagatcagcctgcacaaccacctggagagccacaagctgaccagcaaggccgagaaggccattgaatgtgatgaatgtgggaagcacttcagccatgctggggccctcttcacccacaagatggtgcacaaggagaagggggccaacaagatgcacaagtgcaagttctgtgaatatgaaacagctgagcagggcctgctgaacagacacctgctggccgtgcacagcaagaacttcccccacatctgtgtggagtgtgggaagggcttccgccaccccagcgagctgaagaagcacatgaggatccacactggagagaagccctaccagtgccagtactgtgagtacagatctgctgacagcagcaacctgaagacccacgtgaagaccaagcacagcaaggagatgcccttcaagtgtgacatctgcctgctgaccttcagtgacaccaaggaggtgcagcagcacgccctgatccaccaggagagcaagacccaccagtgcctgcactgtgaccacaagagcagcaacagcagtgacctgaagaggcacatcatctctgtgcacaccaaggactacccccacaagtgtgacatgtgtgacaagggcttccaccggcccagcgagctgaagaagcacgtggccgcccacaagggcaagaagatgcaccagtgccgccactgtgacttcaagattgctgacccctttgtgctgagccgccacatcctgtctgtgcacaccaaggacctgcccttccgctgcaagcgctgcaggaagggcttccggcagcagagcgagctgaagaagcacatgaagacccacagcggcaggaaggtgtaccagtgtgagtactgtgagtacagcaccacagatgccagcggcttcaagagacatgtgatcagcatccacaccaaggactacccccaccgctgtgagtactgcaagaagggcttcagaagacccagcgagaagaaccagcacatcatgaggcaccacaaggaggtgggcctgccctag

SEQ ID NO: 343056 - DNA, 2535 bp, Artificial Sequence
  derived and/or modified sequence
atggacgaggacggcctggagctgcagcaggagcccaacagcttcttcgacgccaccgacagagttagcttttgccaccctggatggagcactgtcgccccatctggctcaacagcaacaagcgcctctcaggcacaggtcatatgctcagcatctcgggtgactggcgctaccggagcggatggcactcacatggacggcgaccagatagttgtggaagtgcaggagactgtgttcgttagcgacgttgtcgatagtgatattactgtccataactttgtgccagacgaccccgactcggtagttatccaggacgttatcgaagacgtggtgattgaggacgtgcaatgtccagatatcatggaagaagctgacgtgtccgaaacggtgatcatccctgagcaggtgctggattccgatgtgactgaagaggtcagcctcgcccattgtaccgtgcccgacgatgtcctggcgagcgacatcacttcggcctccatgtcaatgcccgaacacgtacttactggcgacagcattcacgtttccgatgtaggccatgtggggcacgtcggtcacgtggaacacgtcgtgcatgactccgtggttgaggcagagattgttaccgatcctctcaccaccgacgtggtctctgaagaggtccttgtagctgactgcgctagcgaagcggtgatcgacgccaacggaatccccgtcgatcagcaagatgatgataagggtaattgcgaagactacttaatgatcagccttgacgacgctgggaagatcgagcatgatggatcatcaggtatgacgatggacactgaaagtgaaatcgatccctgtaaggtcgacggcacctgtccagaagttattaaggtgtatatcttcaaagcggatccaggtgaggatgatctcggagggaccgtcgacattgtggagtctgaacccgaaaatgaccacggggtcgagctgctagaccagaatagcagtattagagtcccccgggaaaagatggtgtatatgaccgtgaatgactcccagcctgaagatgaggatctcaatgtggcagagattgcagacgaagtctacatggaggtcatcgtaggcgaggaggacgcggccgccgcagcagcagcggctgccgtccacgagcagcagatggatgacaatgagatcaagaccttcatgcctatagcatgggcagctgcatacgggaataattctgacggcatagaaaaccgaaatggcacggcttctgcattgctgcatattgatgagtcagccggtctgggacggctcgcaaaacagaagcccaaaaaaaggcggcggcccgactctaggcagtatcaaactgcgattatcattgggccagacgggcacccactcaccgtgtacccttgtatgatctgtggtaagaagttcaaatctcggggctttcttaagcggcacatgaagaaccatccggagcacctggcgaaaaagaagtatcgctgcacagactgtgactatacaactaataaaaaaatctcactgcacaaccacttggaatctcacaaactgaccagtaaagcagaaaaagctattgaatgtgatgagtgtggaaagcacttttcacacgcaggtgccctgttcacacataagatggtacacaaggagaagggagcgaacaagatgcacaagtgcaaattttgtgaatatgaaacagccgagcaaggcctcctgaatcgacacttgctggctgtccacagtaagaactttccccatatttgtgtcgagtgtggaaagggcttcaggcacccatcggagcttaagaagcacatgcgtattcacactggcgagaagccttatcagtgtcagtactgtgaatacaggagcgcagattcatctaatctcaagacccatgtgaagactaagcattctaaggagatgcctttcaagtgcgatatttgtttgttgacattcagtgataccaaagaggtccagcagcacgccttaattcaccaagaaagtaaaacccaccagtgtcttcactgcgaccacaagagctcaaattcaagcgacctgaaaaggcacatcattagcgtgcatacaaaagattacccccataagtgtgacatgtgtgataagggatttcatcggccatctgaactaaagaagcatgtggcagcccataaaggtaagaagatgcatcagtgccgacactgcgacttcaagattgcagatccctttgtgttgagccgtcacattcttagcgtccataccaaggacctcccttttcggtgcaagcggtgccggaaagggttccggcagcaatccgaactgaaaaaacatatgaagactcactccggcagaaaggtgtatcagtgcgagtactgtgagtattctaccacggatgcctcggggtttaagaggcacgtgataagcatccataccaaggattatccgcaccgctgcgaatactgcaaaaaaggctttaggaggccatcagagaagaaccagcacattatgcgtcaccataaggaagtgggattgccctag

SEQ ID NO: 343057 - DNA, 2535 bp, Artificial Sequence
  derived and/or modified sequence
atggacgaggacggtctggagttgcaacaggagccaaactcgttcttcgatgctaccgatagggtgtctttttgtcatccaggctggagcacggtcgcaccttctggtagtacagcaacatctgccagtcaggcccaggtaatttgcagtgccagccgcgtgaccggggctacgggggctgatggaacacatatggacggggaccagatcgtggttgaggttcaggaaaccgttttcgtctcggatgtcgtggactctgacatcacagtccataactttgtgcccgatgaccctgactcagttgtgatccaggatgtaatcgaggatgtcgtgatcgaggatgtccagtgtcccgacatcatggaagaggccgatgtttctgagacagtgataatacccgagcaggtcttggactcagatgtaactgaagaagtcagtcttgcccattgtacagtacctgacgacgttttagctagcgacatcactagcgcaagcatgtcaatgcccgagcatgttctgaccggagatagcattcacgtctctgacgtgggacacgtcggccatgtcgggcacgtggagcacgtcgtgcatgattctgtggttgaagctgaaattgtgaccgatcccttgactaccgacgtcgtgtctgaggaggttcttgtagcggattgcgcttctgaagctgtgatcgatgcaaatgggattccggtggaccaacaggatgacgacaagggaaattgtgaagactatctgatgatttcactcgatgatgccggaaagatcgagcatgacgggagcagcgggatgacaatggacactgagtcagaaatcgacccctgcaaagtggacggcacttgtccagaggtcattaaggtctatatattcaaggcggatccgggagaggacgacctcgggggaactgtagacatcgtggaaagtgagcccgagaatgaccacggcgttgagttgctcgaccaaaattcctcaattcgcgtcccccgagaaaaaatggtgtatatgaccgttaatgacagccagccagaagatgaagatctgaacgtggcggagatcgccgacgaggtatatatggaggtgattgtgggagaggaggacgccgctgccgctgcagccgcagctgctgtccatgaacagcaaatggacgacaacgagattaaaacctttatgcctatagcatgggccgcagcatatgggaataattccgatggtatcgaaaataggaacggaactgcttccgctcttttgcatatagatgagagcgcaggcttgggacgtttggccaaacagaaaccaaagaagcggcgacgccctgatagcagacaataccagacagcgattataatcggcccagacgggcatccccttacagtatacccgtgtatgatctgtggtaagaagttcaagagccggggattcttgaagcgacacatgaaaaaccaccccgaacatcttgctaagaagaaataccgctgcacagactgcgactacactacgaataagaaaatttcactgcacaaccacctggagtctcataaacttactagtaaggctgagaaggcgattgaatgtgacgagtgtggaaaacacttcagtcacgctggggcactctttacccacaaaatggtccacaaggagaagggcgctaataagatgcacaaatgcaagttctgcgagtacgagaccgccgagcaggggctgcttaataggcacttacttgctgtacacagcaagaactttccacatatctgtgtcgaatgcggtaaaggattcaggcaccccagcgagttgaagaagcacatgcggatacacacaggtgagaaaccataccagtgccagtactgtgaatataggtctgctgatagcagcaatctcaaaacacatgtaaaaactaagcattcaaaggagatgccgttcaagtgcgacatctgtctgctgactttcagcgacacaaaagaggttcagcagcacgcgctgattcatcaggaatcaaagacacaccagtgtttacactgcgaccacaagagctcaaactcatcagatttaaagcgacatataatttcagtccacaccaaggattatccccataagtgcgatatgtgtgacaagggcttccataggccttcagagctgaaaaagcatgttgcagctcacaaaggcaaaaagatgcatcagtgtcgccactgcgacttcaaaattgctgatccattcgtgctcagcagacacattctgtctgtgcataccaaggacctgccattccggtgtaagaggtgccgcaaaggattcagacagcaatctgaactaaaaaaacatatgaagacccactccggacgcaaagtataccaatgtgaatattgcgagtattcaacgacggacgcgtctggatttaagaggcacgtcattagcatacacactaaagattacccccatcgttgtgaatactgcaaaaagggattcagaagacccagcgaaaaaaatcagcatattatgagacaccataaagaggtgggtctgccatag

SEQ ID NO: 343058 - DNA, 2936 bp, Artificial Sequence
  derived and/or modified sequence
gcctgtcactgccgtctgttccctgagctgtgctttacgctgggaaagacatagaagaactattaagaagatagaattgttttgctgcgcagtacagcaacagtggatgttcaagattaagattagagtcaagttgtgtgattaagacaggagctgtgactgatgagaattaaaggccatggatgaagatgggcttgaattacaacaagagccaaactcattttttgatgcaacagacagggtctcgttctgtcacccaggctggagcacagtggcgccatctgggtccactgcaacctccgcctcccaggctcaagtgatctgctcagcttcccgagtaactggggctacaggagctgatggtacacacatggatggtgatcaaattgttgtggaagtacaagaaactgtttttgtttcagatgttgtggattcagacataactgtgcataactttgttcctgatgacccagattcagttgtaatccaagatgttattgaggacgttgttatagaagatgttcagtgcccagatatcatggaagaagcagatgtgtctgaaacggtcatcattcctgagcaagtgctggactcagatgtaactgaagaagtttctttagcacattgcacagtcccagatgatgttttagcttctgacattacttcagcctcaatgtctatgccagaacacgtcttgacgggtgattctatacatgtgtctgacgttggacatgttggacatgttggacatgttgaacatgtggttcatgatagtgtagtggaagcagaaattgtcactgatcctctgactaccgacgtagtttcagaagaagtattggtagcagactgtgcctctgaagcagtcatagatgccaatgggatccctgtggaccagcaggatgatgacaaaggcaactgtgaggactaccttatgatttccttggatgatgctggcaaaatagaacacgatggttcttctggaatgaccatggacacagagtcggaaattgatccttgtaaagtggatggcacttgccctgaggtcatcaaggtgtacatttttaaagctgaccctggagaagatgacttaggtggaactgtagacattgtggagagtgagcctgagaatgatcatggagttgaactgcttgatcagaacagcagtattcgtgttcccagggaaaagatggtttatatgactgtcaatgactctcagccagaagatgaagatttaaatgttgctgaaatcgctgacgaagtttatatggaagtgatcgtaggagaggaggatgctgcagcagcagcggcagccgccgccgtgcacgagcagcaaatggatgacaatgaaatcaaaaccttcatgccgattgcatgggcagcagcttatggtaataattctgatggaattgaaaaccggaatggcactgcaagtgccctcttgcacatagatgagtctgctggcctcggcagactggctaaacaaaaaccaaagaaaaggagaagacctgattccaggcagtaccaaacagcaataattattggccctgatggacatcctttgactgtctatccttgcatgatttgtgggaagaagtttaagtcgagaggttttttgaaaaggcacatgaaaaaccatcccgaacaccttgccaagaagaaataccgctgtactgactgtgattacactaccaacaagaagataagtttacacaaccacctggagagccacaagctgaccagcaaggcagagaaggccattgaatgcgatgagtgtgggaagcatttctctcatgcaggggctttgtttactcacaaaatggtgcataaggaaaaaggagccaacaaaatgcacaagtgtaaattctgtgaatacgagacagctgaacaagggttattgaatcgccacctcttggcagtccacagcaagaactttcctcatatttgtgtggagtgtggtaagggttttcgtcacccgtcagagctcaaaaagcacatgagaatccatactggggagaagccgtaccaatgccagtactgcgaatataggtctgcagactcttctaacttgaaaacgcatgtcaaaactaagcatagtaaagagatgccattcaagtgtgacatttgtcttctgactttctcggataccaaagaggtgcagcaacatgctcttatccaccaagaaagcaaaacacaccagtgtttgcattgcgaccacaagagttcgaactcaagtgatttgaaacgacacataatttcagttcacacgaaagactacccccataagtgtgacatgtgtgataaaggctttcacaggccttcagaactcaagaaacacgtggctgcccacaagggcaaaaaaatgcaccagtgtagacattgtgactttaagattgcagatccatttgttctaagtcgccatattctctcagttcacacaaaggatcttccatttaggtgcaagagatgtagaaagggatttaggcaacagagtgagcttaaaaagcatatgaagacacacagtggcaggaaagtgtatcagtgtgagtactgtgagtatagcactacagatgcctcaggctttaaacggcacgttatttccattcacacgaaagactatcctcaccggtgtgagtactgcaagaaaggcttccgaagaccttcagaaaagaaccagcacataatgcgacatcataaagaagttggcctgccctaacaatacttctacagaacgtttgtagagatattggccttgaagcagaaaattcattttaaagccaatcagtctcattcacatacaatactgtatattgatttatgctgtgtacaaatagaattattacttctagttgacttttttttaaatatacattttgctcagtagtgtgttctgaattctattcagtttgtttaataaatagggaaaactggcaacatgc

SEQ ID NO: 343059 - protein, 173 aa, Artificial Sequence
  derived and/or modified sequence
GGCSQYLLLFVDDAGKIEHDGSSGMTMDTESEIDPCKVDGTCPEVIKVYIFKADPGEDDLGGTVDIVESEPENDHGVELLDQNSSIRVPREKMVYMTVNDSQPEDEDLNVAEIADEVYMEVIVGEEDAAAAAAAAAVHEQQMDDNEIKTFMPIAWAAAYGNNSDGIENRNGTA

SEQ ID NO: 343060 - DNA, 6801 bp, Artificial Sequence
  derived and/or modified sequence
cggggagctgggccgctttttgtcagctccgagctcggcccctcctccctccctccgcccgccccaccagccggagcccggcccagtgctccagagaaaggccggcctgcagcacccgccaccgtcgccggccgcccgcacgtccgtccgtggatgatgctggcaaaatagaacacgatggttcttctggaatgaccatggacacagagtcggaaattgatccttgtaaagtggatggcacttgccctgaggtcatcaaggtgtacatttttaaagctgaccctggagaagatgacttaggtggaactgtagacattgtggagagtgagcctgagaatgatcatggagttgaactgcttgatcagaacagcagtattcgtgttcccagggaaaagatggtttatatgactgtcaatgactctcagccagaagatgaagatttaaatgttgctgaaatcgctgacgaagtttatatggaagtgatcgtaggagaggaggatgctgcagcagcagcggcagccgccgccgtgcacgagcagcaaatggatgacaatgaaatcaaaaccttcatgccgattgcatgggcagcagcttatggtaataattctgatggaattgaaaaccggaatggcactgcaagtgccctcttgcacatagatgagtctgctggcctcggcagactggctaaacaaaaaccaaagaaaaggagaagacctgattccaggcagtaccaaacagcaataattattggccctgatggacatcctttgactgtctatccttgcatgatttgtgggaagaagtttaagtcgagaggttttttgaaaaggcacatgaaaaaccatcccgaacaccttgccaagaagaaataccgctgtactgactgtgattacactaccaacaagaagataagtttacacaaccacctggagagccacaagctgaccagcaaggcagagaaggccattgaatgcgatgagtgtgggaagcatttctctcatgcaggggctttgtttactcacaaaatggtgcataaggaaaaaggagccaacaaaatgcacaagtgtaaattctgtgaatacgagacagctgaacaagggttattgaatcgccacctcttggcagtccacagcaagaactttcctcatatttgtgtggagtgtggtaagggttttcgtcacccgtcagagctcaaaaagcacatgagaatccatactggggagaagccgtaccaatgccagtactgcgaatataggtctgcagactcttctaacttgaaaacgcatgtcaaaactaagcatagtaaagagatgccattcaagtgtgacatttgtcttctgactttctcggataccaaagaggtgcagcaacatgctcttatccaccaagaaagcaaaacacaccagtgtttgcattgcgaccacaagagttcgaactcaagtgatttgaaacgacacataatttcagttcacacgaaagactacccccataagtgtgacatgtgtgataaaggctttcacaggccttcagaactcaagaaacacgtggctgcccacaagggcaaaaaaatgcaccagtgtagacattgtgactttaagattgcagatccatttgttctaagtcgccatattctctcagttcacacaaaggatcttccatttaggtgcaagagatgtagaaagggatttaggcaacagagtgagcttaaaaagcatatgaagacacacagtggcaggaaagtgtatcagtgtgagtactgtgagtatagcactacagatgcctcaggctttaaacggcacgttatttccattcacacgaaagactatcctcaccggtgtgagtactgcaagaaaggcttccgaagaccttcagaaaagaaccagcacataatgcgacatcataaagaagttggcctgccctaacaatacttctacagaacgtttgtagagatattggccttgaagcagaaaattcattttaaagccaatcagtctcattcacatacaatactgtatattgatttatgctgtgtacaaatagaattattacttctagttgacttttttttaaatatacattttgctcagtagtgtgttctgaattctattcagtttgtttaataaatagggaaaactggcaacatgctagttacttttaataaagtaatccctgattctataccgaagttttatatcttagaattttatatttatttaaatatttaccttgcttaccttgatggtactcttctaagaccattaacttaaggtaactttatattggtaactctgaaagtattcatgttgactcatttttttccccatacatttctcacaataaaattgtcagagacatctactaatataaatgggagattttacagtcaggtctaattatcataacatggaagtcatttacttgtcttgcttaatattttcagaccacttgacagtgaaagtttccatttgagctgttgcgtccctggctttgctgagtaaagagcagtggctgggttcgtgtttacttttcaaatatacttcttttggctttctttggattatttacatcttttgtcagcgtagcaaacttttagaaaaccttattgaaaaactgtgcttgctcatgttgtattttgattattctgtctgtgcggcttcatcttggaatggttgtgtgctacaaatgacacttactgaggactgcattttggaatctcctagaggtaactcatggcttataggatcttttgcaactttatgtatgtaaatgtaccctgaattatatatatacacatatatatcatgtacctgtgtgtattgcttattttacatatttatacacacaaccccaagtagtagttgtttaaaatctataatgaaaagtattaaatttacaataacatgaaagatccagggatgcatgagagagcattttgtaagtcatgctcttcagagagactactcaggtgaagaattagaaggaaaataaggacactagtatttttaaagagtaaagatattttcttttaaatatctttggtaattgaaacatagaggttaagatgtttctaggtagaatgttttcatacaatttcacctccatgtctttatgtttttctgaaaagcaaatgagtatccagacatgactcccacagttctctttgagaagcctgagagggaactctgtcttacctagtgagggggatggaaaagaagtgatggctctgtggaccagagaacgggtgctaattatgacttcacactcggcaagttcaggctgatctgttatttctcagttacagttagcaaactttaaaaacttaacactcaagttggctttgattaaaaggtaaagatgtgttttaagtggataaggaaagtctgaggccttatttggaacatcactaagtcttccacaggttttttgtttgtttgtttttttttgttgtttttttttcttaagacggagtcttgctctgttgcccaggctggactgcagtggtgtgatcactgcaacctctgcagctcactgcaacctctgcttcctgggttcaagcaattatctgcctcagcctctcgagtagctgggattacaggcgcccaccaccacgcccggctaattttttgtatttttaatagagatggggtttcaccatcttggccaggctggtcttgaaccctgacctcgtgatccacctgcctcggccttccatagtgctgggtttacaggcgtgagccaccgtgcccagacaccacataggtctgaatcagtgtcatacattcataaaacaaactcggttaattagaacttggttatgttaagacgaatctgggagaacagaaaacagtttttggggtcccttcagttggctattggtccgtatgcatctagcacattgtaggagatttagaaattgtcttcccacccgatagctgccttgtcacctcattatggtgctccatcccctgtgtgcttaggtttttacctttcatctttctctttgccattgatgtttgtattcaagagttatatttttagggttagaaatcaaaatatttggtgtttggcaaacctctgaagtgctagactgatttagtctagttttaaaccaagtgctttaggcaggtgtgaactccagcccaaatgccagtcaaagtcaaggcatgggttttcctagcctatcttataggaaattcctgtaccttcttggcccccataatgtgttttttttttttttttttttttaaactaacttacaattttgtgatccgtgattcattgccctgcgattcttgaaagctctgtctgtttttttgtgagaacctttaaaatctcccttaatttttattttcccagaaataatgtaaaaacacttaaatgaaagtggaaatgtattaattttaaatcctataaaattaatacagaaaatataaatgattgggtcatttaactatatttttttaaataaactgaaagataaagaacacaacacttcacacattttatatttctcttacatactccggaatcatacacagttctttttaaagcacaacattaaaacctttaaaaggtatttaagggtttggtcaagtgaatatgataaaacatacttgtctgtataaagagaaaatgaaattgtagtcactgttatgtactgacattagttacaacctagttttaattcttaaaacaattttgattagcaaagctaaaaaaaaatggatgtttcagttaaatgttttaaagaggtacagatttttacaaggacataatataagttattgttctgtagaaatatcctattaaatattgtatgtccctccctctgtacactttgtaaagaaagtaaaatacataaaaagaaaatcatatagggatgtgtgacattattgtaattgtgtacttgagaataacgtgcaaaaataaaaatcagaatattttcctgttattgaatgtttagtctatttgataccagtactaagttaatgctttttctcaaggaaaaaaaatgtacagtttttgtaaacctaataaacatcaaaagcagtggattattttcatccccccatttcttaatttctttttcacagcagtggaatgcaaagtgcttgattgctttgaattttgtgactcggatgcaaatactggtaatatttcagttctgtgaatttgcaagtaatatttcagagaagttaagaggtgattggtgagtcctttgatgagcatgtccttggaattcattttttcttttatcttcataaaggatttgttttattagcatctccaattcccctgagataaattactcatgcataaagtggtttttgagagcacttaaagttcatttcagtattaatttacagcatatttaatcagtggggactgttaccacctccacaacagaaatcatgccctcgagttaccccactgcgcccagtttagaggactagtagatgctaacatactagggaatggtcattgccacagttaaaaatcggcagttaagtaaatgtcaggagtcaaaagagatagagttgtgccatctttgattttatagacaagattctgcagttcttccaactgtatgaacaaacgtttgcctaatagttgaaacaataaattaaaattttaggtaaatgacgaagggaatgtggtgaatgtcactgtccagagccataaatcagacaaaaccatacatagcatgctgaaaaacttttgtaatggaacacccaacaaatgacacctaacctgtctgtgatccaacaagtccgataacatgctgctgtatttgtattctctgggaatctcagtattaataatttcatttcccacaaattctagcattcatgtaaggaaaaacatggctaatcaatatcttaaaggggcaatctttcagagcagtggttttcaaagtatggccggacagcattggcagcatcttaatctcctgggactttgttaaaaatgcaaattctcagccccaccctagtcctactgaattgggaaactggcgtgggacccagcagtctttgttttaacatgttctccaagtgattctgatgcctgttcaaacttgggaaacacttttagagcacttgaggaacctaaaagatgactggttcagcattttgtgtggtagataagaaagaaattatcacaaaaaatcagaaatgaacagtgagagaaaaataggaccccagacagtttataccttccatttgctgttttaaaagtgtgagcctgccaagtcaacaagtatgcctttagcgcacatgtaaatagcctgcacttcctaaatctcgtgtggcctcccatggttacattcttcaaaggtaaactgagttgagaggaagattcagcatttaaaagagaagggttgaaaaagattgtgtgtgtgtgtgtgtgtgtttaattggcccagggttacttaaataaatcataaccattttgccacattctgtaactgtttagctaaggtcaaattaagtttaccctatggattttgtttcatcttttgtttcgtgtatatactgtttgcctttttcataaaaatcttggatttgttatatattgttcctgttatttttgacatctttgctattgtaaataaattactattttgttttaagttaccctagtggagtgttggctatagacaaggtatatactcgaaacgaggagacttaaatcacacagttaatgaattcccaacttgtttgaagctggaggtgattcgactcccttcagtggttcaacactaataatagcaccaaggaacatgtcactggtgcatatagg

SEQ ID NO: 343061 - DNA, 2026 bp, Artificial Sequence
  derived and/or modified sequence
ggaggttgcagtcaatatctgttactatttgtggatgatgctggcaaaatagaacacgatggttcttctggaatgaccatggacacagagtcggaaattgatccttgtaaagtggatggcacttgccctgaggtcatcaaggtgtacatttttaaagctgaccctggagaagatgacttaggtggaactgtagacattgtggagagtgagcctgagaatgatcatggagttgaactgcttgatcagaacagcagtattcgtgttcccagggaaaagatggtttatatgactgtcaatgactctcagccagaagatgaagatttaaatgttgctgaaatcgctgacgaagtttatatggaagtgatcgtaggagaggaggatgctgcagcagcagcggcagccgccgccgtgcacgagcagcaaatggatgacaatgaaatcaaaaccttcatgccgattgcatgggcagcagcttatggtaataattctgatggaattgaaaaccggaatggcactgcaagtgccctcttgcacatagatgagtctgctggcctcggcagactggctaaacaaaaaccaaagaaaaggagaagacctgattccaggcagtaccaaacagcaataattattggccctgatggacatcctttgactgtctatccttgcatgatttgtgggaagaagtttaagtcgagaggttttttgaaaaggcacatgaaaaaccatcccgaacaccttgccaagaagaaataccgctgtactgactgtgattacactaccaacaagaagataagtttacacaaccacctggagagccacaagctgaccagcaaggcagagaaggccattgaatgcgatgagtgtgggaagcatttctctcatgcaggggctttgtttactcacaaaatggtgcataaggaaaaaggagccaacaaaatgcacaagtgtaaattctgtgaatacgagacagctgaacaagggttattgaatcgccacctcttggcagtccacagcaagaactttcctcatatttgtgtggagtgtggtaagggttttcgtcacccgtcagagctcaaaaagcacatgagaatccatactggggagaagccgtaccaatgccagtactgcgaatataggtctgcagactcttctaacttgaaaacgcatgtcaaaactaagcatagtaaagagatgccattcaagtgtgacatttgtcttctgactttctcggataccaaagaggtgcagcaacatgctcttatccaccaagaaagcaaaacacaccagtgtttgcattgcgaccacaagagttcgaactcaagtgatttgaaacgacacataatttcagttcacacgaaagactacccccataagtgtgacatgtgtgataaaggctttcacaggccttcagaactcaagaaacacgtggctgcccacaagggcaaaaaaatgcaccagtgtagacattgtgactttaagattgcagatccatttgttctaagtcgccatattctctcagttcacacaaaggatcttccatttaggtgcaagagatgtagaaagggatttaggcaacagagtgagcttaaaaagcatatgaagacacacagtggcaggaaagtgtatcagtgtgagtactgtgagtatagcactacagatgcctcaggctttaaacggcacgttatttccattcacacgaaagactatcctcaccggtgtgagtactgcaagaaaggcttccgaagaccttcagaaaagaaccagcacataatgcgacatcataaagaagttggcctgccctaacaatacttctacagaacgtttgtagagatattggccttgaagcagaaaattcattttaaagccaatcagtctcattcacatacaatactgtatattgatttatgctgtgtacaaatagaattattacttctagttgacttttttttaaatatacattttgctcagtagtgtgttctgaattctattcagtttgtttaataaatagggaaaactggcaacatgc

SEQ ID NO: 343062 - protein, 178 aa, Artificial Sequence
  derived and/or modified sequence
VYAAPKKDSPPKNSVKVDELSLYSVPEGQSKYVEEARSQLEESISQLRHYCEPYTTWCQETYSQTKPKMQSLVQWGLDSYDYLQNAPPGFFPRLGVIGFAGLIGLLLARGSKIKKLVYPPGFMGLAASLYYPQQAIVFAQVSGERLYDWGLRGYIVIEDLWKENFQKPGNVKNSPGTK

SEQ ID NO: 343063 - DNA, 1440 bp, Artificial Sequence
  derived and/or modified sequence
atggccgccctggagaagatgaccttccccaagaagatgaccttccccgagaagcccagccacaagaagtacagagccgccctgaagaaggagaagagaaagaagagaagacaggagctggccagactgagagacagcggcctgagccaggaggaggaggaggacaccttcatcgaggagcagcagctggaggaggagaagctgctggagagagagagagagagactgcacgaggagtggctgctgagagagcagaaggcccaggaggagttcagaatcaagaaggagaaggaggaggccgccaagaagtggctggaggagcaggagagaaagctgaaggagcagtggaaggagcagcagagaaaggagagagaggaggaggagcagaagcagcaggagaagaaggagaaggaggaggccgtgcagaagatgctggaccaggccgagaacgacctggagaacagcaccacctggcagaaccccgagccccccgtggacttcagagtgatggagaaggacagagccaactgccccttctacagcaagaccggcgcctgcagattcggcgacagatgcagcagaaagcacaacttccccaccagcagccccaccctgctgatcaagagcatgttcaccaccttcggcatggagcagtgcagaagagacgactacgaccccgacgccagcctggagtacagcgaggaggagacctaccagcagttcctggacttctacgaggacgtgctgcccgagttcaagaacgtgggcaaggtgatccagttcaaggtgagctgcaacctggagccccacctgagaggcaacgtgtacgtgcagtaccagagcgaggaggagtgccaggccgccctgagcctgttcaacggcagatggtacgccggcagacagctgcagtgcgagttctgccccgtgaccagatggaagatggccatctgcggcctgttcgagatccagcagtgccccagaggcaagcactgcaacttcctgcacgtgttcagaaaccccaacaacgagttctgggaggccaacagagacatctacctgagcagcgaccagaccggcagcagcttcggcaagaacagcgagagaagagagaagatgggccaccacgaccactactacagcagacagagaggcagaagaaaccccagccccgaccacacctacaagagaaacggcgagagcgagagaaagaagagcagccacagaggcaagaagagccacaagagaaccagcaagagcagagagagacacaacagccccagcagaggcagaaacagacacagaagctgggaccagggcagaagaagccagagcagaagaagccacagaagcagaagccagagcagcagcagatgcagaagcagaggcagaagaaagagcggcaacagagacagaaccgtgcagagcccccagagcaagtag

SEQ ID NO: 343064 - DNA, 1440 bp, Artificial Sequence
  derived and/or modified sequence
atggctgccttggagaaaatgactttccccaaaaagatgaccttccctgaaaagccatcacacaaaaaatacagggctgcactcaagaaagagaagcgtaagaagcggcgccaggaattagcacgactccgggacagcgggctgtcacaagaagaagaggaagatactttcattgaggagcaacagttggaagaagaaaagctgctggaacgagagcgcgaaagactgcatgaagaatggttactgcgggagcagaaagcccaggaagagttccggatcaaaaaagagaaggaagaggccgccaaaaaatggctggaggagcaggaacggaagttgaaggagcagtggaaagagcagcagaggaaggagagagaagaagaggagcagaagcagcaagaaaaaaaggaaaaagaggaagccgtccagaaaatgctggaccaggccgagaacgaccttgagaacagcactacctggcagaacccagagccaccagtcgacttcagggtcatggaaaaggatcgagcaaattgtccattctatagcaagactggcgcttgtcggtttggagatagatgctcccgcaagcacaattttcctacttccagcccaaccctacttataaaaagcatgtttactacattcggcatggagcagtgccgccgggatgattacgaccccgacgccagcctggagtactccgaggaggagacttaccagcagttccttgacttttatgaggacgtgcttccagaatttaaaaatgttgggaaggtgattcagttcaaggtgtcgtgcaatcttgaaccccatctgcgtgggaacgtgtatgtgcagtaccagagcgaggaggagtgtcaggccgccctgtcgctgtttaatgggaggtggtatgcgggaaggcagctgcagtgtgagttttgtcctgtcactagatggaagatggcaatctgcggacttttcgagatccaacagtgcccccgtgggaaacactgtaatttcctccatgtcttcaggaatccaaacaacgaattttgggaagcaaacagggacatctacctctcctctgaccagactggctcatcattcggcaaaaattccgagcggagggagaagatgggacaccacgatcactattactctcgtcagcggggacgccgaaatccttctcccgaccacacatacaagagaaatggcgagagtgagcgtaagaaatcctcccaccgcgggaaaaaaagccacaaacggacttccaaatcccgtgaacggcacaattctccttccaggggtaggaacaggcacaggagctgggaccaagggcggcgatcccagtcaagacgctctcaccgctccagatcgcagagttcatcgcgctgccgatcacgggggaggcgtaaatctggaaatcgtgatcggactgtgcagtctccacaaagtaagtag

SEQ ID NO: 343065 - DNA, 1440 bp, Artificial Sequence
  derived and/or modified sequence
atggccgccctggagaagatgaccttccccaagaagatgaccttccctgagaagcccagccacaagaagtaccgggccgccctgaagaaggagaagaggaagaagaggcggcaggagctggcccggctgcgggacagcggcctgagccaggaggaggaggaggacaccttcatcgaggagcagcagctggaggaggagaagctgctggagcgggagcgggagcggctgcacgaggagtggctgctgcgggagcagaaggcccaggaggagttccgcatcaagaaggagaaggaggaggccgccaagaagtggctggaggagcaggagaggaagctgaaggagcagtggaaggagcagcagaggaaggagcgggaggaggaggagcagaagcagcaggagaagaaggagaaggaggaggccgtgcagaagatgctggaccaggctgaaaatgacctggagaacagcaccacctggcagaaccctgagccccctgtggacttccgggtgatggagaaggaccgggccaactgccccttctacagcaagacaggagcctgccgctttggagaccgctgcagcaggaagcacaacttccccaccagcagccccaccctgctgatcaagtccatgttcaccaccttcggcatggagcagtgcagaagagatgattatgaccctgatgccagcctggagtacagcgaggaggagacctaccagcagttcctggacttctatgaagatgtgctgcctgagttcaagaatgtgggcaaggtgatccagttcaaggtgtcctgcaacctggagccccacctgcggggaaatgtgtatgtgcagtaccagagcgaggaggagtgccaggccgccctgagcctcttcaacggccgctggtacgccggccggcagctgcagtgtgagttctgccctgtgacccgctggaagatggccatctgtggcctgtttgagatccagcagtgcccccggggcaagcactgcaacttcctgcacgtgttcaggaaccccaacaatgagttctgggaggccaacagagacatctacctgagcagtgaccagacaggcagcagctttgggaagaacagcgagcggcgggagaagatgggccaccacgaccactactacagccggcagagaggaagaagaaaccccagcccagaccacacctacaagagaaatggagagagcgagaggaagaagagcagccaccggggcaagaagagccacaagaggaccagcaagagccgggagcggcacaacagccccagccggggcaggaacagacaccgctcctgggaccagggccgccgcagccagagcagaagaagccacaggagccgcagccagagcagcagccgctgccgcagccggggccgcaggaagagcggcaacagagacagaacagtgcagagcccccagagcaagtag

SEQ ID NO: 343066 - DNA, 1440 bp, Artificial Sequence
  derived and/or modified sequence
atggccgccctggagaagatgaccttccccaagaagatgaccttccccgaaaaaccctctcacaaaaagtatcgtgcagctctaaaaaaagagaagcgcaagaaacggcggcaggaattagctagacttcgggactctgggttgagtcaggaagaggaggaggataccttcattgaagaacaacagctggaggaggagaagcttctcgagcgcgaaagggagcgcctgcatgaggagtggctcttgagggaacagaaagcacaggaagagtttcggattaaaaaagagaaggaggaggctgcaaagaaatggttggaggaacaggagagaaaactgaaggaacagtggaaagaacagcagagaaaggaacgagaggaagaagaacagaaacaacaggagaaaaaggaaaaagaagaagctgttcagaaaatgttagaccaggccgaaaacgatctggaaaacagcacaacctggcagaatcccgaacctcctgttgactttagggtcatggaaaaagatagggccaattgtcctttctacagtaaaaccggcgcctgcaggtttggggaccgctgtagtagaaagcacaacttcccgacgtcatctcccacactgcttattaaaagtatgttcaccacatttggcatggagcagtgcagacgggacgactatgaccctgacgcaagcctggaatattccgaagaagagacataccagcagttcctggatttttacgaagatgtactgcccgagttcaaaaatgtaggcaaggtcattcagttcaaggtgtcctgcaatttggagccccacctgagaggcaacgtttatgtgcaataccagtccgaggaggagtgccaggctgcactgtcgttgtttaatgggcggtggtacgctggacgccagctacagtgcgagttctgcccagtgacacgctggaagatggcgatttgtgggctgttcgaaattcagcagtgtcctcgcggaaagcactgcaatttccttcatgtattccggaatccaaacaacgaattttgggaggcaaatcgggacatctacttgagctccgatcagacggggtcttcatttgggaaaaacagcgaacgacgggagaagatgggacatcacgaccattattattctcgccaaagaggtaggcgaaatccatccccagatcacacatataaacgtaacggcgagtccgaacgcaagaaatcgtcgcatagaggtaagaagtcccacaagagaactagtaagtcacgtgaaagacacaacagtccctcgaggggaagaaacagacaccgctcgtgggatcagggtcgccggtctcaatctcgaagatcgcaccgaagtagaagccaaagttcgtcacggtgcaggtcccgtggaagacggaagagtggcaatcgtgaccggaccgtgcagtcaccgcagtctaagtag

SEQ ID NO: 343067 - DNA, 1440 bp, Artificial Sequence
  derived and/or modified sequence
atggccgcattagaaaagatgacgttccctaaaaagatgacattccccgaaaaacccagccacaagaaatatagagccgctctaaaaaaggagaagagaaaaaaacggcgtcaggaactggcacgtcttagagacagtggactgagccaggaggaagaagaggacacttttattgaagaacagcaactggaagaggagaagttactggagcgggaacgcgaacggctccacgaagagtggctgctccgggagcaaaaggcacaggaggaatttagaatcaaaaaggaaaaggaagaagccgctaaaaagtggttggaggagcaggaacgtaagctcaaagagcagtggaaggagcaacagcgcaaggagcgagaagaggaggaacagaaacaacaggagaagaaagaaaaggaggaggccgtacaaaaaatgctcgaccaggcagagaacgacctggagaactcgactacatggcagaaccctgagcctccggtggatttccgggtaatggagaaggacagagctaattgtcctttttactctaagaccggcgcatgccgctttggcgaccggtgctcccgtaagcataacttcccaactagctcccccacccttttgataaaaagcatgttcaccacgtttgggatggaacagtgcagacgggacgattacgatcccgacgcgtcactagaatattccgaagaggaaacatatcagcagtttcttgatttctacgaggacgtgctgcctgaatttaaaaacgtgggaaaagtcattcaattcaaagtctcctgcaacctggagccgcatcttcggggaaacgtgtacgtccaatatcaatccgaagaagagtgtcaggccgctctctctctgttcaatggtaggtggtacgctggccgtcagctgcagtgcgagttttgccctgtgactcggtggaaaatggcaatttgcggcctgttcgagattcaacagtgccctcgagggaaacactgtaactttctccatgtattcagaaaccccaacaatgagttttgggaggccaacagggatatttacctgtcttccgatcagacaggtagcagctttggaaaaaattcagagcggagagagaaaatgggtcatcacgaccactattattctcgccagcgcggtcgccgtaaccccagccctgatcatacgtacaagcgcaacggcgaatctgaacgtaagaaaagcagccataggggcaaaaagtcgcataagaggacttccaaatccagagaaaggcataattccccttcaagaggccgtaaccgtcaccggtcctgggaccagggacgacgctcgcaatcccggcgtagccatcggagtaggtcgcagtctagctctaggtgtcgatccagggggagaaggaagagcggaaaccgcgaccgaacagtccagagtccacagtcaaagtag

SEQ ID NO: 343068 - DNA, 1479 bp, Artificial Sequence
  derived and/or modified sequence
gaggggtcaggcggtgctggcaagatggctgcacttgagaagatgacgtttcccaagaagatgacatttccagagaaaccaagccacaaaaagtacagggccgccctgaagaaggagaaacgaaagaaacgtcggcaggaacttgctcgactgagagactcaggactctcacaggaggaggaagaggacacttttattgaagaacaacaactagaagaagagaagctattggaaagagagagggaaagattacatgaggagtggttgctgagggagcagaaggcacaagaagaattcagaataaagaaggaaaaggaagaggcggctaaaaaatggctagaagaacaagagagaaagttaaaggaacaatggaaagaacagcagaggaaagagagagaagaggaggagcagaaacaacaggagaagaaagaaaaagaggaagctgtgcagaagatgctggatcaggctgaaaatgatttagaaaatagtaccacatggcaaaacccagaaccacccgtggatttcagagtaatggagaaggatcgagctaattgtcccttctacagtaaaacaggagcttgcagatttggagacagatgttcacgtaaacataatttcccaacatctagtcctacccttcttattaagagcatgtttacaacgtttggaatggagcagtgcaggagggatgactatgaccctgacgcaagcctggagtacagcgaggaagaaacctaccaacagttcctagatttctatgaggatgtgttgcccgagttcaagaacgtggggaaagtgattcagttcaaggtcagctgcaatttggaacctcacctgaggggcaatgtatatgttcagtaccagtcggaagaagaatgccaagcagccctttctctgtttaacggacgatggtatgcaggacgacagctgcaatgtgaattctgcccagtgacccggtggaaaatggcgatttgtggtttatttgaaatacaacaatgtccaagaggaaaacactgcaactttcttcatgtgttcagaaatcccaacaatgaattctgggaagctaatagagacatctacttgtcttcagatcagactggctcctcctttggcaagaactccgagaggagggagaagatgggccaccacgaccactactacagcaggcagcggggaaggagaaaccctagtccagaccacacctacaaaagaaatggggaatccgagagaaaaaagagtagtcatagggggaagaaatctcacaaacgcacatcaaagagtcgggagaggcacaattcaccaagcagaggaagaaataggcaccgcagctgggaccagggccgccggagccagagccgcaggagccaccgcagccggagccaaagttcctctaggtgccgaagtcgtgggaggaggaagtcgggtaatagagacagaactgttcagagtccccaatccaaataaactagttttgttctt

SEQ ID NO: 343069 - DNA, 1449 bp, Artificial Sequence
  derived and/or modified sequence
atggccgcccccgagaagatgaccttccccgagaagcccagccacaagaagtacagagccgccctgaagaaggagaagagaaagaagagaagacaggagctggccagactgagagacagcggcctgagccagaaggaggaggaggaggacaccttcatcgaggagcagcagctggaggaggagaagctgctggagagagagagacagagactgcacgaggagtggctgctgagagagcagaaggcccaggaggagttcagaatcaagaaggagaaggaggaggccgccaagaagagacaggaggagcaggagagaaagctgaaggagcagtgggaggagcagcagagaaaggagagagaggaggaggagcagaagagacaggagaagaaggagaaggaggaggccctgcagaagatgctggaccaggccgagaacgagctggagaacggcaccacctggcagaaccccgagccccccgtggacttcagagtgatggagaaggacagagccaactgccccttctacagcaagaccggcgcctgcagattcggcgacagatgcagcagaaagcacaacttccccaccagcagccccaccctgctgatcaagagcatgttcaccaccttcggcatggagcagtgcagaagagacgactacgaccccgacgccagcctggagtacagcgaggaggagacctaccagcagttcctggacttctacgaggacgtgctgcccgagttcaagaacgtgggcaaggtgatccagttcaaggtgagctgcaacctggagccccacctgagaggcaacgtgtacgtgcagtaccagagcgaggaggagtgccaggccgccctgagcctgttcaacggcagatggtacgccggcagacagctgcagtgcgagttctgccccgtgaccagatggaagatggccatctgcggcctgttcgagatccagcagtgccccagaggcaagcactgcaacttcctgcacgtgttcagaaaccccaacaacgagttctgggaggccaacagagacatctacctgagccccgacagaaccggcagcagcttcggcaagaacagcgagagaagagagagaatgggccaccacgacgactactacagcagactgagaggcagaagaaaccccagccccgaccacagctacaagagaaacggcgagagcgagagaaagagcagcagacacagaggcaagaagagccacaagagaaccagcaagagcagagagagacacaacagcagaagcagaggcagaaacagagacagaagcagagacagaagcagaggcagaggcagcagaagcagaagcagaagcagaagcagaagaagcagaagaagcagaagccagagcagcagcagaagcagaagcagaggcagaagaagaagcggcaacagagacagaaccgtgcagagccccaagagcaagtag

SEQ ID NO: 343070 - DNA, 1449 bp, Artificial Sequence
  derived and/or modified sequence
atggcggcaccggagaaaatgaccttcccagagaagcctagccataaaaaatatcgtgcagcgctgaagaaggagaaaaggaaaaaacgtaggcaggaattggcccgcctgcgagattccggccttagtcagaaggaggaagaggaagacacatttatagaggaacagcaactggaagaagaaaaattgctcgagagagaacggcagcgattgcatgaggagtggctgctgagggaacagaaggcgcaggaagaattccgcattaaaaaggaaaaagaagaagccgctaagaagaggcaggaagagcaagagaggaaactgaaggaacagtgggaggagcagcagcgaaaagagcgcgaagaggaggaacaaaagcggcaggagaaaaaggaaaaggaggaagctctgcaaaagatgcttgatcaggcagagaacgagctagaaaacgggacgacctggcagaaccctgagccccctgttgattttcgggttatggaaaaagatcgggccaactgccccttttattcgaaaacaggagcctgccgttttggcgacaggtgcagcagaaaacataactttcccacatcgagcccaaccctcctcatcaagtctatgtttactacattcggcatggagcagtgccggagggacgactatgaccctgatgcatcactggaatactccgaggaggaaacctaccagcaattcctggacttctatgaggatgtcttgcccgaatttaagaatgtggggaaagttatacaattcaaggtgtcatgtaatttagaaccacacctcaggggcaatgtctacgtgcagtatcagtcagaggaagagtgccaggctgctctttctcttttcaacggtcgctggtatgccggaaggcagttgcagtgcgagttctgtcccgtgacccgatggaaaatggccatctgcggtctgttcgagatccagcagtgtcccagaggaaagcattgcaactttcttcacgtgttcaggaatcccaataacgagttctgggaagctaacagagatatatatctgagtccagaccgaaccggcagtagtttcggtaaaaatagcgaacggcgggagaggatgggccaccatgacgactactactcccgactacgtgggcgcaggaacccaagtcctgaccattcatacaagcgcaatggtgagagtgaaaggaagtcctcaaggcaccgaggcaagaaaagtcacaaacggacctctaaaagccgggagcgtcacaacagcagatccagaggccgaaatcgggacagatcgcgggacaggtcccgggggcgcggttcccggagccgttcccgctctcgtagtcggagatcaaggcggtcacgcagccagagttcttccagatcaaggtctcgcggaagaagaagaagcggaaacagagaccggacagtgcaaagccctaaatccaaatag

SEQ ID NO: 343071 - DNA, 1449 bp, Artificial Sequence
  derived and/or modified sequence
atggccgcccctgagaagatgaccttccctgagaagcccagccacaagaagtaccgggccgccctgaagaaggagaagaggaagaagaggcggcaggagctggcccggctgcgggacagcggcctgagccagaaggaggaggaggaggacaccttcatcgaggagcagcagctggaggaggagaagctgctggagcgggagcggcagaggctgcacgaggagtggctgctgcgggagcagaaggcccaggaggagttccgcatcaagaaggagaaggaggaggccgccaagaagaggcaggaggagcaggagaggaagctgaaggagcagtgggaggagcagcagaggaaggagcgggaggaggaggagcagaagaggcaggagaagaaggagaaggaggaggccctgcagaagatgctggaccaggccgagaatgagctggagaatggcaccacctggcagaaccctgagccccctgtggacttccgggtgatggagaaggaccgggccaactgccccttctacagcaagacaggagcctgccgctttggagaccgctgcagcaggaagcacaacttccccaccagcagccccaccctgctgatcaagtccatgttcaccaccttcggcatggagcagtgcagaagagatgattatgaccctgatgccagcctggagtacagcgaggaggagacctaccagcagttcctggacttctatgaagatgtgctgcctgagttcaagaatgtgggcaaggtgatccagttcaaggtgtcctgcaacctggagccccacctgcggggaaatgtgtatgtgcagtaccagagcgaggaggagtgccaggccgccctgagcctcttcaacggccgctggtacgccggccggcagctgcagtgtgagttctgccctgtgacccgctggaagatggccatctgtggcctgtttgagatccagcagtgcccccggggcaagcactgcaacttcctgcacgtgttcaggaaccccaacaatgagttctgggaggccaacagagacatctacctgagcccagacagaacaggcagcagctttgggaagaacagcgagcggcgggagaggatgggccaccatgatgactactacagccggctgcggggcagaagaaaccccagcccagaccacagctacaagagaaatggagagagcgagaggaagagcagccgccaccggggcaagaagagccacaagaggaccagcaagagccgggagcggcacaacagccgcagccggggcaggaacagagacaggagccgggacaggagccggggccggggcagccgcagccgcagccgcagccgcagccgccgcagcagaagaagccgcagccagagcagcagccgcagccgcagccggggcagaagaagaagtggcaacagagacagaacagtgcagagccccaagagcaagtag

SEQ ID NO: 343072 - DNA, 1449 bp, Artificial Sequence
  derived and/or modified sequence
atggccgcccccgagaagatgaccttccccgagaagcccagccacaaaaaataccgggccgctttgaaaaaggagaaaagaaaaaagcgccgacaagagttggctaggctgcgggatagcggtctgagccagaaggaggaggaagaggatacctttatcgaggaacagcaattagaagaggaaaagctgcttgaacgtgagcggcaaaggttgcacgaggagtggcttttacgcgagcagaaagcacaggaagaattccggatcaaaaaagaaaaggaagaagcggctaaaaagagacaggaggaacaagagaggaagctgaaggagcagtgggaggagcagcagcgaaaggagcgtgaggaagaagaacagaagaggcaggagaagaaggagaaggaggaagccttgcagaagatgttggaccaggcggaaaacgaactcgagaatggcaccacttggcaaaatcccgaaccacctgttgactttcgggtgatggagaaagaccgggccaactgcccgttttacagcaaaactggcgcctgcagatttggggaccggtgttcacgcaaacacaacttcccgacaagctcccctactttgttgatcaagagcatgttcactacctttggaatggaacagtgtcgtagggatgattacgacccagacgccagtctcgaatactccgaagaagaaacctaccaacagttcctggatttctatgaagacgttctgcccgaatttaagaatgtgggaaaagttattcagttcaaggttagttgtaacttggagccccaccttcgaggaaatgtctacgtgcagtaccagtcggaagaagagtgccaagctgcattgagcctgttcaacggtagatggtacgccggccgccaattacagtgtgagttttgccctgtgacccgctggaaaatggccatctgtggactgttcgagattcagcagtgcccgaggggaaagcattgtaacttcttgcatgtttttaggaaccccaacaacgagttctgggaggctaatcgagatatctacctcagtccggaccgaactgggagtagcttcggaaaaaatagcgaaagaagagaacgtatgggacaccatgacgattattatagcagattaagggggcgtcgaaacccttcccccgaccactcatacaaacgaaacggagagagcgagagaaagtcctcgcgacatcgcggaaagaagtcacacaagcgcacttccaaatcaagagagaggcataattcgcgatcgcgggggagaaatcgcgatcgctcacgcgaccgctcaaggggccgaggtagtcgttcccgctctaggtctagatctcgcagaagcagacgatcaagatctcagtcttcttcacgaagtagaagccgggggaggcgacgttccggcaatcgtgaccgtaccgtgcagagtccaaagtctaagtag

SEQ ID NO: 343073 - DNA, 1449 bp, Artificial Sequence
  derived and/or modified sequence
atggcggctcccgaaaagatgaccttccctgaaaagccatcccacaagaaatatcgagccgctctgaaaaaggagaaaagaaagaagcggcgacaggagctggcccgactgagagatagcggactgtctcagaaggaggaagaggaggatacttttattgaggaacagcaacttgaggaagagaagctgttagagcgcgaacggcagcggttgcatgaagagtggctgctccgcgagcagaaggcccaggaagagtttagaattaagaaggagaaggaggaggccgctaagaaacgacaggaggaacaggagcgaaaactgaaggaacagtgggaagagcagcagagaaaagaacgggaagaagaggagcagaagaggcaggagaagaaagaaaaggaggaggcgttacagaaaatgttggaccaagctgagaacgagctggagaacgggactacctggcaaaaccctgagccccctgtggatttccgcgttatggagaaagacagagccaattgtcctttctactccaaaaccggcgcatgccgcttcggtgacagatgttcacgcaagcataatttcccaacctcttctcctacgctgctgatcaaatcgatgttcactactttcgggatggagcaatgtcgtcgggatgactatgaccctgatgccagtctggagtatagcgaggaggaaacctaccagcaatttttagacttctatgaagacgtcctgccagaatttaagaatgttggcaaagtcattcagttcaaggttagttgtaatctcgaaccacatttgcgtggcaatgtgtacgttcagtaccagtctgaagaggagtgccaggctgcgttgagcctgttcaacggcaggtggtacgccggtaggcaactccaatgtgaattttgccctgttacacgctggaaaatggcaatctgcgggcttttcgagattcagcagtgcccaaggggaaagcattgcaacttcctgcacgtctttcgcaaccctaataacgagttctgggaagcgaatagagacatttacctctcaccagatcgcacgggtagttcctttggcaagaactctgagcgtcgggagcggatgggacatcacgatgattactattcacgactgcgtgggaggcgaaatccttccccggatcactcctacaagaggaacggcgagagcgagagaaaaagttctcgccacagaggtaaaaagagccataaacgtacctcaaagtcccgggaacgccacaatagtagatctcgcggtagaaatcgagaccgatctagagatcgcagtcggggacgcggaagcaggtcccgctctcgcagtagatcgcggaggagcaggcgcagtaggtcccaatcttcgagtcggtcaaggagtagaggccgtcgtcgcagtggaaacagggaccggacagtgcagagccccaaatccaagtag

SEQ ID NO: 343074 - DNA, 1187 bp, Artificial Sequence
  derived and/or modified sequence
ggcactaggaacagccccgagcggcgagacggtccccgccatgtctgcggccatgagggagaggttcgaccggttcctgcacgagaagaactgcatgactgaccttctggccaagctcgaggccaaaaccggcgtgaacaggagcttcatcgctcttggtgtcatcggactggtggccttgtacctggtgttcggttatggagcctctctcctctgcaacctgataggatttggctacccagcctacatctcaattaaagctatagagagtcccaacaaagaagatgatacccagtggctgacctactgggtagtgtatggtgtgttcagcattgctgaattcttctctgatatcttcctgtcatggttccccttctactacatgctgaaggtgtggtctggactagggtttctccttccccgctgcctgctgtagtagtggtcgtggtggcccatcttctccctcctctcggagttcttgccaaaggaggagccagtctgatctgaagacaagtagatgtctctattagcttcccagaattcattgttgggatttctgaacacatgaagaaagttgcagtgttttcctcttggacattgttgtatttcaaataaaccacaaatcgccattttccaccgggtcactgggcagaattcacattgcagctgtcgtcctgcataccatcgtccgttaaacagagaaagggctgcttggcattcttcttccgactggtactgaacatatacattgcccctcagtgtggcttcctgttgtggtgcatggccccgagcccttctaatggggctgaactgctctacaagcgcatcatccgtcctttcttcctgaagcacgagtcccagatggacagtgtggtcaaggaccttaaagacaaggccaaagagactgcagatgccatcactaaagaagcgaagaaagctaccgtgaatttactgggtgaagaaaagaagagcacctaaaccagactggatggaaacttcctgccctctctgtaccttcctactggagcttgatgttatattagggactgtggtataattattttaataatgttgccttggaaacatttttgagatattaaagattggaatgtgttgtaagtttctttgcttacttttactgtctatatatatagggagcactttaaacttaatgcagtgggcagtgt

SEQ ID NO: 343075 - DNA, 1491 bp, Artificial Sequence
  derived and/or modified sequence
gaggggcggggcggtgccggcaagatggctgcgcccgagaagatgacgtttcccgagaaaccaagccacaaaaagtacagggccgccctgaagaaggagaaacgaaagaaacgtcggcaggaacttgctcgactgagagactcaggactctcacagaaggaggaagaggaggacacttttattgaagaacaacaactagaagaagagaagctattggaaagagagaggcaaagattacatgaggagtggttgctaagagagcagaaggcacaagaagaattcagaataaagaaggaaaaggaagaggcggctaaaaaacggcaagaagaacaagagagaaagttaaaggaacaatgggaagaacagcagaggaaagagagagaagaggaggagcagaaacgacaggagaagaaagaaaaagaggaagctttgcagaagatgctggatcaggctgaaaatgagttggaaaatggtaccacatggcaaaacccagaaccacccgtggatttcagagtaatggagaaggatcgagctaattgtcccttctacagtaaaacaggagcttgcagatttggagatagatgttcacgtaaacataatttcccaacatccagtcctacccttcttattaagagcatgtttacgacgtttggaatggagcagtgcaggagggatgactatgaccctgacgcaagcctggagtacagcgaggaagaaacctaccaacagttcctagacttctatgaggatgtgttgcccgagttcaagaacgtggggaaagtgattcagttcaaggtcagctgcaatttggaacctcacctgaggggcaatgtatatgttcagtaccagtcggaagaagaatgccaagcagccctttctctgtttaacggacgatggtatgcaggacgacagctgcagtgtgaattctgccccgtgacccggtggaaaatggcgatttgtggtttatttgaaatacaacaatgtccaagaggaaagcactgcaactttcttcatgtgttcagaaatcccaacaatgaattctgggaagctaatagagacatctacttgtctccagatcggactggctcctcctttgggaagaactccgaaaggagggagaggatgggccaccacgacgactactacagcaggctgcggggaaggagaaaccctagtccagaccactcctacaaaagaaatggggaatccgagaggaaaagtagtcgtcacagggggaagaaatctcacaaacgcacatcaaagagtcgggagaggcacaattcacgaagcagaggaagaaatagggaccgcagcagggaccgcagccggggccggggcagccggagccggagccggagccggagccgcaggagccgccgcagccggagccaaagttcctctaggtcccgaagtcgtggcaggaggaggtcgggtaatagagacagaactgttcagagtcccaaatccaaataaactagttttgttcttaaa

SEQ ID NO: 343076 - DNA, 3736 bp, Artificial Sequence
  derived and/or modified sequence
cggactggctgtgaggcggtcctgcctcgctgccttcagtccctagtgtctgggtccccgccctccagccgcctttgagtcgtgcctgggtcctcgcccttgcctcagaaccgcgaagaaaggaagctcgcgtgtttgctagaaaacctagttgggagtgcgaggcagagaacgttcagcacctttgttcctcccgaaccctcgggacagaggcagggttctgagggcagggattccccctcgtcttggccccaccgcccgggctgggcactaaactcgggccgcggcggggcgagcgaggcgggctccggagggagctgacgcctgatgatggcgcagtccaacatgtttaccgtggctgatgtgttgagtcaagatgaactgcgcaaaaagctataccagacgtttaaggatcggggtatactggatacactcaagacacaacttcgaaaccagctaattcatgagttgatgcaccctgtattgagtggagaactgcagcctcggtccatttcagtagaagggagctccctcttaataggcgcctctaactctttagtggcagatcacttacaaagatgtggctatgaatattcactttctgttttctttccagaaagtggtttggcaaaagaaaaggtatttactatgcaggatctattacaactcattaaaatcaaccctacttccagtctctacaaatcactggtttcaggatctgataaagaaaatcaaaaagccattaagtctgtgacttaatcgccaagtctcttggtagtaatgttagcagaatataaataaattggagcacaagatattctggactgcccgcaaactagaccatctctactgaagttcagtatggttttcttatgcattttttaaaagaattggcagaatatcatcaagctaaagagagttgtaatatggaaactcagacaagttcgacatttaacagagattctctggctgagaagcttcagcttattgatgatcagtttgcagatgcttaccctcagcgtatcaagttcgaatctttagaaataaagctaaatgagtataagagagaaatagaagagcaacttcgggcagaaatgtgtcaaaagttgaagttttttaaagataccgagatagcaaaaattaaaatggaagcaaaaaaaaagtatgaaaaggagttaaccatgttccagaatgattttgaaaaagcttgtcaagcaaaatctgaagctctcgttcttcgggaaaagagtacccttgaaagaattcacaagcaccaagagattgaaacaaaagaaatttatgctcaaaggcaacttttactaaaagatatggatttgctaagaggaagagaagcagagctgaagcaaagagttgaagcttttgaattgaaccagaagctccaggaagaaaaacataaaagcataactgaggcacttaggagacaggagcagaatataaagagttttgaggagacctatgaccgaaagctcaagaatgaacttctaaagtatcaacttgaactgaaggatgactacatcattagaactaatcgactgattgaagatgaaaggaagaataaagaaaaagctgttcatttgcaagaggagctcatagctattaattcaaaaaaggaggaactcaatcaatctgtaaatcgtgtgaaagaacttgagcttgaattagagtctgtcaaagcccagtctttggcaataacaaaacaaaaccatatgctgaatgaaaaggttaaagagatgagtgattattcactactaaaagaagagaaactggagcttctggcacaaaataaattacttaaacaacaactggaagagagtagaaatgaaaacctgcgtctcctaaaccgcctagctcagccggctcctgaacttgcagtctttcagaaagaactacggaaagccgaaaaggctatagtggttgagcatgaggagttcgaaagctgcaggcaagctctgcacaaacaactgcaagacgaaattgagcattctgcacagctgaaggcccagattctaggttacaaagcttctgtaaagagtttaactactcaggttgccgatttaaaattgcaactgaagcaaactcagacagccctagagaatgaagtgtactgcaatccaaagcagtctgtgatcgatcgttctgtcaatggattaataaatggcaatgtggtgccttgcaatggtgagataagtggggatttcttgaacaatccttttaaacaggaaaacgttctagcacgtatggttgcatcaaggatcacaaattatccaactgcatgggtggagggtagttcccctgattctgaccttgagtttgtagccaatactaaggcaagggtcaaagagcttcagcaagaggccgaacgcttggaaaaggctttcagaagttaccatcggagagtcattaaaaactctgccaaaagcccactagcagcaaagagcccaccatctctgcacttgctggaagccttcaaaaacattacttccagttccccggaaagacatatttttggagaggacagagttgtctctgagcagcctcaagtgggcacacttgaagaaaggaatgacgtcgtggaagcactgacaggcagtgcagcctcgaggctccgcgggggcacttcctccagacgcctctcttccacaccccttccaaaagcaaaaagaagcctcgaaagtgaaatgtatctggaaggtctgggcagatcacacattgcttcccccagtccttgtcctgacagaatgcccctaccatcacccactgagtctaggcacagcctctccatccctcctgtctccagccctccggagcagaaagtgggtctttatcgaagacaaactgaacttcaagacaaaagtgaattttcagatgtggacaagctagcttttaaggataatgaggagtttgaatcatcttttgaatctgcagggaacatgccaaggcagttggaaatgggcgggctttctcctgccggggatatgtctcatgtggacgctgctgcagctgctgtgcccctctcatatcagcacccaagtgtagatcagaaacaaattgaagaacaaaaggaagaagaaaaaatacgggaacagcaagtgaaagaacgaaggcagagagaagaaagaaggcagagtaacctacaagaagttttagaaagggaacgaagagaactagaaaaactgtatcaggaaaggaagatgattgaagaatcactgaagattaaaataaaaaaggaattagaaatggaaaatgaattagaaatgagtaatcaagaaataaaagacaaatctgctcacagtgaaaatcctttagagaaatacatgaaaatcatccagcaggagcaagaccaggagtcggcagataagagctcaaaaaagatggtccaagaaggctccctagtggacacgctgcaatctagtgacaaagtcgaaagtttaacaggcttttctcatgaagaactagacgactcttggtaaccatgtttgctgcccagcttctaacttacataccgtgagaagttacgtaacatttactcctttgtaaatgtttccctatcatcagacaaaactcaataaaaatgtgtgtaatccaatgtgggtttttttttccataattaattttgataccatagtgtgtgaaccaagaataatctagtcacgtgaaacctcttctccagtcatagtatttctcattcattataataaaagtaactggcttttaa

SEQ ID NO: 343077 - protein, 160 aa, Artificial Sequence
  derived and/or modified sequence
MQFMLLFSRQGKLRLQKWYVPLSDKEKKKITRELVQTVLARKPKMCSFLEWRDLKIVYKRYASLYFCCAIEDQDNELITLEIIHRYVELLDKYFGSVCELDIIFNFEKAYFILDEFLLGGEVQETSKKNVLKAIEQADLLQEKTETMYHSKSFIGFKKAY

SEQ ID NO: 343078 - protein, 202 aa, Artificial Sequence
  derived and/or modified sequence
MPAGCPPHSTTASLPQHGDRGFPFAAAAAAGQAPPRPRPAAAMQFMLLFSRQGKLRLQKWYVPLSDKEKKKITRELVQTVLARKPKMCSFLEWRDLKIVYKRYASLYFCCAIEDQDNELITLEIIHRYVELLDKYFGSVCELDIIFNFEKAYFILDEFLLGGEVQETSKKNVLKAIEQADLLQEKTETMYHSKSFIGFKKAY

SEQ ID NO: 343079 - protein, 153 aa, Artificial Sequence
  derived and/or modified sequence
  misc_feature (1)..(1): Xaa can be any naturally occurring amino acid
XLLFSRQGKLRLQKWYVPLSDKEKKKITRELVQTVLARKPKMCSFLEWRDLKIVYKRYASLYFCCAIEDQDNELITLEIIHRYVELLDKYFGSVCELDIIFNFEKAYFILDEFLLGGEVQETSKKNVLKAIEQADLLQESQNEEWGGLSEDIL

SEQ ID NO: 343080 - DNA, 3492 bp, Artificial Sequence
  derived and/or modified sequence
gggtgtcctccccacagcaccacggcttctcttcctcagcacggcgacaggggcttccccttcgccgccgccgccgccgccggccaagctccgccgcgcccgcggcccgcggccgccatgcagtttatgttgctttttagtcgtcagggaaagcttcgactgcaaaaatggtatgtcccactatcagacaaagagaagaaaaagatcacaagagaacttgttcagaccgttttagcacggaaacctaaaatgtgcagcttccttgagtggcgagatctgaagattgtttacaaaagatatgctagtctgtatttttgctgtgctattgaggatcaggacaatgaactaattaccctggaaataattcatcgttatgtggaattacttgacaagtatttcggcagtgtctgtgaactagatatcatctttaattttgagaaggcttattttattttggatgagtttcttttgggaggggaagttcaggaaacatccaagaaaaatgtccttaaagcaattgagcaggctgatctactgcaggagaaaacagagactatgtatcacagcaagagtttcattgggtttaagaaagcgtactagaatacgtgctggagtactgacatgcatcaaaatgtagtaggatatataaattcagtttgtaatgacaattttgtcaagtttgttatttatattttagcattacctgaaaagtctaattacattaaatcccaagggatagtcccaattacttcattaaactggtattttcatagggaattttgcttggataatgatccattattggggcttataatttattttttacacagaatatggaaatagcttcagaggttcattgacaataaagcattcattaaatactgtgaatcactaatgccattgatacagaagaatttccctatgaaaatgagagcttctgtgagaaaatgaagtagttgggagtttaatttcttattaatatgattttaacttgctgcttcattccactatattctgagttgggggaaaagggcagctatctctttaaaatatttaggaattctttgaggattaaaatgtaactggcttttgtcctcagatacgtttgtaattaatggttgtgtaagtttagggatttgttagatatttttcttggaacagtttacatgattttgtagttcaacatttcaaagtttcaacttgaataaatattaaaatgaggatactttaaagacactcaaataagcaattttaaacttgctttctggtggggatataatccctttgagagtctgaaggatgatgggctgtcaccccaggaaaatttgcacatcattttgtttctaatttcagggaactctcagagcccctagaagtccttctgtagacactcaaatctggagagttcgttaaaatctgtcttgaggatttttaaaaaagtaatatcctcagtctcagtcaaattctttggattttttgcttttgtaggtataagtaaacggttaaaaaccttcattgctacttaaaataccagatgagtgactacttttccagtttttattgggaaagatttttctctaggttctttagtttatgtaatacaaatgaactaatgaatttaaatactggtggaaggggaatattctaattgaatttttggtcaactcagtattgaccagatgacttacactgaaaatcttttcataatattagtagtaaatatagtgttttaggattttgtaaaatttctggaggatgtctgtcatcattttgaacactgtatgtagtaaagttagaaaaaaatgaatctaaagtcttgggcattgtttagaagttaaatattcagccttaaaccaaagaatgaaagcaaacagaaacttaagttttagttatctttactgtgagctaaatgttctagaaatctgattgtgtctgtgtcagtttgtatactgtgtgtaagaatatatgcatttcttttgtagccacgtcatgaatattttaatgtccctgtgtactaaatgactactcatcgagtatgcagaatttcacagaggaaatagaatgctgatatacatatgaaagaaaatatcctcagcatggtgatttattgtcttgtataataatagtagaacattttagaactagtacttttatgattgtatttttttcctgttcacattccaaacttttctgttttattttcattctatatgtgatcttgatacagctcattcctttctgcaactgatttaatctcatcttgacaaaatatgacctagaagtgttttgagtaatattaaatcttaaacacatacatattattaatgaaccatctgtgatttatcttataagaggaaaacatgacaatcattaaaatgtttaccaaagaaaatatagctgaagtgctaggtcaaaataagcagtgccataatatatagtgtagtttggtcttcaaatatggaggttaaaaaaagaaactattttgtgtgattatcttacaatctgtatgagctaatgtgttctaatgtatcacataaaagtatatgtgaaaatattacaagaaactaaaattaatttgtaccattatataatatttaaggttaaaacattcagtattaagaaattttgtagtgccacatttattgaatcacatttgtgctatataataatatcaaacaatccctttaagaacttattagagagctatgtctgaagtctgttctgcaatatctgttgctgaataataactctttcaaagcattaatgctgagtttatatagttcaaaaattctaatattcattcagttttaatacctaaatacttatattttactagtgatggcattctaatatattaagtcctcatttaaatacttgatactttgttaactgtggcattatatttctgaattttaaaacctttaatattggtaactattgcatattcttttaataaaacatgcagcatatttttttataaaaggaaaagaattcattgtttatatctagagagcataaagcctaagttaagtaagttattaaacaataacttcacaagatgttcaaatcgatttatcactgaaagaagatctatgaaaatgtgttttgaccaaacttagtattaggcaggtacacagataagattttccattcttaacattctcactgtaatgcacgacatttgaagcacctggatgtgctatcaatcaggtgggaaatttagcattatatattggaagcattgagaaacattggtctttcatttctatttttttttcccctcctttcctcctcctgccccacaatatattattcatctggttttaatgctacataaatatgcattgtctcatgcctgtttgtgttggatgccttgtgctaagctgtaacaaaatgttgcttcttttgctgtctgtatacagctgcttgctttaaattagtagattctgaaatagctttccttgcatgtctaaaataaaagtattgcatgta

SEQ ID NO: 343081 - DNA, 1496 bp, Artificial Sequence
  derived and/or modified sequence
atgccagccgggtgtcctccccacagcaccacggcttctcttcctcagcacggcgacaggggcttccccttcgccgccgccgccgccgccggccaagctccgccgcgcccgcggcccgcggccgccatgcagtttatgttgctttttagtcgtcagggaaagcttcgactgcaaaaatggtatgtcccactatcagacaaagagaagaaaaagatcacaagagaacttgttcagaccgttttagcacggaaacctaaaatgtgcagcttccttgagtggcgagatctgaagattgtttacaaaagatatgctagtctgtatttttgctgtgctattgaggatcaggacaatgaactaattaccctggaaataattcatcgttatgtggaattacttgacaagtatttcggcagtgtctgtgaactagatatcatctttaattttgagaaggcttattttattttggatgagtttcttttgggaggggaagttcaggaaacatccaagaaaaatgtccttaaagcaattgagcaggctgatctactgcaggagaaaacagagactatgtatcacagcaagagtttcattgggtttaagaaagcgtactagaatacgtgctggagtactgacatgcatcaaaatgtagtaggatatataaattcagtttgtaatgacaattttgtcaagtttgttatttatattttagcattacctgaaaagtctaattacattaaatcccaagggatagtcccaattacttcattaaactggtattttcatagggaattttgcttggataatgatccattattggggcttataatttattttttacacagaatatggaaatagcttcagaggttcattgacaataaagcattcattaaatactgtgaatcactaatgccattgatacagaagaatttccctatgaaaatgagagcttctgtgagaaaatgaagtagttgggagtttaatttcttattaatatgattttaacttgctgcttcattccactatattctgagttgggggaaaagggcagctatctctttaaaatatttaggaattctttgaggattaaaatgtaactggcttttgtcctcagatacgtttgtaattaatggttgtgtaagtttagggatttgttagatatttttcttggaacagtttacatgattttgtagttcaacatttcaaagtttcaacttgaataaatattaaaatgaggatactttaaagacactcaaataagcaattttaaacttgctttctggtggggatataatccctttgagagtctgaaggatgatgggctgtcaccccaggaaaatttgcacatcattttgtttctaatttcagggaactctcagagcccctagaagtccttctgtagacactcaaatctggagagttcgttaaaatctgtcttgaggatttttaaaaaagtaatatcctcagtctcagtcaaattctttggattttttgcttttgta

SEQ ID NO: 343082 - DNA, 483 bp, Artificial Sequence
  derived and/or modified sequence
atgcaattcatgttactcttttctcgccagggaaagctacgcctacagaagtggtacgttcctttgagtgacaaggagaagaaaaagatcacgcgcgagctggtgcagaccgtgttagccaggaaaccaaaaatgtgctctttcctcgagtggagagacctaaagatcgtgtacaaaagatacgcatccttgtatttctgctgtgctattgaagaccaggataacgagctgataacgctcgagatcatacataggtatgttgaactccttgacaagtactttggctccgtatgcgagctagacatcatttttaacttcgagaaagcttacttcatcttagacgaatttctgctcggaggagaggtgcaagaaacaagcaagaaaaacgtactgaaagcgattgaacaggctgacctgctgcaggaaaagacggagaccatgtatcacagtaaaagctttattggcttcaagaaggcttattag

SEQ ID NO: 343083 - DNA, 609 bp, Artificial Sequence
  derived and/or modified sequence
atgcctgctggatgccctccacatagcaccaccgccagcttacctcaacatggcgataggggcttcccattcgcagcagcagctgctgctggacaggcgcccccccgtcctagacccgctgccgccatgcagtttatgctgctttttagcagacagggcaaactccgacttcaaaagtggtatgtccccctgtctgacaaggaaaaaaaaaagatcacgcgggagctcgtgcagacggtcctggctcgtaagccaaagatgtgctcttttctggagtggagagatttgaaaatcgtctataagcgatacgcaagtctctacttttgctgtgctatagaagaccaggacaatgagctgataacactggagattatacacagatatgtagagctccttgataaatacttcggcagcgtgtgtgagcttgatattatctttaactttgagaaagcatatttcatcttagacgagttcctgctcggaggtgaagtccaagagacctccaaaaagaacgttttaaaggcaatcgagcaggccgatttgctccaggaaaagaccgaaacaatgtaccatagcaaatccttcatcggattcaagaaagcttactag

SEQ ID NO: 343084 - DNA, 483 bp, Artificial Sequence
  derived and/or modified sequence
atgcagttcatgctgctcttcagccggcagggcaagctgcggctgcagaagtggtacgtgcccctgagtgacaaggagaagaagaagatcacccgggagctggtgcagacagtgctggccaggaagcccaagatgtgcagcttcctggagtggagggacctgaagatcgtgtacaagagatatgccagcctgtacttctgctgtgccatcgaggaccaggacaatgaactcatcaccctggagatcatccaccgctacgtggagctgctggacaagtacttcggctctgtgtgtgagctggacatcatcttcaactttgagaaggcctacttcatcctggatgagttcctgctgggcggggaggtgcaggagaccagcaagaagaatgtgctgaaggccatcgagcaggccgacctgctgcaggagaagacagagaccatgtaccacagcaagagcttcatcggcttcaagaaggcctactag

SEQ ID NO: 343085 - DNA, 609 bp, Artificial Sequence
  derived and/or modified sequence
atgcctgctggctgccccccccacagcaccacagccagcctgccccagcacggggaccggggcttcccctttgctgctgctgctgctgctggccaggccccaccccggcccaggcctgctgctgccatgcagttcatgctgctcttcagccggcagggcaagctgcggctgcagaagtggtacgtgcccctgagtgacaaggagaagaagaagatcacccgggagctggtgcagacagtgctggccaggaagcccaagatgtgcagcttcctggagtggagggacctgaagatcgtgtacaagagatatgccagcctgtacttctgctgtgccatcgaggaccaggacaatgaactcatcaccctggagatcatccaccgctacgtggagctgctggacaagtacttcggctctgtgtgtgagctggacatcatcttcaactttgagaaggcctacttcatcctggatgagttcctgctgggcggggaggtgcaggagaccagcaagaagaatgtgctgaaggccatcgagcaggccgacctgctgcaggagaagacagagaccatgtaccacagcaagagcttcatcggcttcaagaaggcctactag

SEQ ID NO: 343086 - DNA, 483 bp, Artificial Sequence
  derived and/or modified sequence
atgcagttcatgctgctgttcagccggcagggcaagctgcggctgcagaagtggtatgtccccctgtccgacaaggaaaaaaagaaaatcactagggagttggtgcagaccgtcctggcaaggaagccaaaaatgtgctcatttctcgagtggcgggacctcaagatcgtgtacaagagatatgcctctctgtacttctgctgcgctatcgaggatcaggacaacgagctgatcacattagagattatccatagatatgtcgaactgctcgacaaatactttgggtcagtctgcgaactcgatataattttcaattttgagaaggcctattttatacttgatgaattcctgttggggggcgaggtccaggaaacctcaaagaagaacgtgctcaaggctattgagcaggccgatctgctgcaggagaaaaccgagacaatgtaccactccaagagcttcattggattcaaaaaggcctattag

SEQ ID NO: 343087 - DNA, 609 bp, Artificial Sequence
  derived and/or modified sequence
atgcccgccggctgccccccccacagcaccaccgccagcctgccccagcatggcgaccgcggattcccattcgccgccgccgcggcagccggacaggcccccccccgtccgagacccgcggcagccatgcagttcatgctcctcttttcccggcagggtaaactgcggcttcagaagtggtacgttcctttgtcagataaggagaaaaaaaagatcacccgggaacttgtccagaccgtccttgctagaaagccaaagatgtgcagtttcctggagtggcgggacctcaagatagtatataaaaggtacgcctctttatatttttgctgtgcaatcgaagaccaggacaacgaacttatcacgctcgagattatacaccggtacgtggagttactggacaaatattttgggagcgtttgcgaattggatattatcttcaactttgagaaggcttattttatcctggacgagttccttctaggaggagaagtgcaggaaacaagcaagaagaacgtgttaaaagctatcgagcaggccgatctgctccaagagaaaaccgagaccatgtaccattcgaagagctttatcggcttcaaaaaggcgtactag

SEQ ID NO: 343088 - DNA, 483 bp, Artificial Sequence
  derived and/or modified sequence
atgcaattcatgctgctattctcccggcaggggaaacttcgtctgcagaagtggtatgtgccactgtctgacaaagagaaaaaaaagattactagagagttagttcagaccgtcctagcaaggaagccaaaaatgtgtagttttctggaatggcgggatctcaagatagtttataagcggtacgccagcctgtacttctgttgcgcaattgaagaccaagataatgaactaatcaccttggaaataatacatagatatgttgaattgctggataagtattttgggagtgtgtgtgagttagatataatttttaactttgagaaagcatattttatcctggatgaatttctgctcggaggggaggtgcaagagacgtctaaaaaaaacgtgcttaaggcaatcgaacaagctgatctgctccaggaaaaaacggagaccatgtaccactcaaaaagtttcattggattcaagaaagcttactag

SEQ ID NO: 343089 - DNA, 609 bp, Artificial Sequence
  derived and/or modified sequence
atgcctgctggctgtcctcctcattcgaccacggcctcacttccacagcatggagaccgaggatttcccttcgccgcagcggctgctgccggacaagccccaccacggcctcggcctgcagcggctatgcaatttatgttgctattcagccgtcaggggaaactccggctgcagaaatggtacgtccccctaagtgataaggaaaagaagaagatcacgcgcgagctggtccagactgtcttagctaggaaaccgaaaatgtgctccttcctcgagtggagagacctcaagatcgtatataagcggtacgcttccctttatttctgctgtgccattgaagatcaggataatgagctgattacactcgaaatcattcatcgctacgtggaactgctggacaagtactttggatccgtgtgtgagctggacataatctttaacttcgaaaaggcttacttcattctggatgaattcctgctgggcggagaagtgcaggaaacaagcaagaaaaatgtgctgaaagctattgagcaagccgatctcctacaagaaaaaactgagacgatgtatcacagcaagagctttatcggcttcaagaaagcctattag

SEQ ID NO: 343090 - DNA, 483 bp, Artificial Sequence
  derived and/or modified sequence
atgcagttcatgctgctgttcagcagacagggcaagctgagactgcagaagtggtacgtgcccctgagcgacaaggagaagaagaagatcaccagagagctggtgcagaccgtgctggccagaaagcccaagatgtgcagcttcctggagtggagagacctgaagatcgtgtacaagagatacgccagcctgtacttctgctgcgccatcgaggaccaggacaacgagctgatcaccctggagatcatccacagatacgtggagctgctggacaagtacttcggcagcgtgtgcgagctggacatcatcttcaacttcgagaaggcctacttcatcctggacgagttcctgctgggcggcgaggtgcaggagaccagcaagaagaacgtgctgaaggccatcgagcaggccgacctgctgcaggagaagaccgagaccatgtaccacagcaagagcttcatcggcttcaagaaggcctactag

SEQ ID NO: 343091 - DNA, 609 bp, Artificial Sequence
  derived and/or modified sequence
atgcccgccggctgccccccccacagcaccaccgccagcctgccccagcacggcgacagaggcttccccttcgccgccgccgccgccgccggccaggccccccccagacccagacccgccgccgccatgcagttcatgctgctgttcagcagacagggcaagctgagactgcagaagtggtacgtgcccctgagcgacaaggagaagaagaagatcaccagagagctggtgcagaccgtgctggccagaaagcccaagatgtgcagcttcctggagtggagagacctgaagatcgtgtacaagagatacgccagcctgtacttctgctgcgccatcgaggaccaggacaacgagctgatcaccctggagatcatccacagatacgtggagctgctggacaagtacttcggcagcgtgtgcgagctggacatcatcttcaacttcgagaaggcctacttcatcctggacgagttcctgctgggcggcgaggtgcaggagaccagcaagaagaacgtgctgaaggccatcgagcaggccgacctgctgcaggagaagaccgagaccatgtaccacagcaagagcttcatcggcttcaagaaggcctactag

SEQ ID NO: 343092 - protein, 96 aa, Artificial Sequence
  derived and/or modified sequence
MSGSHSVTQAGVEWYNHSSLQPQTPRLKYPPTSASQVAVTTVTDQAFVTLATDDIYCQGALVLGQSLRRHRLTRKLVVLITPQVSSLLRVSLVAQA

SEQ ID NO: 343093 - DNA, 291 bp, Artificial Sequence
  derived and/or modified sequence
atgagcggcagccacagcgtgacccaggccggcgtggagtggtacaaccacagcagcctgcagccccagacccccagactgaagtacccccccaccagcgccagccaggtggccgtgaccaccgtgaccgaccaggccttcgtgaccctggccaccgacgacatctactgccagggcgccctggtgctgggccagagcctgagaagacacagactgaccagaaagctggtggtgctgatcaccccccaggtgagcagcctgctgagagtgagcctggtggcccaggcctag

SEQ ID NO: 343094 - DNA, 291 bp, Artificial Sequence
  derived and/or modified sequence
atgtctggtagccattctgtgacgcaggcgggtgttgaatggtacaaccacagctctttacagccacagacccccagactcaagtatcctccaacgtccgcgagccaagttgctgtaaccactgtgacagatcaggcatttgtgaccttggcaacggatgacatttactgtcagggagccctcgtccttggccagagtctgagaaggcatcggcttaccagaaaacttgtagtactgataacacctcaggtgagctcgttgctgcgggtgtctctggttgcccaggcctag

SEQ ID NO: 343095 - DNA, 291 bp, Artificial Sequence
  derived and/or modified sequence
atgagcggcagccacagcgtgacccaggccggcgtggagtggtacaaccacagcagcctgcagccccagaccccccggctgaagtacccacccaccagcgccagccaggtggccgtgaccaccgtgacagaccaggcctttgtgaccctggccacagatgacatctactgccagggcgccctggtgctgggccagagcctgcggcggcaccggctgaccaggaagctggtggtgctgatcaccccccaggtgagcagcctgctgcgggtgtccctggtggcccaggcctag

SEQ ID NO: 343096 - DNA, 694 bp, Artificial Sequence
  derived and/or modified sequence
ctgggcgcaggtctgcgggtccgcgcccactgcgtgcggcgccacggaccatgtcggggtctcactctgtcacccaggctggagtagagtggtacaatcacagctcactgcagcctcaaactcccaggctcaagtatcctcctacctcagcctcccaagtagctgtaactacagtgactgatcaggcttttgtcacactggccacagatgacatctactgccagggcgccctggtcctggggcagtcactgaggagacacaggctgacgaggaagctggtggtgttgatcactcctcaggtgtccagcctgctcagggtctcactcgtcgcccaggcttgagtgcagtgataccatctcggctcactgcaacctctccctcactggcccaagtgatcttccctcctcagccttctaagcagctgggaccacaagtatgtgcccgcatgcttggctatttttatttttattttttgtatttttggtagagacagggtttcgtcacattgcctaggctgatcttgaactcctggactcactcagtccacccaggttggcctcccaaagtgctgggattacaggcatgagccacggcgccctgccaaggagtctttttaaaaataatttccttttacaattccctttgtctttaattctcaaataaagcaaatacataaataaatgcatctaatgaa

SEQ ID NO: 343097 - DNA, 291 bp, Artificial Sequence
  derived and/or modified sequence
atgagcggcagccacagcgtgacccaggccggcgtggagtggtacaaccattcttctctgcaaccacagacaccccggctcaaatacccccccacatctgcgtcacaagtggcagtgaccacagtcacggatcaggcattcgtgacccttgcaacagacgatatttactgccaaggagccttggttctgggccagagcttgcgacgacatcgtctgacccgtaaactggtggttctcatcaccccccaggtgagctctctgctgcgggtgtctctggtagcccaggcgtag

SEQ ID NO: 343098 - DNA, 291 bp, Artificial Sequence
  derived and/or modified sequence
atgagtggtagccatagcgtgacgcaggcaggtgttgaatggtataatcattcatcactgcagccacaaacacctcgactcaaatacccccctacttctgcctcgcaggtggccgttacaaccgttaccgatcaagctttcgtgacactggccaccgatgacatttattgccagggtgcacttgtgcttggacagagcttgcggcgacaccgtctgacgaggaagctggtcgtcctcattacaccccaggtgagttccctgttacgggtatccctcgtagcccaggcctag

SEQ ID NO: 343099 - DNA, 417 bp, Artificial Sequence
  derived and/or modified sequence
atgagtgtgactgaccaggcctttgtcaccttggctacgaacgacatatattgtcagggcgcccttgttcttgggcagtctttaaggcggcaccgacttacgcgcaaattagttgtactaattacccctcaggtctctagcctcctccgcgtcatattatccaaggtgttcgacgaggtgatcgaggtgaatcttatagactccgccgactacatacacctggccttcttaaaacgccccgaattggggctgacgctcacaaagctgcactgctggaccttaacccactattctaagtgcgtgttcttggacgctgataccctcgtgctctccaatgtcgacgaactgtttgaccgcggcgagttctccgcagcacccgaccctggatggccagattgtttcaactctggagtgtag

SEQ ID NO: 343100 - DNA, 624 bp, Artificial Sequence
  derived and/or modified sequence
agtgcgccgagccagggcaccgagtgctggggaatacaggccgtccaggcgcggcggggcgcggggagacggaggctgccggagcctggaaatccacgcggattcccggagacggcgcctctgctctgcgggttcgtggcgaggaagtccacccactgctcccgggcgcaggtctgcaggtccgcgcccactgcccgcggcgccactgaccatgtcggtgactgatcaggcttttgtcacactagccaccaatgacatctactgccagggcgccctggtcctggggcagtcactgaggagacacaggctgacgaggaagctggtggtgttgatcactcctcaggtgtccagcctgctcagggtcatcctctcgaaggtgttcgatgaagtcattgaagtgaatctaatcgatagtgccgactacatccacctggcctttctgaagagacctgagctcgggctcaccctcaccaagcttcactgttggactctcactcactacagcaagtgtgtcttcctggatgcagacactctggtgctgtccaatgtcgatgagctgtttgacaggggagagttttctgcggccccggaccccggatggccggattgcttcaatagcggggt

SEQ ID NO: 343101 - DNA, 417 bp, Artificial Sequence
  derived and/or modified sequence
atgtctgtgacagaccaggcctttgtgaccctggccaccaatgacatctactgccagggcgccctggtgctgggccagagcctgcggcggcaccggctgaccaggaagctggtggtgctgatcaccccccaggtgagcagcctgctgcgggtcatcctgagcaaggtgtttgatgaggtgattgaggtgaacctgattgacagcgctgactacatccacctggccttcctgaagaggcctgagctgggcctgaccctgaccaagctgcactgctggaccctgacccactacagcaaatgtgtgttcctggatgctgacaccctggtgctgagcaatgtggatgagctgtttgacagaggagagttctctgctgccccagaccccggctggccagactgcttcaacagcggcgtgtag

SEQ ID NO: 343102 - DNA, 417 bp, Artificial Sequence
  derived and/or modified sequence
atgagcgtgaccgaccaggccttcgtgaccctggccaccaacgacatctactgccaaggcgcacttgtacttggccaaagcttgaggaggcacagacttacacgcaaattggtggtccttatcaccccacaagtcagtagcctgttgagagttatcctgtcaaaggttttcgatgaagtcattgaggtcaacttgatcgactctgcagactatattcatcttgcctttctgaaacggcctgagttaggcctgacactaacgaaactccattgctggaccctgacacactattccaaatgcgtgtttctggacgccgatactctcgtgctgagcaatgttgatgagctttttgaccgtggcgaattcagtgccgcgcctgatccaggctggcctgactgcttcaatagcggcgtgtag

SEQ ID NO: 343103 - DNA, 417 bp, Artificial Sequence
  derived and/or modified sequence
atgagtgtgactgaccaagcttttgtgacactagccaccaacgatatctattgtcaaggagcactggtcctagggcaaagcctccgtagacatcgactgacccgcaagctcgtggtgctgatcacgcctcaggtgagtagtctcctgcgggtcatcttgagtaaagtgtttgacgaagtgatagaggtgaatctcatcgattcagcagattatattcacctcgcgtttttgaagcgacctgagctgggcctgacactcactaagctgcactgctggactttgacgcactacagcaagtgtgtcttccttgacgccgatacacttgttctgtctaacgtcgatgagctgttcgatcgcggtgagttttccgccgcacccgatcctgggtggccagactgttttaattcgggggtgtag

SEQ ID NO: 343104 - DNA, 417 bp, Artificial Sequence
  derived and/or modified sequence
atgagcgtgaccgaccaggccttcgtgaccctggccaccaacgacatctactgccagggcgccctggtgctgggccagagcctgagaagacacagactgaccagaaagctggtggtgctgatcaccccccaggtgagcagcctgctgagagtgatcctgagcaaggtgttcgacgaggtgatcgaggtgaacctgatcgacagcgccgactacatccacctggccttcctgaagagacccgagctgggcctgaccctgaccaagctgcactgctggaccctgacccactacagcaagtgcgtgttcctggacgccgacaccctggtgctgagcaacgtggacgagctgttcgacagaggcgagttcagcgccgcccccgaccccggctggcccgactgcttcaacagcggcgtgtag

SEQ ID NO: 343105 - protein, 1311 aa, Artificial Sequence [sequence omitted]

SEQ ID NO: 343106 - protein, 1313 aa, Artificial Sequence
  derived and/or modified sequence
KSHSPHRTKSSGWPPPSGTWGLSQVPPYGWEMTANRDGRDYFINHMTQAIPFDDPRLESCQIIPPAPRKVEMRRDPVLGFGFVAGSEKPVVVRSVTPGGPSEGKLIPGDQIVMINDEPVSAAPRERVIDLVRSCKESILLTVIQPYPSPKSAFISAAKKARLKSNPVKVRFSEEVIINGQVSETVKDNSLLFMPNVLKVYLENGQTKSFRFDCSTSIKDVILTLQEKLSIKGIEHFSLMLEQRTEGAGTKLLLLHEQETLTQVTQRPSSHKMRCLFRISFVPKDPIDLLRRDPVAFEYLYVQSCNDVVQERFGPELKYDIALRLAALQMYIATVTTKQTQKISLKYIEKEWGLETFLPSAVLQSMKEKNIKKALSHLVKANQNLVPPGKKLSALQAKVHYLKFLSDLRLYGGRVFKATLVQAEKRSEVTLLVGPRYGISHVINTKTNLVALLADFSHVNRIEMFSEEESLVRVELHVLDVKPITLLMESSDAMNLACLTAGYYRLLVDSRRSIFNMANKKNTATQETGPENKGKHNLLGPDWNCIPQMTTFIGEGEQEAQITYIDSKQKTVEITDSTMCPKEHRHLYIDNAYSSDGLNQQLSQPGEAPCEADYRSLAQRSLLTLSGPETLKKAQESPRGAKVSFIFGDFALDDGISPPTLGYETLLDEGPEMLEKQRNLYIGSANDMKGLDLTPEAEGIQFVENSVYANIGDVKSFQAAEGIEEPLLHDICYAENTDDAEDEDEVSCEEDLVVGEMNQPAILNLSGSSDDIIDLTSLPPPEGDDNEDDFLLRSLNMAIAAPPPGFRDSSDEEDSQSQAASFPEDKEKGSSLQNDEIPVSLIDAVPTSAEGKCEKGLDNAVVSTLGALEALSVSEEQQTSDNSGVAILRAYSPESSSDSGNETNSSEMTESSELATAQKQSENLSRMFLATHEGYHPLAEEQTEFPASKTPAGGLPPKSSHALAARPATDLPPKVVPSKQLLHSDHMEMEPETMETKSVTDYFSKLHMGSVAYSCTSKRKSKLADGEGKAPPNGNTTGKKQQGTKTAEMEEEASGKFGTVSSRDSQHLSTFNLERTAFRKDSQRWYVATEGGMAEKSGLEAATGKTFPRASGLGAREAEGKEEGAPDGETSDGSGLGQGDRFLTDVTCASSAKDLDNPEDADSSTCDHPSKLPEADESVARLCDYHLAKRMSSLQSEGHFSLQSSQGSSVDAGCGTGSSGSACATPVESPLCPSLGKHLIPDASGKGVNYIPSEERAPGLPNHGATFKELHPQTEGMCPRMTVPALHTAINTEPLFGTLRDGCHRLPKIKETTG

SEQ ID NO: 343107 - DNA, 1131 bp, Artificial Sequence
  derived and/or modified sequence
aaaggtggctggaaatggaagatgagaggatcctggacaacctgggggcagagggacgtcatggctctgagtgggagtggagaagatggcattttggtggatgggtggaggaagagcataggcacagatggccacgtggagtgtggtccacagataagtcacctggtggagtgcagccacagtgcctgagtcaggaggtctcagctcttgtttcaggaacacagtcatccctcagaaatggattgggtgacaagtggtctgcatgctgcacacgggcactggggcaaatggaacaaacaaaacagtcaaagaggagagcagggagagaagacagattcagtgttgccctcggcagatgcagaggaaacgagcacaaaaccctttcacatgtgccgggcgcaagcgacgctgcccagaaaccccgcgccaagccctgcagccgaggaattggagcttctgtgttactccaaacaatgcatctgtctttcattacactcggatttagatgaaatcggggcgcttgtgggcaaaccagtgaagatttcaaataagagaaattgtattatattagaatcataacgttttaaaaataattctgtattgaaggaagtttttaaagaatggctaatggtgccttagatgcaatgaagccctttcattcgttctctccccctgtcgccccattctcatcttcactgtcctaaatgaggcctccctggtcccctcgcctgggccgtcacagaggcctctgagtgatgtttctcctcccagctttcccctttctgccaggctccctccctccagttagcttcccgaagcctggacagggtgaaccgacttgaaggcttgaatttgagccccctccttgctcaccccacgctgggccagcgcctctcccctgggttaccctagtgcgctgtgcttacccggatctcaacacttatcacaaggatggaggtttgtggccatttcccctttttccccctgagacaggggtctccacaggggtggggctttgacccctttatgggtgtattcttggtactggttcctccaggcaaccaataaatatccactggctgatgggatgagtgatgtcactccccatccgcggttcctcactgagatttg

SEQ ID NO: 343108 - protein, 286 aa, Artificial Sequence
  derived and/or modified sequence
MLLLVTSLLLCELPHPAFLLIPEKSDLRTVAPASSLNVRFDSRTMNLSWDCQENTTFSKCFLTDKKNRVVEPRLSNNECSCTFREICLHEGVTFEVHVNTSQRGFQQKLLYPNSGREGTAAQNFSCFIYNADLMNCTWARGPTAPRDVQYFLYIRNSKRRREIRCPYYIQDSGTHVGCHLDNLSGLTSRNYFLVNGTSREIGIQFFDSLLDTKKIERFNPPSNVTVRCNTTHCLVRWKQPRTYQKLSYLDFQYQLDVHRKNTQPGTENLLVVLTTGTSALCTFMCS

SEQ ID NO: 343109 - protein, 400 aa, Artificial Sequence
  derived and/or modified sequence
MLLLVTSLLLCELPHPAFLLIPEKSDLRTVAPASSLNVRFDSRTMNLSWDCQENTTFSKCFLTDKKNRVVEPRLSNNECSCTFREICLHEGVTFEVHVNTSQRGFQQKLLYPNSGREGTAAQNFSCFIYNADLMNCTWARGPTAPRDVQYFLYIRNSKRRREIRCPYYIQDSGTHVGCHLDNLSGLTSRNYFLVNGTSREIGIQFFDSLLDTKKIERFNPPSNVTVRCNTTHCLVRWKQPRTYQKLSYLDFQYQLDVHRKNTQPGTENLLINVSGDLENRYNFPSSEPRAKHSVKIRAADVRILNWSSWSEAIEFGSDDGNLGSVYIYVLLIVGTLVCGIVLGFLFKRFLRIQRLFPPVPQIKDKLNDNHEVEDEIIWEEFTPEEGKGYREEVLTVKEIT

SEQ ID NO: 343110 - protein, 188 aa, Artificial Sequence
  derived and/or modified sequence
MLLLVTSLLLCELPHPAFLLIPEKSDLRTVAPASSLNVRFDSRTMNLSWDCQENTTFSKCFLTDKKNRVVEPRLSNNECSCTFREICLHEGVTFEVHVNTSQRGFQQKLLYPNSGREGTAAQNFSCFIYNADLMNCTWARGPTAPRDVQYFLYIRNSKRRREIRCPYYIQDSGTHVGCHLDNLSGLTS

SEQ ID NO: 343111 - protein, 267 aa, Artificial Sequence
  derived and/or modified sequence
MNCTWARGPTAPRDVQYFLYIRNSKRRREIRCPYYIQDSGTHVGCHLDNLSGLTSRNYFLVNGTSREIGIQFFDSLLDTKKIERFNPPSNVTVRCNTTHCLVRWKQPRTYQKLSYLDFQYQLDVHRKNTQPGTENLLINVSGDLENRYNFPSSEPRAKHSVKIRAADVRILNWSSWSEAIEFGSDDGNLGSVYIYVLLIVGTLVCGIVLGFLFKRFLRIQRLFPPVPQIKDKLNDNHEVEDEIIWEEFTPEEGKGYREEVLTVKEIT

SEQ ID NO: 343112 - DNA, 1203 bp, Artificial Sequence
  derived and/or modified sequence
atgctgttgctcgttactagcctgctgctgtgtgagcttccccacccggcattcctgctgatcccagagaagtctgacctgcggactgtcgcgccggctagttcgctgaacgtcagattcgattcccgtaccatgaatttgtcctgggactgtcaggagaacacgacttttagcaagtgtttcctgacggataaaaagaaccgagtcgtcgagcccaggttgtccaataacgaatgtagctgtacatttagagagatatgtctgcacgagggagtcactttcgaggtgcacgtgaatacttcccagcgagggttccagcagaagctcctctacccgaacagcggccgcgaagggaccgcggcgcagaatttcagttgtttcatttacaatgccgatctgatgaactgtacgtgggcccgcggacccacagcccctcgggacgtgcagtacttcctttatatccgcaattcaaagcgccggagggaaatacggtgcccttattatatacaggacagtggcactcacgtgggatgtcaccttgataacctgagtgggctcacgtcccgcaattacttcctggttaacggtacctcacgcgagatcggcattcagttctttgacagcctccttgatactaagaagatcgagaggtttaaccctccgagcaacgtaaccgtgaggtgcaatacaacgcactgcttggttagatggaagcagccacggacttatcagaagctgagctatcttgatttccagtatcagcttgacgttcaccgtaagaatactcagcccggcacggaaaacctactaatcaacgtgtcgggggacttggaaaaccgttataacttcccatcttcagagccacgggccaaacacagtgttaagattagagctgcggacgtgagaatcctgaattggtccagctggtcagaagccatcgagttcgggtctgacgacggaaacctgggcagcgtgtacatatacgtcttgctgatcgtcggaacgctcgtatgcggtatcgttctggggtttctgttcaaacggtttttacgcatccagcgcctttttcctccagttccacagataaaagacaaactgaatgacaaccacgaggtggaggacgaaatcatatgggaagagttcacacctgaggagggaaagggatatcgggaggaagtactgaccgtcaaggagatcacctag

SEQ ID NO: 343113 - DNA, 1203 bp, Artificial Sequence
  derived and/or modified sequence
atgttgctgttagttacctcacttttgctgtgtgagttgccacatcctgcatttcttttaatccctgaaaagtcagatcttcggaccgtcgcccctgcctcctccctgaatgtgcggttcgacagccgcacgatgaacctaagttgggattgccaggagaacaccaccttctccaagtgctttctcacggataagaaaaacagagtggtcgagcccaggctgtcaaacaacgaatgttcatgcacattccgcgagatttgtctgcatgaaggtgtgactttcgaggtacacgtgaatacatctcagaggggattccaacagaaactgctgtacccgaactcgggaagagaagggacggccgctcaaaatttttcctgttttatctacaatgctgacttgatgaactgcacctgggcgagggggcccacggctcctagagatgtgcagtacttcctttatatccgcaattctaaaaggcgccgagagattaggtgtccctactacatacaggattcaggcactcacgtcggctgccacctggacaatctttctggattgacatcccggaactattttctggtgaacggcacgtcccgagaaattggtatacagttcttcgatagcctgctggacaccaaaaagatcgaacggttcaacccaccaagcaacgtaacagtgcgttgcaatactactcattgccttgtacgatggaaacaaccaagaacttatcagaagctctcttacttggactttcagtaccagctggatgttcaccgcaaaaacactcagccaggaaccgaaaatctgctcatcaatgtcagtggggaccttgagaacagatacaacttcccgagctcagagcctcgggccaagcatagtgtaaagatccgagcagccgatgtgagaatattgaattggtcctcctggagtgaggccattgagtttggtagtgacgacgggaatctgggaagcgtctatatctacgtcctcctcatcgtgggcacactggtctgtggtatcgtcctggggtttttgttcaagcgattcctaaggattcagaggctctttcctcctgtgccgcagattaaggacaagttaaacgacaaccacgaggtcgaagacgagatcatctgggaagagtttacgcctgaggagggcaaggggtaccgtgaagaggttttgaccgtgaaggaaatcacgtag

SEQ ID NO: 343114 - DNA, 1203 bp, Artificial Sequence
  derived and/or modified sequence
atgttgctgctggtgacaagcctgctgctctgtgaactgcctcacccggccttcctgctgatcccagaaaagtctgacctccgaaccgtggcacccgctagcagcttgaacgtcagatttgactcccggaccatgaatctctcctgggactgccaggagaacactaccttttctaagtgtttcctgacagacaagaaaaaccgcgtggtcgagccccgcttgagcaataatgagtgttcctgtacttttcgtgaaatttgcctgcacgagggcgttactttcgaggtccacgtcaatacctcacaacgggggttccagcagaagctgctgtatccgaactccggcagggaaggtacggctgctcagaactttagttgctttatctataatgccgacctgatgaactgcacttgggcgcgtgggccgacagcaccccgggatgttcagtatttcctgtacataagaaattcgaaaagaagaagggaaattagatgcccgtactatatacaggacagtggaacccacgtgggctgccaccttgataatcttagcgggttaacatcccggaattatttcctggtgaacggcacctcaagggaaatcggcatccagttctttgacagcttactcgacacaaaaaagattgaaagattcaatcctccttccaacgtgactgtgaggtgcaataccacacactgtttagtacggtggaaacagccaagaacgtaccaaaagctttcatacttagacttccagtatcaattggacgttcatagaaagaatacacagcctggcaccgaaaatctcctcatcaacgtttccggcgaccttgagaataggtacaatttcccatcttccgagcctcgggctaagcacagtgtgaagattcgtgctgccgacgtcagaattttgaactggagcagctggtccgaggccatcgaattcgggagcgacgacggcaacctgggttcggtttacatttatgtgttactgatcgtgggaaccttagtgtgcggcattgtgctaggcttcctgttcaagcggttcctcagaatccagaggctcttcccccccgtcccccagataaaggataagcttaacgacaatcatgaagttgaggacgagattatctgggaggaattcaccccagaagaggggaaagggtatagggaagaggtgttgacagtgaaagagatcacctag

SEQ ID NO: 343115 - DNA, 1203 bp, Artificial Sequence
  derived and/or modified sequence
atgctgctgctggtgaccagcctgctgctgtgtgagctgccccacccagccttcctgctgatccctgagaagagtgacctgaggacagtggccccagccagcagcctgaatgtgcgctttgacagcaggaccatgaacctgtcctgggactgccaggagaacaccaccttcagcaagtgcttcctgacagacaagaagaacagagtggtggagccccggctgagcaacaatgaatgtagctgcaccttccgggagatctgcctgcatgaaggagtgacctttgaggtgcacgtgaacaccagccagaggggcttccagcagaagctgctgtaccccaacagcggccgggagggcacagctgcccagaacttcagctgcttcatctacaatgctgacctgatgaactgcacctgggcccggggccccacagcccccagagatgtgcagtacttcctgtacatccggaacagcaagagaagaagagagatccgctgcccctactacatccaggacagcggcacccacgtgggctgccacctggacaacctgagcggcctgaccagcaggaactacttcctggtgaatggcaccagccgggagatcggcatccagttctttgacagcctgctggacaccaagaagattgagcgcttcaacccccccagcaatgtgacagtgcgctgcaacaccacccactgcctggtgcgctggaagcagcccaggacctaccagaagctgagctacctggacttccagtaccagctggatgtgcacaggaagaacacccagcccggcacagagaacctgctgatcaacgtgtctggggacctggagaaccgctacaacttccccagcagcgagccccgggccaagcacagcgtgaagatccgggctgctgatgtgcgcatcctgaactggagctcctggagcgaggccattgaatttggaagtgatgatggcaacctgggctctgtgtacatctacgtgctgctgattgtgggcaccctggtgtgtggcatcgtgctgggcttcctgttcaagcgcttcctgcgcatccagaggctcttcccccctgtgccccagatcaaggacaagctgaatgacaaccacgaggtggaggatgagatcatctgggaggagttcaccccagaggagggcaagggctaccgggaggaggtgctgactgtgaaggagatcacctag

SEQ ID NO: 343116 - DNA, 1203 bp, Artificial Sequence
  derived and/or modified sequence
atgctgctgctggtgaccagcctgctgctgtgcgagctgccccacccagcttttcttctcattccagagaagtcagaccttaggactgttgcacccgcgagtagcctgaatgttcgctttgattccagaacaatgaatctgtcctgggactgccaagagaatacaacgttttccaaatgcttcctgacagataagaaaaacagagttgttgaacctaggctgagcaataacgagtgtagctgcacatttagagagatttgtctgcacgagggcgtaacctttgaggtgcacgtgaacaccagtcaacgcggcttccagcagaagctgctttatccaaacagcggaagggaggggacagccgcccaaaacttttcttgttttatttacaacgccgacttaatgaattgtacatgggcgcgcggaccaaccgctccccgtgatgtccagtacttcctttacatccgcaattcaaagaggcgaagagagatccgctgtccttattatatccaagattccggaacacatgtggggtgccacttggataacctttctggtctaacctctcggaactactttctggttaatggtacctcaagggagatcggtatccaattctttgacagcctgcttgacaccaagaaaattgaacggttcaacccgccctctaacgtcaccgtaaggtgcaataccacacattgcctggtgcggtggaaacagccgaggacctaccaaaaattatcttacctggacttccagtatcagcttgacgtacacaggaagaacacccagccgggaaccgagaacttacttatcaacgtgtccggagacctagagaacagatacaacttccctagctctgaacccagagctaaacacagtgtcaagattcgtgcagccgacgtgagaattctcaactggtcctcatggtctgaggcgatcgaattcggtagcgatgacggaaacctcgggtcagtttacatatacgtgctgctgatcgtgggtactcttgtctgcggcattgtgctggggttcctattcaaacgatttctgcgaatccagcggttattcccgccagtaccccagataaaagacaaactgaatgataaccatgaagtggaggatgaaatcatttgggaggagttcaccccagaagagggcaaaggataccgtgaggaggtccttacagtaaaggaaatcacctag

SEQ ID NO: 343117 - DNA, 1203 bp, Artificial Sequence
  derived and/or modified sequence
atgctgctgctggtgaccagcctgctgctgtgcgagctgccccacccggcattcctcctcatacctgagaagagtgatcttcgcaccgtcgctccagcctccagcctgaacgtgcggttcgatagccgcacgatgaacttgagttgggactgccaagagaacactactttctcaaagtgcttcctcaccgacaagaagaaccgtgtcgtggagcccagactgtctaataacgagtgcagctgcacatttcgcgaaatttgtctacacgagggggtgacatttgaagtgcacgtcaacacatcacagcgagggtttcagcagaagcttctctacccaaactctgggcgggagggaacagccgcgcagaatttttcctgctttatctataacgccgatttaatgaactgtacttgggcccgagggcccacagctcctcgagatgttcaatattttttgtacatccgcaacagcaaacgtcggcgggagatcagatgcccttactacattcaagatagtgggacacacgttggctgtcacttggacaatttaagcggcctgacctcaagaaactatttcctggtcaatgggacctcaagggaaattggcatccaattttttgactcactgcttgacactaaaaaaatcgaaagatttaatccgccgtcaaatgttaccgtgcgttgtaatacaacccattgtctggtgcgctggaagcagccccgaacctatcagaagctgagttatctggatttccagtatcagttagacgttcatagaaaaaacactcagcccggaacagagaacttgctcattaatgtgtcgggggatctcgaaaatcgttacaattttcccagctcagaaccccgcgccaaacatagcgtgaaaattcgggccgcggatgtgagaatactgaactggtcctcctggtccgaagcgatcgaattcggtagtgacgacggaaacctgggtagcgtctatatttacgtactactgatcgtgggtactctggtctgcggtatcgtgttgggctttttattcaaaaggtttctgagaattcagcggttgttcccacctgtgcctcagattaaggacaagctgaacgacaatcacgaggtcgaggacgaaatcatctgggaagaatttacgcccgaggaagggaaaggataccgcgaggaggtcctcactgtcaaggaaatcacttag

SEQ ID NO: 343118 - DNA, 1203 bp, Artificial Sequence
  derived and/or modified sequence
atgctgctgctggtgaccagcctgctgctgtgcgagctgccccacccagcatttcttttgatccccgaaaagtccgacctgagaacagtagccccagcgtcaagcctgaacgtgcggttcgattcacgcactatgaatttaagctgggattgtcaggaaaatactacttttagcaagtgcttcctgaccgacaaaaagaaccgggttgttgagcctaggctctctaataatgagtgctcttgcacttttcgcgaaatctgccttcacgagggcgtgacatttgaggtgcacgtgaatacctcacagcgcggcttccagcaaaaactgttgtacccaaattctggacgcgagggcactgccgcgcagaacttctcctgctttatctacaatgctgacctgatgaactgtacatgggcacgaggcccgacagcacctagggatgtgcagtacttcctgtatatcaggaattcaaaaaggcgacgcgaaatcaggtgcccctattacatccaagactctggaacacatgtgggttgccacctcgacaatttgtccggactcacttcacggaactacttcctcgtgaacggtactagcagggaaattggcattcaattcttcgactctttgttggacacaaagaaaatcgaaaggtttaatccaccatctaacgtgaccgtgcgttgcaacacaactcattgtttggtccggtggaaacagcctagaacttaccagaaacttagctacctcgacttccaatatcagttagatgtccacaggaagaacactcaaccgggtactgagaatctgctcatcaacgtgtcgggggacctggagaatcgctacaattttccctccagcgagccccgtgcaaagcattctgtgaagatccgcgccgccgatgtgcgaatcctgaactggtcttcctggagcgaagccatcgaattcgggagtgacgacgggaacctgggcagtgtctacatctacgtcctgctcattgtcggaacattggtgtgcggaattgtgctcgggtttctttttaagcgctttctccgaattcaacgcctgtttccgccggttcctcaaataaaggacaagttgaatgataaccacgaggttgaggacgaaattatctgggaggagttcactcctgaggagggtaagggatatagggaggaagtgttaaccgtgaaagaaatcacctag

SEQ ID NO: 343119 - DNA, 1203 bp, Artificial Sequence
  derived and/or modified sequence
atgttactactggtaacatccctgttgctctgcgagctaccacaccctgctttccttcttattcctgaaaagtccgatctccggactgtggccccagcgagttctcttaacgtgaggttcgatagccgcacaatgaatctttcttgggactgtcaggaaaatacaacattttccaaatgctttctgacagataagaaaaatagggtcgtggaacccaggctttctaataatgaatgcagctgcaccttcagagaaatatgcctgcatgaaggagtgaccttcgaagtccatgtgaatacttctcagcggggatttcagcagaagctgctgtaccctaattcagggagagaaggaactgccgctcaaaacttctcatgtttcatatataacgcggacctcatgaactgtacatgggctcggggacccaccgccccaagggatgttcagtactttctgtacatccgaaatagtaagcggagacgggagattaggtgtccctattacatacaggactcgggtacccatgttgggtgccatctcgataacctaagtgggctgacctcacgcaactacttcctagtgaacgggactagtagagaaatcgggatccagttcttcgactcacttcttgacacaaagaagatcgagagattcaacccgccaagcaacgtcaccgtacgttgtaacacgacccactgtttggtaagatggaaacagccaagaacataccagaagctgtcttatctggactttcagtatcagctagatgtgcacaggaagaacacacaaccagggaccgagaacctgcttataaatgtcagcggggacctcgaaaataggtacaatttcccaagctccgagccccgagccaagcatagcgtcaagatccgtgcggctgacgtgaggatattgaattggagtagctggagtgaagccatagaatttggatccgatgacggaaaccttggatccgtgtacatatacgtcctcctcattgtgggcacattagtgtgcggcattgtgttgggcttcttgttcaagcggttcctgcggattcaacggctcttccccccagttccacagatcaaggacaaactgaatgacaaccacgaggtcgaggacgagatcatatgggaggaattcactcctgaagagggtaaaggataccgggaagaggtcctaacagtaaaagagataacctag

SEQ ID NO: 343120 - DNA, 1203 bp, Artificial Sequence
  derived and/or modified sequence
atgctgttgctggtgacgtcgctgctgctttgcgaacttcctcaccccgctttccttttgatccccgaaaaatccgacctgcgaaccgtggctccagcaagttcactaaatgtaaggtttgacagcagaacaatgaacttatcatgggactgtcaagaaaatacaacattctctaaatgttttctaacggacaaaaagaatcgtgttgtagaacccaggctgtccaataacgagtgttcctgtacctttcgggagatttgtctgcacgaaggcgttactttcgaagtgcatgtgaatacgtcgcagcgtggatttcagcagaaactcctctatcctaacagcggtagggagggaacagcagctcagaatttttcctgtttcatctacaatgccgacctaatgaactgtacgtgggctagaggcccaacagccccacgagacgtccagtacttcctctacatccgtaactcaaagaggcgccgagagattcgctgtccttactatattcaggactcggggacccacgttggatgtcatctggacaatctaagtggtcttaccagccggaactatttcttggtaaatgggacgtcaagagagatcgggatccaattctttgattcccttttggacactaagaaaatcgaaagatttaaccctccttccaacgtgacggtgagatgtaataccacacactgccttgttaggtggaaacaacctcggacataccagaaactttcttacctggacttccaatatcagctcgacgtgcatcgaaagaatacacagcccggaacggagaacctgcttatcaatgtgtcgggcgatcttgagaatcggtacaactttcccagctccgaacctcgagccaagcactccgtcaaaattagggcagcggacgttagaattctgaactggtcaagttggagcgaggccattgaattcggttccgacgacgggaatctgggctctgtgtatatctacgtgctgcttattgttggcactcttgtctgcgggattgtcttaggctttttatttaagcggttccttaggatacagagactgttcccaccagtaccacagatcaaggataagttgaatgataaccatgaggtggaagatgaaatcatttgggaggaattcactccggaggaagggaagggttacagggaagaagtgttgaccgttaaggaaataacctag

SEQ ID NO: 343121 - DNA, 1203 bp, Artificial Sequence
  derived and/or modified sequence
atgcttttgctggttacgagtctgctgctatgcgaactgcctcatcccgctttccttctgatccccgagaagagcgaccttagaaccgtcgccccagcctccagtctgaacgtgcggtttgatagtcgcactatgaacctgagctgggattgccaggaaaatacaacgttttccaaatgttttctcacagataagaagaaccgggtggtggagcctcggttgagtaacaatgaatgttcttgcacattccgagaaatctgtctccacgagggtgtaactttcgaagtgcacgttaacacctcccagagaggatttcagcagaagctactgtatcctaactctggtagagaaggtacagcagcccagaactttagctgtttcatttataacgccgaccttatgaactgtacttgggcgagggggccaactgcacccagggatgtccaatacttcttgtacatcaggaactctaagcgacggagagaaattcgttgcccctattatatccaggactcaggtactcacgttgggtgtcacctcgacaatctatccggcctcaccagcagaaattatttcttggtgaatggaacctccagagaaatcggtatacagttttttgattctctgctggacaccaagaaaatcgaacggtttaatcctccatccaacgtcactgtcaggtgtaacacgacacactgcttagtgcgatggaagcaaccgaggacctaccagaaattgtcctacctcgatttccagtatcaattagacgttcacaggaaaaatacacagccaggcactgagaacttgttgatcaacgtgagcggtgacctggaaaaccggtacaattttccatcatccgagcccagggctaaacactccgtcaagattagagcagccgacgtgagaatattgaactggtcttcatggtcagaggctatcgaatttggatctgatgatggcaatctgggcagcgtgtatatatacgtgttgctgatcgttgggacgttagtttgtgggatcgtattgggcttcctcttcaagcgttttctgcggattcagagattgtttccgcctgtgcctcagatcaaagataagctgaatgataaccatgaggtggaggatgaaattatctgggaagagtttacccccgaagaagggaaagggtaccgcgaggaggtcttgactgtgaaagaaattacatag

SEQ ID NO: 343122 - DNA, 2291 bp, Artificial Sequence
  derived and/or modified sequence
ggagctactcagaagcgggagtctccgagagaagaaaagcaggtggaaggagaggaagcggatgccgtggggtttacagcaggaaaatccgtggagacagcagatccgagaagcggcgatgtttgcgtagaaccctgtacgtgcttccttcggcctgtcgctcttcccttctctctgaccagcaccatgcttctcctggtgacaagccttctgctctgtgagttaccacacccagcattcctcctgatcccagagaaatcggatctgcgaacagtggcaccagcctctagtctcaatgtgaggtttgactccaggacgatgaatttaagctgggactgccaagaaaacacaaccttcagcaagtgtttcttaactgacaagaagaacagagtcgtggaacccaggctcagtaacaacgaatgttcgtgcacatttcgtgaaatttgtctgcatgaaggagtcacatttgaggttcacgtgaatactagtcaaagaggatttcaacagaaactgctttatccaaattcaggaagggagggtaccgctgctcagaatttctcctgtttcatctacaatgcggatttaatgaactgtacctgggcgaggggtccgacggccccccgtgacgtccagtattttttgtacatacgaaactcaaagagaaggagggagatccggtgtccttattacatacaagactcaggaacccatgtgggatgtcacctggataacctgtcaggattaacgtctcgcaattactttctggttaacggaaccagccgagaaattggcatccaattctttgattcacttttggacacaaagaaaatagaacgattcaaccctcccagcaatgtcaccgtacgttgcaacacgacgcactgcctcgtacggtggaaacagcccaggacctatcagaagctgtcgtacctggactttcagtaccagctggacgtccacagaaagaatacccagcctggcacggaaaacctactgattaatgtttctggtgatttggaaaatagatacaactttccaagctctgagcccagagcaaaacacagtgtgaagatcagagctgcagacgtccgcatcttgaattggagctcctggagtgaagccattgaatttggttctgacgacgggaacctcggctctgtgtacatttatgtgctcctaatcgtgggaacccttgtctgtggcatcgtcctcggcttcctctttaaaaggttccttaggatacagcggctgttcccgccagttccacagatcaaagacaaactgaatgataaccatgaggtggaagacgagatcatctgggaggaattcaccccagaggaagggaaaggctaccgcgaagaggtcttgaccgtgaaggaaattacctgagacccagagggtgtaggaatggcatggacatctccgcctccgcgacacgggggaactgttttcttgatgatgctgtgaacctttatatcattttctatgtttttatttaaaaacatgacatttggggccaggcgcggtggctcacgcctgtaatcccagcactttgggaggccaaggcaggcggatcacctgaggtcaggagttcaagaccagcctgcccaacatggtgaaaccccatctggactaaaaatgcagaaatttacccaggcacggcggcggacgcccatcatcccagctacttgggaggctgaggcaggagaattgcttgaacccgtgaggcggaggttgtagtgagccaagatcgcaccattgcacaccaacctgcgtgacagagcaagattgcatctcaaaacaaacaataataataaataataaaaacctgatatttggctgggcgccgtggctcatgcctgtaatcctaacactttggaggattgctggagacaggagtttaagaccagtctgggcaacatagcaagaccctgtctctacaaaaaaggcaaaaattagctgggcgtggtggcttgtgcctgtagtgccagctatctgggaggctgaggcgggaggatcacttgagttcaagctgacagtaagctatgattgcaccgttgcactccagcctgggtaacaaactaagaccccatctctctgtctcaaaaaaagtgatacttcgcaaagatgcttagactccaagaagcttttgcatctctttccaacccaactactgaggtactgtgtagcctcctccttgaataactaacctggtgagctgagattgcgccattgcaatccagcctgggcaacaagagcaaaactccatcacatttaaaaaaaaaaaaaaa

SEQ ID NO: 343123 - DNA, 1816 bp, Artificial Sequence
  derived and/or modified sequence
ctctgaagggagctactcagaagcgggagtctccgagagaagaaaagcaggtggaaggagaggaagcggatgccgtggggtttacagcaggaaaatccgtggagacagcagatccgagaagcggcgatgtttgcgtagaaccctctcttcccttctctctgaccagcaccatgcttctcctggtgacaagccttctgctctgtgagttaccacacccagcattcctcctgatcccagagaaatcggatctgcgaacagtggcaccagcctctagtctcaatgtgaggtttgactccaggacgatgaatttaagctgggactgccaagaaaacacaaccttcagcaagtgtttcttaactgacaagaagaacagagtcgtggaacccaggctcagtaacaacgaatgttcgtgcacatttcgtgaaatttgtctgcatgaaggagtcacatttgaggttcacgtgaatactagtcaaagaggatttcaacagaaactgctttatccaaattcaggaagggagggtaccgctgctcagaatttctcctgtttcatctacaatgcggatttaatgaactgtacctgggcgaggggtccgacggccccccgtgacgtccagtattttttgtacatacgaaactcaaagagaaggagggagatccggtgtccttattacatacaagactcaggaacccatgtgggatgtcacctggataacctgtcaggattaacgtctcgcaattactttctggttaacggaaccagccgagaaattggcatccaattctttgattcacttttggacacaaagaaaatagaacgattcaaccctcccagcaatgtcaccgtacgttgcaacacgacgcactgcctcgtacggtggaaacagcccaggacctatcagaagctgtcgtacctggactttcagtaccagctggacgtccacagaaagaatacccagcctggcacggaaaacctactgattaatgtttctggtgatttggaaaatagatacaactttccaagctctgagcccagagcaaaacacagtgtgaagatcagagctgcagacgtccgcatcttgaattggagctcctggagtgaagccattgaatttggttctgacgacgggaacctcggctctgtgtacatttatgtgctcctaatcgtgggaacccttgtctgtggcatcgtcctcggcttcctctttaaaaggttccttaggatacagcggctgttcccgccagttccacagatcaaagacaaactgaatgataaccatgaggtggaagacgagatcatctgggaggaattcaccccagaggaagggaaaggctaccgcgaagaggtcttgaccgtgaaggaaattacctgagacccagagggtgtaggaatggcatggacatctccgcctccgcgacacgggggaactgttttcttgatgatgctgtgaacctttatatcattttctatgtttttatttaaaaacatgacatttggggccaggcgcggtggctcacgcctgtaatcccagcactttgggaggccaaggcaggcggatcacctgaggtcaggagttcaagaccagcctgcccaacatggtgaaaccccatctggactaaaaatgcagaaatttacccaggcacggcggcggacgcccatcatcccagctacttgggaggctgaggcaggagaattgcttgaacccgtgaggcggaggttgtagtgagccaagatcgcaccattgcacaccaacctgcgtgacagagcaagattgcatctcaaaacaaacaataataataaataataaaaacctga

SEQ ID NO: 343124 - DNA, 1981 bp, Artificial Sequence
  derived and/or modified sequence
ctctgaagggagctactcagaagcgggagtctccgagagaagaaaagcaggtggaaggagaggaagcggatgccgtggggtttacagcaggaaaatccgtggagacagcagatccgagaagcggcgatgtttgcgtagaaccctgtcagctgagccatgacccatgaaccatggaagcttgactctagattgaccatcttgagatgccaaagatgtccacgtcctaatcccatgtgggagacagaataatggccctgcagaccttcccagctggccatgacccctcatttgaccagctcttcccttctctctgaccagcaccatgcttctcctggtgacaagccttctgctctgtgagttaccacacccagcattcctcctgatcccagagaaatcggatctgcgaacagtggcaccagcctctagtctcaatgtgaggtttgactccaggacgatgaatttaagctgggactgccaagaaaacacaaccttcagcaagtgtttcttaactgacaagaagaacagagtcgtggaacccaggctcagtaacaacgaatgttcgtgcacatttcgtgaaatttgtctgcatgaaggagtcacatttgaggttcacgtgaatactagtcaaagaggatttcaacagaaactgctttatccaaattcaggaagggagggtaccgctgctcagaatttctcctgtttcatctacaatgcggatttaatgaactgtacctgggcgaggggtccgacggccccccgtgacgtccagtattttttgtacatacgaaactcaaagagaaggagggagatccggtgtccttattacatacaagactcaggaacccatgtgggatgtcacctggataacctgtcaggattaacgtctcgcaattactttctggttaacggaaccagccgagaaattggcatccaattctttgattcacttttggacacaaagaaaatagaacgattcaaccctcccagcaatgtcaccgtacgttgcaacacgacgcactgcctcgtacggtggaaacagcccaggacctatcagaagctgtcgtacctggactttcagtaccagctggacgtccacagaaagaatacccagcctggcacggaaaacctactgattaatgtttctggtgatttggaaaatagatacaactttccaagctctgagcccagagcaaaacacagtgtgaagatcagagctgcagacgtccgcatcttgaattggagctcctggagtgaagccattgaatttggttctgacgacgggaacctcggctctgtgtacatttatgtgctcctaatcgtgggaacccttgtctgtggcatcgtcctcggcttcctctttaaaaggttccttaggatacagcggctgttcccgccagttccacagatcaaagacaaactgaatgataaccatgaggtggaagacgagatcatctgggaggaattcaccccagaggaagggaaaggctaccgcgaagaggtcttgaccgtgaaggaaattacctgagacccagagggtgtaggaatggcatggacatctccgcctccgcgacacgggggaactgttttcttgatgatgctgtgaacctttatatcattttctatgtttttatttaaaaacatgacatttggggccaggcgcggtggctcacgcctgtaatcccagcactttgggaggccaaggcaggcggatcacctgaggtcaggagttcaagaccagcctgcccaacatggtgaaaccccatctggactaaaaatgcagaaatttacccaggcacggcggcggacgcccatcatcccagctacttgggaggctgaggcaggagaattgcttgaacccgtgaggcggaggttgtagtgagccaagatcgcaccattgcacaccaacctgcgtgacagagcaagattgcatctcaaaacaaacaataataataaataataaaaacctgatatttggctgggc

SEQ ID NO: 343125 - DNA, 1622 bp, Artificial Sequence
  derived and/or modified sequence
ctctgaagggagctactcagaagcgggagtctccgagagaagaaaagcaggtggaaggagaggaagcggatgccgtggggctcttcccttctctctgaccagcaccatgcttctcctggtgacaagccttctgctctgtgagttaccacacccagcattcctcctgatcccagagaaatcggctcagtaacaacgaatgttcgtgcacatttcgtgaaatttgtctgcatgaaggagtcacatttgaggttcacgtgaatactagtcaaagaggatttcaacagaaactgctttatccaaattcaggaagggagggtaccgctgctcagaatttctcctgtttcatctacaatgcggatttaatgaactgtacctgggcgaggggtccgacggccccccgtgacgtccagtattttttgtacatacgaaactcaaagagaaggagggagatccggtgtccttattacatacaagactcaggaacccatgtgggatgtcacctggataacctgtcaggattaacgtctcgcaattactttctggttaacggaaccagccgagaaattggcatccaattctttgattcacttttggacacaaagaaaatagaacgattcaaccctcccagcaatgtcaccgtacgttgcaacacgacgcactgcctcgtacggtggaaacagcccaggacctatcagaagctgtcgtacctggactttcagtaccagctggacgtccacagaaagaatacccagcctggcacggaaaacctactgattaatgtttctggtgatttggaaaatagatacaactttccaagctctgagcccagagcaaaacacagtgtgaagatcagagctgcagacgtccgcatcttgaattggagctcctggagtgaagccattgaatttggttctgacgacgggaacctcggctctgtgtacatttatgtgctcctaatcgtgggaacccttgtctgtggcatcgtcctcggcttcctctttaaaaggttccttaggatacagcggctgttcccgccagttccacagatcaaagacaaactgaatgataaccatgaggtggaagacgagatcatctgggaggaattcaccccagaggaagggaaaggctaccgcgaagaggtcttgaccgtgaaggaaattacctgagacccagagggtgtaggaatggcatggacatctccgcctccgcgacacgggggaactgttttcttgatgatgctgtgaacctttatatcattttctatgtttttatttaaaaacatgacatttggggccaggcgcggtggctcacgcctgtaatcccagcactttgggaggccaaggcaggcggatcacctgaggtcaggagttcaagaccagcctgcccaacatggtgaaaccccatctggactaaaaatgcagaaatttacccaggcacggcggcggacgcccatcatcccagctacttgggaggctgaggcaggagaattgcttgaacccgtgaggcggaggttgtagtgagccaagatcgcaccattgcacaccaacctgcgtgacagagcaagattgcatctcaaaacaaacaataataataaataataaaaacctgatatttggctgggc

SEQ ID NO: 343126 - DNA, 1203 bp, Artificial Sequence
  derived and/or modified sequence
atgctgctgctggtgaccagcctgctgctgtgcgagctgccccaccccgccttcctgctgatccccgagaagagcgacctgagaaccgtggcccccgccagcagcctgaacgtgagattcgacagcagaaccatgaacctgagctgggactgccaggagaacaccaccttcagcaagtgcttcctgaccgacaagaagaacagagtggtggagcccagactgagcaacaacgagtgcagctgcaccttcagagagatctgcctgcacgagggcgtgaccttcgaggtgcacgtgaacaccagccagagaggcttccagcagaagctgctgtaccccaacagcggcagagagggcaccgccgcccagaacttcagctgcttcatctacaacgccgacctgatgaactgcacctgggccagaggccccaccgcccccagagacgtgcagtacttcctgtacatcagaaacagcaagagaagaagagagatcagatgcccctactacatccaggacagcggcacccacgtgggctgccacctggacaacctgagcggcctgaccagcagaaactacttcctggtgaacggcaccagcagagagatcggcatccagttcttcgacagcctgctggacaccaagaagatcgagagattcaacccccccagcaacgtgaccgtgagatgcaacaccacccactgcctggtgagatggaagcagcccagaacctaccagaagctgagctacctggacttccagtaccagctggacgtgcacagaaagaacacccagcccggcaccgagaacctgctgatcaacgtgagcggcgacctggagaacagatacaacttccccagcagcgagcccagagccaagcacagcgtgaagatcagagccgccgacgtgagaatcctgaactggagcagctggagcgaggccatcgagttcggcagcgacgacggcaacctgggcagcgtgtacatctacgtgctgctgatcgtgggcaccctggtgtgcggcatcgtgctgggcttcctgttcaagagattcctgagaatccagagactgttcccccccgtgccccagatcaaggacaagctgaacgacaaccacgaggtggaggacgagatcatctgggaggagttcacccccgaggagggcaagggctacagagaggaggtgctgaccgtgaaggagatcacctag

SEQ ID NO: 343127 - protein, 238 aa, Artificial Sequence
  derived and/or modified sequence
MLLLVTSLLLCELPHPAFLLIPEKSDLRTVAPASSLNVRFDSRTMNLSWDCQENTTFSKCFLTDKKNRVVEPRLSNNECSCTFREICLHEGVTFEVHVNTSQRGFQQKLLYPNSGREGTAAQNFSCFIYNADLMNCTWARGPTAPRDVQYFLYIRNSKRRREIRCPYYIQDSGTHVGCHLDNLSGLTSRNYFLVNGTSREIGIQFFDSLLDTKKIERFNPPSNVTVRCNTTHCLVRWK

SEQ ID NO: 343128 - protein, 410 aa, Artificial Sequence
  derived and/or modified sequence
MLLLVTSLLLCELPHPAFLLIPEKSDLRTVAPASSLNVRFDSRTMNLSWDCQENTTFSKCFLTDKKNRVVEPRLSNNECSCTFREICLHEGVTFEVHVNTSQRGFQQKLLYPNSGREGTAAQNFSCFIYNADLMNCTWARGPTAPRDVQYFLYIRNSKRRREIRCPYYIQDSGTHVGCHLDNLSGLTSRNYFLVNGTSREIGIQFFDSLLDTKKIERFNPPSNVTVRCNTTHCLVRWKQPRTYQKLSYLDFQYQLDVHRKNTQPGTENLLINVSGDLENRYNFPSSEPRAKHSVKIRAADVRILNWSSWSEAIEFGSDDGNLGSVYIYVLLIVGTLVCGIVLGFLFKRFLRIQRLFPPVPQIKDKLNDNHEVEDEMGPQRHHRCGWNLYPTPGPSPGSGSSPRLGSESSL

SEQ ID NO: 343129 - DNA, 1233 bp, Artificial Sequence
  derived and/or modified sequence
atgctgctgcttgtgacttcactgctgctctgcgagctgcctcaccccgcctttctcttgatcccagaaaagagtgatctcagaacagtggcgccagcttctagcctgaatgtccggttcgatagcaggaccatgaacctgagttgggactgccaggagaacaccaccttcagtaagtgcttcctgacggacaagaaaaatagagttgttgagcctagacttagcaacaacgaatgctcttgtaccttccgcgaaatctgcttacatgagggggttaccttcgaggtccacgtgaacacgtcacaacgaggcttccaacagaaattattatacccgaattcaggtcgagagggcacagctgcccagaatttttcatgttttatttacaatgctgaccttatgaattgcacgtgggccaggggaccaactgccccgcgggacgtacagtactttctgtatatcagaaactcaaagcgccggcgcgagatacgctgtccttactacatccaggatagcggcacccacgtcgggtgccatttggacaacctgagcggtctgaccagccggaactatttcctggttaacggaacatcacgagagataggcatacaattcttcgacagcttgctggacacaaagaaaattgaaagatttaaccccccaagcaacgttaccgtacgctgtaataccacccattgtcttgttcggtggaaacagccccggacttaccagaagctgagttacttggacttccagtaccaactggacgtgcacagaaaaaatacacaacctggcaccgaaaatctgctgataaatgtgagcggcgatctggaaaaccgctataactttcctagctccgagcctcgagctaaacatagcgtaaagataagagctgcggacgtccgtattctgaactggtcttcctggtctgaggctatcgagttcggatccgacgatggtaacttaggttcagtttatatttatgtgcttcttatcgtgggaacacttgtatgcgggatagtgttgggattcttattcaagcgtttcctgcggatccagcgacttttccctcccgtccctcagataaaagacaaactgaacgacaatcacgaggtggaggatgaaatgggaccacagcggcaccatagatgtggctggaatctatatccaacccccggtcccagtccaggctcagggtcttccccccgtctcgggtctgaatcatccctctag

SEQ ID NO: 343130 - DNA, 1233 bp, Artificial Sequence
  derived and/or modified sequence
atgctgctgctggtgaccagcctgctgctgtgtgagctgccccacccagccttcctgctgatccctgagaagagtgacctgaggacagtggccccagccagcagcctgaatgtgcgctttgacagcaggaccatgaacctgtcctgggactgccaggagaacaccaccttcagcaagtgcttcctgacagacaagaagaacagagtggtggagccccggctgagcaacaatgaatgtagctgcaccttccgggagatctgcctgcatgaaggagtgacctttgaggtgcacgtgaacaccagccagaggggcttccagcagaagctgctgtaccccaacagcggccgggagggcacagctgcccagaacttcagctgcttcatctacaatgctgacctgatgaactgcacctgggcccggggccccacagcccccagagatgtgcagtacttcctgtacatccggaacagcaagagaagaagagagatccgctgcccctactacatccaggacagcggcacccacgtgggctgccacctggacaacctgagcggcctgaccagcaggaactacttcctggtgaatggcaccagccgggagatcggcatccagttctttgacagcctgctggacaccaagaagattgagcgcttcaacccccccagcaatgtgacagtgcgctgcaacaccacccactgcctggtgcgctggaagcagcccaggacctaccagaagctgagctacctggacttccagtaccagctggatgtgcacaggaagaacacccagcccggcacagagaacctgctgatcaacgtgtctggggacctggagaaccgctacaacttccccagcagcgagccccgggccaagcacagcgtgaagatccgggctgctgatgtgcgcatcctgaactggagctcctggagcgaggccattgaatttggaagtgatgatggcaacctgggctctgtgtacatctacgtgctgctgattgtgggcaccctggtgtgtggcatcgtgctgggcttcctgttcaagcgcttcctgcgcatccagaggctcttcccccctgtgccccagatcaaggacaagctgaatgacaaccacgaggtggaggatgagatgggcccccagaggcaccaccgctgtggctggaacctgtaccccaccccaggccccagccctggcagcggcagcagcccccggctgggcagcgagagcagcctgtag

SEQ ID NO: 343131 - DNA, 1233 bp, Artificial Sequence
  derived and/or modified sequence
atgctgctgctggtgaccagcctgctgctgtgcgagctgccccacccagcctttcttttgattcccgagaagtccgatctgagaactgtcgctcccgcaagtagcctgaacgtgcggttcgatagcagaaccatgaatctgagctgggactgtcaggagaataccaccttctcgaaatgcttcctcacagataaaaagaatagggtggtcgagcctcgcctgtccaacaatgagtgttcctgtacgtttcgggagatatgtttacacgagggggtcacttttgaggtacatgtgaacaccagccaacggggatttcagcaaaaattgctgtatcccaactcaggccgagaggggaccgctgcccagaatttctcttgtttcatctataacgccgaccttatgaattgcacatgggccaggggcccaacagctcccagggatgtgcagtattttctgtacatcaggaacagcaagcgtcgtagagaaatccggtgtccctactacattcaggattctgggacccatgtcggctgccacctggacaatctcagtggcttgacgagccgcaactactttctggttaatggcacttccagagaaattggtatccagttctttgattcactgctggacacaaaaaagatcgagaggttcaatcctccatcaaacgttacagtgcgctgtaacaccacacattgccttgtgcggtggaaacagccaagaacttaccagaaactgtcctatctggattttcagtaccagttggacgtccatcggaagaatactcaacctggcaccgaaaacctcctgataaacgtgtccggagacctggagaatagatacaattttccaagctcagagccgcgggccaaacacagcgtgaagattcgtgcggccgacgtcagaattctcaattggagctcgtggtctgaggcgattgaattcggatcggacgacgggaacctgggctccgtgtacatctacgtgctcttaattgttggaacgctggtttgcgggatcgttttgggatttttgttcaagcgcttccttagaatccagcggcttttcccacccgtgcctcagattaaagataagttaaacgataatcacgaggtggaagatgaaatgggtccacagcgccaccataggtgtggatggaatctttacccaacacccggtccatcaccaggatctggatctagtcctagacttggatctgagtcaagcttatag

SEQ ID NO: 343132 - DNA, 1233 bp, Artificial Sequence
  derived and/or modified sequence
atgctcctgttggtcacatcgctgctcctctgcgaactccctcacccagcattcctcctcatcccagagaagagcgaccttaggaccgttgcacccgcttctagtctcaatgtgagatttgattctcggaccatgaacctctcttgggactgccaagagaacacaacattctcgaaatgctttctgacagacaagaaaaaccgggttgtggagccacgtctaagtaacaatgaatgctcttgtacatttcgagagatatgcctgcacgagggagtgacattcgaggttcacgtcaacacaagccagagagggttccaacagaaactgctgtaccctaatagtggaagagaggggacagctgctcagaacttctcctgcttcatctataatgccgacctcatgaactgtacctgggcacgcggtcctactgccccacgggatgttcaatactttctttacatacggaactcaaagagaagaagggaaattcggtgcccgtattatattcaggacagcggaacccatgtgggctgtcatcttgacaatcttagcgggcttacttctcgtaattacttcctggtgaacgggacctctcgtgaaatcggcatccagttttttgattcgctgctcgacactaaaaagattgagaggttcaatccccctagcaacgtgaccgtcagatgtaacactactcactgtctcgtccgctggaaacaacccaggacctaccagaagctcagctatctcgatttccaatatcagctagacgtgcacaggaagaatacccagccaggcaccgagaatctgctgataaatgtttctggcgatctcgagaacagatataatttcccatcttccgagcccagagcaaagcacagcgtaaaaatacgcgctgcagacgtacggatcctgaattggagctcatggtccgaagcaatcgaatttggtagcgatgacggaaacctgggatctgtgtatatctacgttcttctgatcgttggaacccttgtctgcgggatcgtgctgggcttcctgtttaagaggtttttgagaatccagcgactgtttcctcctgtgccacagatcaaggataagctcaacgataatcatgaggtggaggacgagatgggcccacagcgacaccacagatgcggttggaacctgtaccctacccctggtccttcccctggcagtggatctagtcctcggctgggcagtgagtcaagtctctag

SEQ ID NO: 343133 - DNA, 1601 bp, Artificial Sequence
  derived and/or modified sequence
ccgagagaagaaaagcaggtggaaggagaggaagcggatgccgtggggtttacagcaggaaaatccgtggagacagcagatccgagaagcggcgatgtttgcgtagaaccctgtacgtgcttccttcggcctgtcgctcttcccttctctctgaccagcaccatgcttctcctggtgacaagccttctgctctgtgagttaccacacccagcattcctcctgatcccagagaaatcggatctgcgaacagtggcaccagcctctagtctcaatgtgaggtttgactccaggacgatgaatttaagctgggactgccaagaaaacacaaccttcagcaagtgtttcttaactgacaagaagaacagagtcgtggaacccaggctcagtaacaacgaatgttcgtgcacatttcgtgaaatttgtctgcatgaaggagtcacatttgaggttcacgtgaatactagtcaaagaggatttcaacagaaactgctttatccaaattcaggaagggagggtaccgctgctcagaatttctcctgtttcatctacaatgcggatttaatgaactgtacctgggcgaggggtccgacggccccccgtgacgtccagtattttttgtacatacgaaactcaaagagaaggagggagatccggtgtccttattacatacaagactcaggaacccatgtgggatgtcacctggataacctgtcaggattaacgtctcgcaattactttctggttaacggaaccagccgagaaattggcatccaattctttgattcacttttggacacaaagaaaatagaacgattcaaccctcccagcaatgtcaccgtacgttgcaacacgacgcactgcctcgtacggtggaaacagcccaggacctatcagaagctgtcgtacctggactttcagtaccagctggacgtccacagaaagaatacccagcctggcacggaaaacctactgattaatgtttctggtgatttggaaaatagatacaactttccaagctctgagcccagagcaaaacacagtgtgaagatcagagctgcagacgtccgcatcttgaattggagctcctggagtgaagccattgaatttggttctgacgacgggaacctcggctctgtgtacatttatgtgctcctaatcgtgggaacccttgtctgtggcatcgtcctcggcttcctctttaaaaggttccttaggatacagcggctgttcccgccagttccacagatcaaagacaaactgaatgataaccatgaggtggaagacgagatgggaccgcagcgtcaccaccggtgtggctggaatctgtatcccactcctgggccttctcccgggtcggggtcttctccaaggttggggtcagagtcatctctgtgagctccatcaggagaaactgaggcagggtggtggtcaagaaaaggaggagaagacggtagagagggccaggcacggtggctcatgcctgtcatcccagcactttgggaggttgaggcatgtggatcatctgaggtcagaggttcgagaccagcctggccaacgtggtgaaaccccatctctgctaaaaatacaaaaaattagctggg

SEQ ID NO: 343134 - DNA, 1233 bp, Artificial Sequence
  derived and/or modified sequence
atgctgctgctggtgaccagcctgctgctgtgcgagctgccccaccccgccttcctgctgatccccgagaagagcgacctgagaaccgtggcccccgccagcagcctgaacgtgagattcgacagcagaaccatgaacctgagctgggactgccaggagaacaccaccttcagcaagtgcttcctgaccgacaagaagaacagagtggtggagcccagactgagcaacaacgagtgcagctgcaccttcagagagatctgcctgcacgagggcgtgaccttcgaggtgcacgtgaacaccagccagagaggcttccagcagaagctgctgtaccccaacagcggcagagagggcaccgccgcccagaacttcagctgcttcatctacaacgccgacctgatgaactgcacctgggccagaggccccaccgcccccagagacgtgcagtacttcctgtacatcagaaacagcaagagaagaagagagatcagatgcccctactacatccaggacagcggcacccacgtgggctgccacctggacaacctgagcggcctgaccagcagaaactacttcctggtgaacggcaccagcagagagatcggcatccagttcttcgacagcctgctggacaccaagaagatcgagagattcaacccccccagcaacgtgaccgtgagatgcaacaccacccactgcctggtgagatggaagcagcccagaacctaccagaagctgagctacctggacttccagtaccagctggacgtgcacagaaagaacacccagcccggcaccgagaacctgctgatcaacgtgagcggcgacctggagaacagatacaacttccccagcagcgagcccagagccaagcacagcgtgaagatcagagccgccgacgtgagaatcctgaactggagcagctggagcgaggccatcgagttcggcagcgacgacggcaacctgggcagcgtgtacatctacgtgctgctgatcgtgggcaccctggtgtgcggcatcgtgctgggcttcctgttcaagagattcctgagaatccagagactgttcccccccgtgccccagatcaaggacaagctgaacgacaaccacgaggtggaggacgagatgggcccccagagacaccacagatgcggctggaacctgtaccccacccccggccccagccccggcagcggcagcagccccagactgggcagcgagagcagcctgtag

SEQ ID NO: 343135 - protein, 333 aa, Artificial Sequence
  derived and/or modified sequence
MLLLVTSLLLCELPHPAFLLIPEKSDLRTVAPASSLNVRFDSRTMNLSWDCQENTTFSKCFLTDKKNRVVEPRLSNNECSCTFREICLHEGVTFEVHVNTSQRGFQQKLLYPNSGREGTAAQNFSCFIYNADLMNCTWARGPTAPRDVQYFLYIRNSKRRREIRCPYYIQDSGTHVGCHLDNLSGLTSRNYFLVNGTSREIGIQFFDSLLDTKKIERFNPPSNVTVRCNTTHCLVRWKQPRTYQKLSYLDFQYQLDVHRKNTQPGTENLLINVSGDLENRYNFPSSEPRAKHSVKIRAADVRILNWSSWSEAIEFGSLGYSGCSRQFHRSKTN

SEQ ID NO: 343136 - DNA, 1002 bp, Artificial Sequence
  derived and/or modified sequence
atgctgctgctggtaacttcgctgcttctgtgcgagttaccccatcctgcctttctcctgattcctgagaagagcgacctcagaactgtcgcccctgcctctagtttgaacgttcggttcgactcgcgtaccatgaacctgtcttgggattgtcaggaaaataccacattctcaaagtgtttcttgacagataagaagaaccgtgtggtggagccacggctgtctaataacgaatgttcttgcaccttcagagagatctgcttgcacgagggagtgactttcgaggtgcacgtgaataccagtcaaaggggtttccaacagaagctgttgtatccaaactccgggagagaaggtacagctgctcagaatttttcctgtttcatctataacgctgatctcatgaattgtacctgggccagggggcctacagccccacgtgatgtgcagtactttctttacatccggaacagtaagagaagacgggagatcaggtgcccgtattacattcaggattctggtacgcacgtcggttgtcacttggataatttaagcgggcttactagcaggaattacttcctggtgaatggtaccagccgggaaatcggcatccagttcttcgatagtctgctggacacaaagaaaatagagagattcaatccgccttccaacgtcactgtgaggtgcaacactacacactgtctggtgagatggaaacaacccagaacctaccagaagctgagttatctcgattttcagtaccaactcgacgttcatcgaaagaatacacagcctggcacagaaaatcttcttatcaatgtgtcaggcgacctggagaacagatataactttccatccagcgagccaagggctaaacatagcgtgaagattagggctgccgacgtgcgcattctgaactggtcatcctggagcgaggctatcgagtttgggtcactgggatactccgggtgctctcgccagttccatagaagcaagacaaattag

SEQ ID NO: 343137 - DNA, 1002 bp, Artificial Sequence
  derived and/or modified sequence
atgctactcttggtgacatcgcttctgctttgtgagctgcctcatcccgcatttctgttgattccagaaaaatctgatctgcgcaccgtagcccccgcatcatctctcaatgtgcgattcgactccaggacaatgaatctgagttgggactgccaagagaataccacattttctaagtgttttttaactgacaagaaaaaccgcgttgttgagccacgcctctcgaataacgagtgctcctgtactttcagagaaatctgcctgcatgaaggcgtaactttcgaggtccatgtgaacacctctcagcggggcttccagcaaaaactcctgtatccgaactctgggagagaaggaaccgcagcccagaacttctcgtgtttcatttataatgcggacctcatgaactgcacatgggccagaggtcctaccgctcctagagacgtccagtattttctgtatatcaggaacagcaagaggaggcgcgaaatcaggtgtccctattacatacaggattcagggactcatgtgggctgtcacctcgataacttgagtgggctcacatcacgaaactatttccttgtgaacggcaccagtagggaaatcggcattcagttctttgactctctcttggacaccaaaaagatagagagattcaatccgccgtcaaacgtgactgttaggtgtaacaccactcactgtctggtcaggtggaaacagcctcgcacctaccagaagctctcttatctggacttccagtaccagctcgatgtacatcgcaagaacactcagcccgggaccgaaaacttgctgatcaacgtgagtggtgacctcgagaacagatacaatttccccagcagcgagcctagggccaagcactctgtgaagatccgcgcagccgacgtgagaattcttaactggagttcatggtctgaggctatcgagtttgggagcctcgggtacagcggctgttccagacagttccacagatcaaagaccaactag

SEQ ID NO: 343138 - DNA, 861 bp, Artificial Sequence
  derived and/or modified sequence
atgctgctgctggtcacatctctactgctctgcgaactcccacatccagcttttcttctgatcccagagaaatcagacctgcggaccgtcgcaccagccagctccctgaatgtcaggttcgattctcgaacgatgaacttatcgtgggactgccaggaaaatacaacattctctaagtgttttttaactgacaagaaaaatcgcgtggtcgagcccagattaagcaacaacgaatgttcatgtacttttcgtgagatttgcctccacgaaggggtcacttttgaggttcatgttaacactagccagagagggtttcagcagaagctgctgtaccccaattcaggtcgggagggtaccgcagcccagaatttctcttgcttcatttacaatgctgatctgatgaactgtacgtgggctcgaggccctaccgcccctagggacgtgcagtacttcttatacatccgcaattctaagagaagacgggagattagatgcccttactacattcaagactcaggtacgcacgttggctgccatctcgataatctgagcggcctcacttcccggaactatttccttgtcaacgggacatcgcgcgagatcgggatccaattctttgatagtctcctggacaccaagaagatcgaacgatttaatcctccatccaatgtaaccgtgcgatgtaacaccacgcattgcctggttcgatggaagcagcctcggacttatcagaaactgtcttaccttgatttccaataccagctggacgtacatcggaaaaacactcaaccgggcactgaaaacctcctggtagttctgaccaccggcacctccgccttatgcacctttatgtgcagctag

SEQ ID NO: 343139 - DNA, 717 bp, Artificial Sequence
  derived and/or modified sequence
atgttgctcttagtgacaagcctactgctatgcgagctccctcatcccgctttcctcctaatcccagagaagagtgacctgcggacagttgctccagcctctagtttgaatgtgcgttttgattcaagaacaatgaatctgtcatgggactgccaggagaacactactttcagtaagtgctttttaacagataagaagaatcgagttgtggagcctcggctgagtaacaatgagtgcagttgcacgtttcgagaaatttgcctccatgagggcgtcacattcgaagtgcatgtgaatacctcccagagggggttccagcagaaattgctgtatcccaatagcggaagagaggggacagctgctcagaatttttcttgtttcatctacaatgccgaccttatgaattgtacctgggcaagaggcccaactgcccctagggacgtccagtacttcctctacattcggaattccaaacgtagacgggaaatccgctgcccctattatatccaggactctggaacccacgtgggttgtcacttagacaacctgtccgggctgaccagtcgtaactatttcctggtgaacggaaccagtagagagatcggcattcagttctttgactccctgctagacacaaagaagattgagcgatttaatccgccttccaacgtgactgtccgctgcaacactacccattgtttggtgaggtggaaatag

SEQ ID NO: 343140 - DNA, 1002 bp, Artificial Sequence
  derived and/or modified sequence
atgctgctgctggtgaccagcctgctgctgtgtgagctgccccacccagccttcctgctgatccctgagaagagtgacctgaggacagtggccccagccagcagcctgaatgtgcgctttgacagcaggaccatgaacctgtcctgggactgccaggagaacaccaccttcagcaagtgcttcctgacagacaagaagaacagagtggtggagccccggctgagcaacaatgaatgtagctgcaccttccgggagatctgcctgcatgaaggagtgacctttgaggtgcacgtgaacaccagccagaggggcttccagcagaagctgctgtaccccaacagcggccgggagggcacagctgcccagaacttcagctgcttcatctacaatgctgacctgatgaactgcacctgggcccggggccccacagcccccagagatgtgcagtacttcctgtacatccggaacagcaagagaagaagagagatccgctgcccctactacatccaggacagcggcacccacgtgggctgccacctggacaacctgagcggcctgaccagcaggaactacttcctggtgaatggcaccagccgggagatcggcatccagttctttgacagcctgctggacaccaagaagattgagcgcttcaacccccccagcaatgtgacagtgcgctgcaacaccacccactgcctggtgcgctggaagcagcccaggacctaccagaagctgagctacctggacttccagtaccagctggatgtgcacaggaagaacacccagcccggcacagagaacctgctgatcaacgtgtctggggacctggagaaccgctacaacttccccagcagcgagccccgggccaagcacagcgtgaagatccgggctgctgatgtgcgcatcctgaactggagctcctggagcgaggccattgaatttggcagcctgggctacagcggctgcagccggcagttccacaggagcaagaccaactag

SEQ ID NO: 343141 - DNA, 861 bp, Artificial Sequence
  derived and/or modified sequence
atgctgctgctggtgaccagcctgctgctgtgtgagctgccccacccagccttcctgctgatccctgagaagagtgacctgaggacagtggccccagccagcagcctgaatgtgcgctttgacagcaggaccatgaacctgtcctgggactgccaggagaacaccaccttcagcaagtgcttcctgacagacaagaagaacagagtggtggagccccggctgagcaacaatgaatgtagctgcaccttccgggagatctgcctgcatgaaggagtgacctttgaggtgcacgtgaacaccagccagaggggcttccagcagaagctgctgtaccccaacagcggccgggagggcacagctgcccagaacttcagctgcttcatctacaatgctgacctgatgaactgcacctgggcccggggccccacagcccccagagatgtgcagtacttcctgtacatccggaacagcaagagaagaagagagatccgctgcccctactacatccaggacagcggcacccacgtgggctgccacctggacaacctgagcggcctgaccagcaggaactacttcctggtgaatggcaccagccgggagatcggcatccagttctttgacagcctgctggacaccaagaagattgagcgcttcaacccccccagcaatgtgacagtgcgctgcaacaccacccactgcctggtgcgctggaagcagcccaggacctaccagaagctgagctacctggacttccagtaccagctggatgtgcacaggaagaacacccagcccggcacagagaacctgctggtggtgctgaccaccggcaccagcgccctgtgcaccttcatgtgcagctag

SEQ ID NO: 343142 - DNA, 717 bp, Artificial Sequence
  derived and/or modified sequence
atgctgctgctggtgaccagcctgctgctgtgtgagctgccccacccagccttcctgctgatccctgagaagagtgacctgaggacagtggccccagccagcagcctgaatgtgcgctttgacagcaggaccatgaacctgtcctgggactgccaggagaacaccaccttcagcaagtgcttcctgacagacaagaagaacagagtggtggagccccggctgagcaacaatgaatgtagctgcaccttccgggagatctgcctgcatgaaggagtgacctttgaggtgcacgtgaacaccagccagaggggcttccagcagaagctgctgtaccccaacagcggccgggagggcacagctgcccagaacttcagctgcttcatctacaatgctgacctgatgaactgcacctgggcccggggccccacagcccccagagatgtgcagtacttcctgtacatccggaacagcaagagaagaagagagatccgctgcccctactacatccaggacagcggcacccacgtgggctgccacctggacaacctgagcggcctgaccagcaggaactacttcctggtgaatggcaccagccgggagatcggcatccagttctttgacagcctgctggacaccaagaagattgagcgcttcaacccccccagcaatgtgacagtgcgctgcaacaccacccactgcctggtgcgctggaagtag

SEQ ID NO: 343143 - DNA, 1002 bp, Artificial Sequence
  derived and/or modified sequence
atgctgctgctggtgaccagcctgctgctgtgcgagctgccccacccagccttcctcttaatccccgaaaagtccgacttaagaaccgtggcacctgccagctctctgaacgtaaggttcgattctagaacgatgaatctgtcctgggactgtcaagaaaatactacattctctaaatgctttcttactgacaagaaaaatagagtggttgagcccaggctgtccaataatgaatgttcttgtacattcagagaaatctgcctgcatgagggagtcacattcgaggtgcatgtcaataccagccagcgcggattccagcagaaactcctctatccaaactccggcagggaaggtacagcagcacagaacttttcttgtttcatctacaatgccgaccttatgaactgcacttgggctaggggccccactgcacctagggatgtccaatacttcctgtatatccgtaactcaaagaggagaagagaaatccgatgtccttactacattcaggactcaggaacccacgtaggttgtcacttagataatttatctggactgactagtcgtaactactttcttgttaatgggacctccagggaaatcgggatccagtttttcgatagcttattggacactaaaaaaatcgaaagatttaacccaccctcaaacgttacggtgagatgcaacactacccactgccttgtgcggtggaagcagcccaggacgtatcaaaaactgtcttacttggattttcagtatcaattggatgtccacaggaagaatactcagcccggcactgagaacctcctaataaacgtgtctggggacctcgaaaacagatacaacttccctagcagcgagcctcgagctaagcattcagtgaagattagagctgctgacgtacgcatccttaactggtcgagctggtccgaggctatcgaatttggctccctcggatacagcggctgcagccggcagtttcataggtcaaagaccaactag

SEQ ID NO: 343144 - DNA, 1002 bp, Artificial Sequence
  derived and/or modified sequence
atgctgctgctggtgaccagcctgctgctgtgcgagctgccccaccctgcctttcttctcatccccgagaagtctgaccttaggactgtcgcaccagcttcctctcttaacgtgaggtttgattcccgcaccatgaatttgtcttgggattgtcaagaaaataccactttctccaaatgcttcctgacagacaaaaaaaatagagtcgtggagcctcgccttagtaacaatgagtgtagctgcactttcagagagatttgcctgcatgaaggagttactttcgaggttcacgtgaacacaagccagagagggttccagcagaagctgctgtaccccaactcggggagggagggcacagccgctcagaactttagctgcttcatctataatgctgatctcatgaattgcacctgggcgagaggccccaccgctccaagggacgtgcagtattttctatacattcgcaacagcaaacgccggagagaaatcaggtgtccttactatattcaggattcgggcactcacgttggctgccatttagacaacctcagtggcctcaccagtcggaactactttctggtcaatggtacatcccgagaaattggcatccagttctttgatagcctgctcgacactaaaaaaatcgagcgatttaaccctccatctaatgtaaccgtgagatgcaataccacccactgtctcgttcgctggaagcagcctagaacttaccagaagctcagttatctggacttccaatatcaattggacgtacataggaagaacacccagcctggcaccgagaacctgctgattaatgtgagcggtgacctcgagaatcgctataactttcctagctctgaaccacgggccaagcactcagtcaagattcgcgcggctgatgtgcgcatcctcaactggtcaagttggagcgaagcgattgaattcggttccctgggctatagcggatgctcccgccagttccaccggagcaagaccaactag

SEQ ID NO: 343145 - DNA, 861 bp, Artificial Sequence
  derived and/or modified sequence
atgctgctgctggtgaccagcctgctgctgtgcgagctgccccaccccgccttcttactgattccagagaagtctgacttgcgtactgtggcccccgcctcaagcttgaatgtacgcttcgattcaaggactatgaacttaagctgggattgccaggagaacacgacgttctccaagtgcttcctgactgacaagaaaaatagggtggttgaacccagactgagtaacaacgaatgttcctgcactttcagggagatctgccttcacgaaggagttacctttgaagttcatgtgaacaccagccaacgcggtttccagcagaagctgttgtacccaaactcagggcgtgaggggacggctgcccagaacttttcttgctttatttacaacgcggatctgatgaactgcacttgggcccgggggccgacagcacctcgcgatgttcagtatttcctttacataagaaacagcaagcgaaggcgcgagatccgctgtccctactacattcaagattccggtacacacgtgggatgtcatttagataatctgagcggcctgaccagccggaactatttcctggtcaacggcacctctagagaaattggcattcagttttttgactctcttcttgacactaagaagatagaaaggttcaatccgccaagcaacgtcaccgttagatgtaacaccacccactgcctagtaaggtggaaacagccacggacctaccagaagctctcctacctggatttccagtatcagctggacgtccacagaaagaacacacagcccggcaccgaaaacctgctggtagtcctgaccacaggcacaagcgccctatgcactttcatgtgttcctag

SEQ ID NO: 343146 - DNA, 717 bp, Artificial Sequence
  derived and/or modified sequence
atgctgctgctggtgaccagcctgctgctgtgcgagctgccccaccctgcattccttttgatcccagagaagtccgatttgagaacagtcgcccctgcctcaagcttgaacgtgcgcttcgatagtcgcacaatgaatctgagctgggattgccaggaaaacaccacgttttctaaatgcttcctcacagataagaaaaatagagtcgtcgagccaagactgagcaataatgaatgcagctgcaccttcagggagatttgtcttcacgaaggcgtgacattcgaagtgcatgtgaacacctctcaacgaggctttcagcaaaagctgctctaccccaactctgggcgtgaaggtactgcagctcaaaactttagctgttttatttataacgctgacctaatgaactgcacttgggctagaggtcccacggcaccaagggatgtgcagtactttctgtatattcggaactccaagcgacggagagaaatcaggtgtccctattatatccaggactctgggacccacgtgggctgccatctggataacctgtcaggactcactagtaggaattacttcctcgttaatggcacgtcgagggagatcggtatccagtttttcgacagtctgctggacacgaagaaaatcgagagatttaaccctccctcaaatgttaccgtgcggtgcaataccacccattgcctggttcgctggaaatag

SEQ ID NO: 343147 - DNA, 1002 bp, Artificial Sequence
  derived and/or modified sequence
atgctcctgctcgtgacttcactcctgctctgcgaactcccacatccggcattccttttgatccccgagaaatctgatctcaggacggtggctccagcctccagccttaacgttcggttcgactcccggacaatgaatctatcttgggactgtcaggaaaacacaaccttctccaagtgctttctaaccgacaagaagaatagagttgtggaaccaagactgtcaaataacgagtgtagttgcacctttcgcgagatctgtctgcatgaaggcgtgaccttcgaggtacatgtaaatacctcccagaggggtttccagcagaaattgctctacccgaactccggaagagagggaacagctgcgcaaaacttttcctgttttatttataacgcggatctgatgaattgtacatgggctagagggcctacagctccaagggacgttcagtactttttgtatatcaggaattcaaagcgacgcagggaaattcgctgtccctattacatccaagattccggtacccacgtggggtgccacctggataatctgtccggattgacctctcggaactactttctggtgaacggaacatccagggagatcggaattcagttcttcgattcactgcttgacacaaagaagatcgagcgcttcaatcctccttccaatgtcacagttagatgcaatacaacgcattgtctggtacggtggaagcagcctagaacttatcaaaaactgtcataccttgactttcaataccaactggacgtgcaccggaaaaatacacaacccggaactgaaaacctgctcattaacgtgagcggggatttagaaaacagatataattttccttctagcgagcctcgcgctaagcactcagtgaagatccgcgcagcggacgtgagaatcctcaactggtcatcctggagcgaagccattgagttcggaagtcttggctatagtggctgttctagacagtttcaccgcagcaagaccaactag

SEQ ID NO: 343148 - DNA, 1002 bp, Artificial Sequence
  derived and/or modified sequence
atgctcctccttgtgacgagcctcctgttgtgtgaactcccccaccctgcttttctcctcatcccggaaaagagcgaccttaggactgtcgccccagccagctctcttaacgtgcgattcgactctcgcactatgaacctcagctgggattgtcaggagaataccacctttagtaaatgttttttgacagacaaaaaaaaccgcgtcgtcgagcctagactgtcaaacaatgaatgttcatgtactttccgggagatctgtctgcacgagggcgtgaccttcgaggtccatgtcaacacatcccagcgcggattccagcagaaattgttgtaccctaatagcggcagagaaggtacagccgcacagaacttctcttgctttatatataacgctgatttaatgaattgtacctgggctagaggccctacagcccctcgcgacgtacagtattttctttatattagaaacagcaaaagacgcagggagatacgctgtccttattatattcaggattccgggacccacgtaggctgtcatctcgacaatctttccggactcacctccaggaactattttttggttaacggcacctcacgagagattggaattcagttttttgattcacttctggatacaaagaagatcgaacgattcaatcccccaagcaacgtgaccgtccgctgcaatactacccactgcttggtcagatggaagcaacctcgtacgtaccagaagctgtcatacctcgactttcagtaccagctggatgtgcatcgaaaaaacactcagcccggaacagagaatttgttgatcaacgtgtctggcgatctcgaaaatcgttacaatttcccatcttctgagccacgcgcaaaacactcagtcaagattcgggctgccgacgtcagaattttgaactggagcagttggagtgaagccattgaatttggttcactcggatattcagggtgtagccggcaattccacagatctaaaactaactag

SEQ ID NO: 343149 - DNA, 861 bp, Artificial Sequence
  derived and/or modified sequence
atgctgcttctggtgacatctctgctactatgcgaattgccccatcctgcattcctgcttattcctgaaaaatctgacctccgaaccgtggcccctgccagcagcctgaatgtgagattcgattccagaactatgaacctctcctgggactgtcaggagaatacgacgttctccaaatgtttcctgacagataagaagaaccgcgtagttgagcccagactgagtaacaacgagtgctcgtgtacattccgcgagatctgtcttcatgagggggtgaccttcgaggtccatgttaacacaagccagaggggattccaacagaaactactttatcccaacagcggacgagagggaacggccgctcagaacttttcttgcttcatatacaacgcggacctaatgaactgcacgtgggctagagggcctacagctccccgagacgtgcagtatttcctgtatataaggaattccaaacggcgtcgtgaaattagatgcccctactacatccaggactccggaacacacgtggggtgccatttggacaacctgtctggtctgacaagcagaaattactttctggtgaatgggacctcgagagagatcgggattcagtttttcgactccctgctggacactaagaaaattgaacggttcaaccccccttctaacgtcactgtgcgctgtaacacgacccattgcctggtgaggtggaaacagccgaggacctatcagaagcttagctatctggattttcaataccagctcgatgtccatcgaaagaacacccaaccaggcacagaaaacctgctggtggtcctgacaactggcaccagtgcattgtgcactttcatgtgttcgtag

SEQ ID NO: 343150 - DNA, 717 bp, Artificial Sequence
  derived and/or modified sequence
atgctactattggtcacatccctccttctctgcgaactgcctcacccggctttcctattaatccccgaaaaaagcgacttgagaaccgtcgccccagccagcagcttaaatgtaaggtttgatagcaggaccatgaacttgtcgtgggactgccaggagaacacaaccttttctaaatgtttcttaactgacaaaaaaaatcgggtggttgagcctcgcctcagcaacaacgagtgtagctgcacttttcgggaaatttgtcttcacgagggtgtaactttcgaggttcacgtgaatacatcccagcgaggctttcagcagaaactcctctaccccaattccggtagagagggaaccgctgcccagaacttctcatgcttcatctacaatgcagatctgatgaactgcacctgggcccgtgggcctacggcaccccgtgatgtgcagtacttcctgtatatcaggaatagcaagcggagacgggagattagatgcccctactacatacaggattctgggacacacgtcggatgccacctcgataatctatccggcttaacctcgaggaattattttctcgtgaatggcaccagcagagagattggaatacagtttttcgattccctgttggacaccaaaaagatcgagcgcttcaatccaccatctaatgtgaccgtcaggtgcaacactacccactgtctcgtccgctggaaatag

SEQ ID NO: 343151 - DNA, 1756 bp, Artificial Sequence
  derived and/or modified sequence
ctctgaagggagctactcagaagcgggagtctccgagagaagaaaagcaggtggaaggagaggaagcggatgccgtggggtttacagcaggaaaatccgtggagacagcagatccgagaagcggcgatgtttgcgtagaaccctgtacgtgcttccttcggcctgtcgctcttcccttctctctgaccagcaccatgcttctcctggtgacaagccttctgctctgtgagttaccacacccagcattcctcctgatcccagagaaatcggatctgcgaacagtggcaccagcctctagtctcaatgtgaggtttgactccaggacgatgaatttaagctgggactgccaagaaaacacaaccttcagcaagtgtttcttaactgacaagaagaacagagtcgtggaacccaggctcagtaacaacgaatgttcgtgcacatttcgtgaaatttgtctgcatgaaggagtcacatttgaggttcacgtgaatactagtcaaagaggatttcaacagaaactgctttatccaaattcaggaagggagggtaccgctgctcagaatttctcctgtttcatctacaatgcggatttaatgaactgtacctgggcgaggggtccgacggccccccgtgacgtccagtattttttgtacatacgaaactcaaagagaaggagggagatccggtgtccttattacatacaagactcaggaacccatgtgggatgtcacctggataacctgtcaggattaacgtctcgcaattactttctggttaacggaaccagccgagaaattggcatccaattctttgattcacttttggacacaaagaaaatagaacgattcaaccctcccagcaatgtcaccgtacgttgcaacacgacgcactgcctcgtacggtggaaacagcccaggacctatcagaagctgtcgtacctggactttcagtaccagctggacgtccacagaaagaatacccagcctggcacggaaaacctactgattaatgtttctggtgatttggaaaatagatacaactttccaagctctgagcccagagcaaaacacagtgtgaagatcagagctgcagacgtccgcatcttgaattggagctcctggagtgaagccattgaatttggttccttaggatacagcggctgttcccgccagttccacagatcaaagacaaactgaatgataaccatgaggtggaagacgagatcatctgggaggaattcaccccagaggaagggaaaggctaccgcgaagaggtcttgaccgtgaaggaaattacctgagacccagagggtgtaggaatggcatggacatctccgcctccgcgacacgggggaactgttttcttgatgatgctgtgaacctttatatcattttctatgtttttatttaaaaacatgacatttggggccaggcgcggtggctcacgcctgtaatcccagcactttgggaggccaaggcaggcggatcacctgaggtcaggagttcaagaccagcctgcccaacatggtgaaaccccatctggactaaaaatgcagaaatttacccaggcacggcggcggacgcccatcatcccagctacttgggaggctgaggcaggagaattgcttgaacccgtgaggcggaggttgtagtgagccaagatcgcaccattgcacaccaacctgcgtgacagagcaagattgcatctcaaaacaaacaataataataaataataaaaacctgatatttggctgggc

SEQ ID NO: 343152 - DNA, 1283 bp, Artificial Sequence
  derived and/or modified sequence
ttctctctgaccagcaccatgcttctcctggtgacaagccttctgctctgtgagttaccacacccagcattcctcctgatcccagagaaatcggatctgcgaacagtggcaccagcctctagtctcaatgtgaggtttgactccaggacgatgaatttaagctgggactgccaagaaaacacaaccttcagcaagtgtttcttaactgacaagaagaacagagtcgtggaacccaggctcagtaacaacgaatgttcgtgcacatttcgtgaaatttgtctgcatgaaggagtcacatttgaggttcacgtgaatactagtcaaagaggatttcaacagaaactgctttatccaaattcaggaagggagggtaccgctgctcagaatttctcctgtttcatctacaatgcggatttaatgaactgtacctgggcgaggggtccgacggccccccgtgacgtccagtattttttgtacatacgaaactcaaagagaaggagggagatccggtgtccttattacatacaagactcaggaacccatgtgggatgtcacctggataacctgtcaggattaacgtctcgcaattactttctggttaacggaaccagccgagaaattggcatccaattctttgattcacttttggacacaaagaaaatagaacgattcaaccctcccagcaatgtcaccgtacgttgcaacacgacgcactgcctcgtacggtggaaacagcccaggacctatcagaagctgtcgtacctggactttcagtaccagctggacgtccacagaaagaatacccagcctggcacggaaaacctactgattaatgtttctggtgatttggaaaatagatacaactttccaagctctgagcccagagcaaaacacagtgtgaagatcagagctgcagacgtccgcatcttgaattggagctcctggagtgaagccattgaatttggttccttaggatacagcggctgttcccgccagttccacagatcaaagacaaactgaatgataaccatgaggtggaagacgagatcatctgggaggaattcaccccagaggaagggaaaggctaccgcgaagaggtcttgaccgtgaaggaaattacctgagacccagagggtgtaggaatggcatggacatctccgcctccgcgacacgggggaactgttttcttgatgatgctgtgaacctttatatcattttctatgtttttatttaaaaacatgacatttggggccaggcgcggtggctcacgcctgtaatcccag

SEQ ID NO: 343153 - DNA, 1720 bp, Artificial Sequence
  derived and/or modified sequence
ctctgaagggagctactcagaagcgggagtctccgagagaagaaaagcaggtggaaggagaggaagcggatgccgtggggtttacagcaggaaaatccgtggagacagcagatccgagaagcggcgatgtttgcgtagaaccctgtacgtgcttccttcggcctgtcgctcttcccttctctctgaccagcaccatgcttctcctggtgacaagccttctgctctgtgagttaccacacccagcattcctcctgatcccagagaaatcggatctgcgaacagtggcaccagcctctagtctcaatgtgaggtttgactccaggacgatgaatttaagctgggactgccaagaaaacacaaccttcagcaagtgtttcttaactgacaagaagaacagagtcgtggaacccaggctcagtaacaacgaatgttcgtgcacatttcgtgaaatttgtctgcatgaaggagtcacatttgaggttcacgtgaatactagtcaaagaggatttcaacagaaactgctttatccaaattcaggaagggagggtaccgctgctcagaatttctcctgtttcatctacaatgcggatttaatgaactgtacctgggcgaggggtccgacggccccccgtgacgtccagtattttttgtacatacgaaactcaaagagaaggagggagatccggtgtccttattacatacaagactcaggaacccatgtgggatgtcacctggataacctgtcaggattaacgtctcgcaattactttctggttaacggaaccagccgagaaattggcatccaattctttgattcacttttggacacaaagaaaatagaacgattcaaccctcccagcaatgtcaccgtacgttgcaacacgacgcactgcctcgtacggtggaaacagcccaggacctatcagaagctgtcgtacctggactttcagtaccagctggacgtccacagaaagaatacccagcctggcacggaaaacctactggtagttctgacgacgggaacctcggctctgtgtacatttatgtgctcctaatcgtgggaacccttgtctgtggcatcgtcctcggcttcctctttaaaaggttccttaggatacagcggctgttcccgccagttccacagatcaaagacaaactgaatgataaccatgaggtggaagacgagatcatctgggaggaattcaccccagaggaagggaaaggctaccgcgaagaggtcttgaccgtgaaggaaattacctgagacccagagggtgtaggaatggcatggacatctccgcctccgcgacacgggggaactgttttcttgatgatgctgtgaacctttatatcattttctatgtttttatttaaaaacatgacatttggggccaggcgcggtggctcacgcctgtaatcccagcactttgggaggccaaggcaggcggatcacctgaggtcaggagttcaagaccagcctgcccaacatggtgaaaccccatctggactaaaaatgcagaaatttacccaggcacggcggcggacgcccatcatcccagctacttgggaggctgaggcaggagaattgcttgaacccgtgaggcggaggttgtagtgagccaagatcgcaccattgcacaccaacctgcgtgacagagcaagattgcatctcaaaacaaacaataataataaataataaaaacctgatatttggctgggc

SEQ ID NO: 343154 - DNA, 802 bp, Artificial Sequence
  derived and/or modified sequence
agaagcgggagtctccgagagaagaaaagcaggtggaaggagaggaagcggatgccgtggggctcttcccttctctctgaccagcaccatgcttctcctggtgacaagccttctgctctgtgagttaccacacccagcattcctcctgatcccagagaaatcggatctgcgaacagtggcaccagcctctagtctcaatgtgaggtttgactccaggacgatgaatttaagctgggactgccaagaaaacacaaccttcagcaagtgtttcttaactgacaagaagaacagagtcgtggaacccaggctcagtaacaacgaatgttcgtgcacatttcgtgaaatttgtctgcatgaaggagtcacatttgaggttcacgtgaatactagtcaaagaggatttcaacagaaactgctttatccaaattcaggaagggagggtaccgctgctcagaatttctcctgtttcatctacaatgcggatttaatgaactgtacctgggcgaggggtccgacggccccccgtgacgtccagtattttttgtacatacgaaactcaaagagaaggagggagatccggtgtccttattacatacaagactcaggaacccatgtgggatgtcacctggataacctgtcaggattaacgtctcgcaattactttctggttaacggaaccagccgagaaattggcatccaattctttgattcacttttggacacaaagaaaatagaacgattcaaccctcccagcaatgtcaccgtacgttgcaacacgacgcactgcctcgtacggtggaaa

SEQ ID NO: 343155 - DNA, 1002 bp, Artificial Sequence
  derived and/or modified sequence
atgctgctgctggtgaccagcctgctgctgtgcgagctgccccaccccgccttcctgctgatccccgagaagagcgacctgagaaccgtggcccccgccagcagcctgaacgtgagattcgacagcagaaccatgaacctgagctgggactgccaggagaacaccaccttcagcaagtgcttcctgaccgacaagaagaacagagtggtggagcccagactgagcaacaacgagtgcagctgcaccttcagagagatctgcctgcacgagggcgtgaccttcgaggtgcacgtgaacaccagccagagaggcttccagcagaagctgctgtaccccaacagcggcagagagggcaccgccgcccagaacttcagctgcttcatctacaacgccgacctgatgaactgcacctgggccagaggccccaccgcccccagagacgtgcagtacttcctgtacatcagaaacagcaagagaagaagagagatcagatgcccctactacatccaggacagcggcacccacgtgggctgccacctggacaacctgagcggcctgaccagcagaaactacttcctggtgaacggcaccagcagagagatcggcatccagttcttcgacagcctgctggacaccaagaagatcgagagattcaacccccccagcaacgtgaccgtgagatgcaacaccacccactgcctggtgagatggaagcagcccagaacctaccagaagctgagctacctggacttccagtaccagctggacgtgcacagaaagaacacccagcccggcaccgagaacctgctgatcaacgtgagcggcgacctggagaacagatacaacttccccagcagcgagcccagagccaagcacagcgtgaagatcagagccgccgacgtgagaatcctgaactggagcagctggagcgaggccatcgagttcggcagcctgggctacagcggctgcagcagacagttccacagaagcaagaccaactag

SEQ ID NO: 343156 - DNA, 861 bp, Artificial Sequence
  derived and/or modified sequence
atgctgctgctggtgaccagcctgctgctgtgcgagctgccccaccccgccttcctgctgatccccgagaagagcgacctgagaaccgtggcccccgccagcagcctgaacgtgagattcgacagcagaaccatgaacctgagctgggactgccaggagaacaccaccttcagcaagtgcttcctgaccgacaagaagaacagagtggtggagcccagactgagcaacaacgagtgcagctgcaccttcagagagatctgcctgcacgagggcgtgaccttcgaggtgcacgtgaacaccagccagagaggcttccagcagaagctgctgtaccccaacagcggcagagagggcaccgccgcccagaacttcagctgcttcatctacaacgccgacctgatgaactgcacctgggccagaggccccaccgcccccagagacgtgcagtacttcctgtacatcagaaacagcaagagaagaagagagatcagatgcccctactacatccaggacagcggcacccacgtgggctgccacctggacaacctgagcggcctgaccagcagaaactacttcctggtgaacggcaccagcagagagatcggcatccagttcttcgacagcctgctggacaccaagaagatcgagagattcaacccccccagcaacgtgaccgtgagatgcaacaccacccactgcctggtgagatggaagcagcccagaacctaccagaagctgagctacctggacttccagtaccagctggacgtgcacagaaagaacacccagcccggcaccgagaacctgctggtggtgctgaccaccggcaccagcgccctgtgcaccttcatgtgcagctag

SEQ ID NO: 343157 - DNA, 717 bp, Artificial Sequence
  derived and/or modified sequence
atgctgctgctggtgaccagcctgctgctgtgcgagctgccccaccccgccttcctgctgatccccgagaagagcgacctgagaaccgtggcccccgccagcagcctgaacgtgagattcgacagcagaaccatgaacctgagctgggactgccaggagaacaccaccttcagcaagtgcttcctgaccgacaagaagaacagagtggtggagcccagactgagcaacaacgagtgcagctgcaccttcagagagatctgcctgcacgagggcgtgaccttcgaggtgcacgtgaacaccagccagagaggcttccagcagaagctgctgtaccccaacagcggcagagagggcaccgccgcccagaacttcagctgcttcatctacaacgccgacctgatgaactgcacctgggccagaggccccaccgcccccagagacgtgcagtacttcctgtacatcagaaacagcaagagaagaagagagatcagatgcccctactacatccaggacagcggcacccacgtgggctgccacctggacaacctgagcggcctgaccagcagaaactacttcctggtgaacggcaccagcagagagatcggcatccagttcttcgacagcctgctggacaccaagaagatcgagagattcaacccccccagcaacgtgaccgtgagatgcaacaccacccactgcctggtgagatggaagtag

SEQ ID NO: 343158 - DNA, 702 bp, Artificial Sequence
  derived and/or modified sequence
atgggacggctggtcctcctgtggggggccgccgtctttctgctggggggatggatggccctggggcagggtggagctgcagagggcgtgcagattcagattatctacttcaatctggaaacagtacaggtgacctggaacgcctccaagtattccaggactaatcttacatttcattatcgtttcaacggcgatgaggcctatgaccagtgcacgaattatctcttgcaggaaggccacaccagcgggtgtttgctggatgcagaacaacgggatgacattctgtatttttccatccgcaatggtactcacccagtctttacagcttctagatggatggtctattacctgaaaccatcatccccgaagcacgtccgcttctcctggcaccaggatgcagtgaccgtgacttgttcagatttaagctatggcgacctgctctacgaggttcagtatcgatccccatttgataccgagtggcagacacaaagtcgttcggtgacccaggcgggagtgcagtggtgcgacctgtgcctgctgcagccctcccccccccgattcaagagatttagttgcctgtcgctaccgtccagctgggattaccgccacccccccccacgtctggccaatttctgcattattagcagagatggcgtaagcccctgctggcctgggtggtctcgtacgtgcgatctgcggtag

SEQ ID NO: 343159 - DNA, 702 bp, Artificial Sequence
  derived and/or modified sequence
atgggccgcctggtgctgctgtggggcgctgctgtgttcctgctgggcggctggatggccctgggccagggcggcgctgctgagggcgtgcagatccagatcatctacttcaacctggagaccgtgcaggtgacctggaatgccagcaagtacagcaggaccaacctgaccttccactaccgcttcaatggagatgaggcctatgaccagtgcaccaactacctgctgcaggagggccacaccagcggctgcctgctggatgctgagcagagagatgacatcctgtacttcagcatcagaaatggcacccaccctgtgttcaccgccagccgctggatggtgtactacctgaagcccagcagccccaagcacgtgcgcttctcctggcaccaggatgctgtgacagtgacctgcagcgacctgtcctatggagacctgctgtatgaggtgcagtaccgcagcccctttgacacagagtggcagacccagagccgctctgtgacccaggccggcgtgcagtggtgtgacctgtgcctgctgcagcccagccccccacgcttcaagcgcttcagctgcctgagcctgcccagctcctgggactaccgccaccccccaccccggctggccaacttctgcatcatcagcagagatggagtgagcccctgctggccaggctggagcaggacctgtgacctgaggtag

SEQ ID NO: 343160 - DNA, 702 bp, Artificial Sequence
  derived and/or modified sequence
atgggccggctggtgctgctgtggggcgccgccgtgttcctgctggggggctggatggcactgggacagggcggggcggccgagggagttcagatacaaataatctatttcaatcttgagacagtccaggtgacctggaatgctagtaagtactcccgcaccaatctgaccttccactaccggttcaatggagatgaagcttatgatcagtgcaccaattatttgctgcaggagggtcatactagtgggtgccttctggatgctgagcagcgggacgatattttgtacttctctatccgaaatgggactcacccagtcttcacagcctccagatggatggtatactacctcaaaccaagttcccctaaacacgtgcgcttctcctggcaccaggacgcagttaccgtcacttgttccgacctctcatatggcgacctgctttacgaggtacagtaccgctctcctttcgacacagagtggcagacacagagcaggagcgttactcaagccggtgtgcaatggtgcgatctatgccttctccagccatcaccacctagatttaagaggttctcttgtttaagcctgccctcgtcatgggactaccgccatcctccaccccgcctcgccaacttctgcattatttccagagacggagtgtcaccttgttggccaggttggtcacgcacatgtgatctccgatag

SEQ ID NO: 343161 - DNA, 702 bp, Artificial Sequence
  derived and/or modified sequence
atggggagactggtcctcctgtggggagctgcagtgttcctgctggggggttggatggccctcggacagggaggagccgctgagggagttcaaatccagattatatacttcaacctagaaaccgtccaggttacttggaatgcgtccaaatacagcagaaccaacttgaccttccactacagatttaatggcgatgaagcatacgatcagtgcaccaattatttacttcaggagggacatacctctggctgcctccttgatgctgaacaacgtgatgacatcctgtacttctcaatacggaatgggacccaccctgtcttcacagcttccaggtggatggtatattaccttaagccaagttctccgaagcatgtcaggttctcctggcaccaagatgccgtaacagttacttgctcagatctctcctatggagatctgctgtatgaagtgcaatatcgtagcccttttgacactgaatggcagactcagtcaagaagcgttacccaagctggtgtgcagtggtgcgatttgtgcctgctccaaccctcccctcctcgcttcaaaagattttcttgcttaagtctgccctcatcatgggactatagacaccccccacccaggctggccaacttctgcatcatttctcgggatggtgtatccccatgctggcccggatggtcccggacatgcgacctgcgctag

SEQ ID NO: 343162 - DNA, 702 bp, Artificial Sequence
  derived and/or modified sequence
atggggcggctggttctgctgtggggagctgccgtctttctgctgggaggctggatggctttggggcaaggaggagcagcagaaggagtacagattcagatcatctacttcaatttagaaaccgtgcaggtgacatggaatgccagcaaatactccaggaccaacctgactttccactacagattcaacggtgatgaggcctatgaccagtgcaccaactaccttctccaggaaggtcacacttcggggtgcctcctagacgcagagcagcgagacgacattctctatttctccatcaggaatgggacgcaccccgttttcaccgcaagtcgctggatggtttattacctgaaacccagttccccgaagcacgtgagattttcgtggcatcaggatgcagtgacggtgacgtgttctgacctgtcctacggggatctcctctatgaggttcagtaccggagccccttcgacaccgagtggcagacacagtcccgctctgtcacccaggctggagtgcagtggtgcgatctctgcttgctacaaccttcgcctcccaggttcaagcgattctcctgcctcagcctcccaagtagctgggattacaggcacccgccaccacgcctggctaatttttgtattatcagtagagacggggtttctccatgttggccaggctggtctcgaacttgcgacctcaggtga

SEQ ID NO: 343163 - DNA, 702 bp, Artificial Sequence
  derived and/or modified sequence
atgggcagactggtgctgctgtggggcgccgccgtgttcctgctgggcggctggatggccctgggccagggcggcgccgccgagggcgtgcagatccagatcatctacttcaacctggagaccgtgcaggtgacctggaacgccagcaagtacagcagaaccaacctgaccttccactacagattcaacggcgacgaggcctacgaccagtgcaccaactacctgctgcaggagggccacaccagcggctgcctgctggacgccgagcagagagacgacatcctgtacttcagcatcagaaacggcacccaccccgtgttcaccgccagcagatggatggtgtactacctgaagcccagcagccccaagcacgtgagattcagctggcaccaggacgccgtgaccgtgacctgcagcgacctgagctacggcgacctgctgtacgaggtgcagtacagaagccccttcgacaccgagtggcagacccagagcagaagcgtgacccaggccggcgtgcagtggtgcgacctgtgcctgctgcagcccagcccccccagattcaagagattcagctgcctgagcctgcccagcagctgggactacagacaccccccccccagactggccaacttctgcatcatcagcagagacggcgtgagcccctgctggcccggctggagcagaacctgcgacctgagatag

SEQ ID NO: 343164 - DNA, 2032 bp, Artificial Sequence
  derived and/or modified sequence
cagagatagttgggtgacaaatcacctccaggttggggatgcctcagacttgtgatgggactgggcagatgcatctgggaagtaactgctgcaagaacggacagacactgctgcagagaacttgccacggtgtttcatgctgtggctggtggttccaggctgcacgctccattctaggaaaggggccctcagcccagtcccttgcaggctggaccttggagagtgaggccctgaggcgagacatgggcacctggctcctggcctgcatctgcatctgcacctgtgtctgcttgggagtctctgtcacaggggaaggacaagggccaaggtctagaaccttcacctgcctcaccaacaacattctcaggatcgattgccactggtctgccccagagctgggacagggctccagcccctggctcctcttcaccaggctcctggcggcacacataagtgcatcttgcggggcagtgagtgcaccgtcgtgctgccacctgaggcagtgctcgtgccatctgacaatttcaccatcactttccaccactgcatgtctgggagggagcaggtcagcctggtggacccggagtacctgccccggagacacgagcaacatcagttctggccactgcatcctgacctggagcatcagtcctgccttggagccaatgaccacacttctcagctatgagctggccttcaagaagcaggaagaggcctgggagcaggcccagcacagggatcacattgtcggggtgacctggcttatacttgaagcctttgagctggaccctggctttatccatgaggccaggctgcgtgtccagatggccacactggaggatgatgtggtagaggaggagcgttatacaggccagtggagtgagtggagccagcctgtgtgcttccaggctccccagagacaaggccctctgatcccaccctgggggtggccaggcaacacccttgttgctgtgtccatctttctcctgctgactggcccgacctacctcctgttcaagctgtcgcccagacttggatgggggcccacggggccggtgtgctgttgagccaggactgtgctggcaccccacagggagccttggagccctgcgtccaggaggccactgcactgctcacttgtggcccagcgcgtccttggaaatctgtggccctggaggaggaacaggagggccctgggaccaggctcccggggaacctgagctcagaggatgtgctgccagcagggtgtacggagtggagggtacagacgcttgcctatctgccacaggaggactgggcccccacgtccctgactaggccggctcccccagactcagagggcagcaggagcagcagcagcagcagcagcagcaacaacaacaactactgtgccttgggctgctatgggggatggcacctctcagccctcccaggaaacacacagagctctgggcccatcccagccctggcctgtggcctttcttgtgaccatcagggcctggagacccagcaaggagttgcctgggtgctggctggtcactgccagaggcctgggctgcatgaggacctccagggcatgttgctcccttctgtcctcagcaaggctcggtcctggacattctaggtccctgactcgccagatgcatcatgtccattttgggaaaatggactgaagtttctggagcccttgtctgagactgaacctcctgagaaggggcccctagcagcggtcagaggtcctgtctggatggaggctggaggctcccccctcaacccctctgctcagtgcctgtggggagcagcctctaccctcagcatcctggccacaagttcttccttccattgtcccttttctttatccctgacctctctgagaagtggggtgtggtctctcagctgttctgccctcatacccttaaagggccagcctgggcccagtggacacaggtaaggcaccatgaccacctggtgtgacctctctgtgccttactgaggcacctttctagagattaaaaggggcttgatggctgtt

SEQ ID NO: 343165 - DNA, 2278 bp, Artificial Sequence
  derived and/or modified sequence
agcagctctgtaatgcgcttgtggtttcagatgtgggcggcctgtgtgaacctgtcgtgcaaagctcacgtcaccaactgctgcagttatctcctgaatcaggctgagggtctttgctgtgcacccagagatagttgggtgacaaatcacctccaggttggggatgcctcagacttgtgatgggactgggcagatgcatctgggaagtaactgctgcaagaacggacagacactgctgcagagaacttgccacggtgtttcatgctgtggctggtggttccaggctgcacgctccattctaggaaaggggccctcagcccagtcccttgcaggctggaccttggagagtgaggccctgaggcgagacatgggcacctggctcctggcctgcatctgcatctgcacctgtgtctgcttgggagtctctgtcacaggggaaggacaagggccaaggtctagaaccttcacctgcctcaccaacaacattctcaggatcgattgccactggtctgccccagagctgggacagggctccagcccctggctcctcttcaccagcaaccaggctcctggcggcacacataagtgcatcttgcggggcagtgagtgcaccgtcgtgctgccacctgaggcagtgctcgtgccatctgacaatttcaccatcactttccaccactgcatgtctgggagggagcaggtcagcctggtggacccggagtacctgccccggagacacgttaagctggacccgccctctgacttgcagagcaacatcagttctggccactgcatcctgacctggagcatcagtcctgccttggagccaatgaccacacttctcagctatgagctggccttcaagaagcaggaagaggcctgggagcaggcccagcacagggatcacattgtcggggtgacctggcttatacttgaagcctttgagctggaccctggctttatccatgaggccaggctgcgtgtccagatggccacactggaggatgatgtggtagaggaggagcgttatacaggccagtggagtgagtggagccagcctgtgtgcttccaggctccccagagacaaggccctctgatcccaccctgggggtggccaggcaacacccttgttgctgtgtccatctttctcctgctgactggcccgacctacctcctgttcaagctgtcgcccagggtgaagagaatcttctaccagaacgtgccctctccagcgatgttcttccagcccctctacagtgtacacaatgggaacttccagacttggatgggggcccacggggccggtgtgctgttgagccaggactgtgctggcaccccacagggagccttggagccctgcgtccaggaggccactgcactgctcacttgtggcccagcgcgtccttggaaatctgtggccctggaggaggaacaggagggccctgggaccaggctcccggggaacctgagctcagaggatgtgctgccagcagggtgtacggagtggagggtacagacgcttgcctatctgccacaggaggactgggcccccacgtccctgactaggccggctcccccagactcagagggcagcaggagcagcagcagcagcagcagcagcaacaacaacaactactgtgccttgggctgctatgggggatggcacctctcagccctcccaggaaacacacagagctctgggcccatcccagccctggcctgtggcctttcttgtgaccatcagggcctggagacccagcaaggagttgcctgggtgctggctggtcactgccagaggcctgggctgcatgaggacctccagggcatgttgctcccttctgtcctcagcaaggctcggtcctggacattctaggtccctgactcgccagatgcatcatgtccattttgggaaaatggactgaagtttctggagcccttgtctgagactgaacctcctgagaaggggcccctagcagcggtcagaggtcctgtctggatggaggctggaggctcccccctcaacccctctgctcagtgcctgtggggagcagcctctaccctcagcatcctggccacaagttcttccttccattgtcccttttctttatccctgacctctctgagaagtggggtgtggtctctcagctgttctgccctcatacccttaaagggccagcctgggcccagtggacacaggtaaggcaccatgaccacctggtgtgacctctctgtgccttactgaggcacctttctagagattaaaaggggcttgatggctgtt

SEQ ID NO: 343166 - DNA, 1426 bp, Artificial Sequence
  derived and/or modified sequence
gctgtgcacccagagatagttgggtgacaaatcacctccaggttggggatgcctcagacttgtgatgggactgggcagatgcatctgggaaggtcctggtggtgactccaaccctgccctcacatatcccaagagcaggctgactgccttccccattcccacctttccagtaactgctgcaagaacggacagacactgctgcagagaacttgccacggtgtttcatgctgtggctggtggttccaggctgcacgctccattctaggaaagggctggaccttggagagtgaggccctgaggcgagacatgggcacctggctcctggcctgcatctgcatctgcacctgtgtctgcttgggagtctctgtcacaggggaaggacaagggccaaggtctagaaccttcacctgcctcaccaacaacattctcaggatcgattgccactggtctgccccagagctgggacagggctccagcccctggctcctcttcaccagcaaccaggctcctggcggcacacataagtgcatcttgcggggcagtgagtgcaccgtcgtgctgccacctgaggcagtgctcgtgccatctgacaatttcaccatcactttccaccactgcatgtctgggagggagcaggtcagcctggtggacccggagtacctgccccggagacacgttaagctggacccgccctctgacttgcagagcaacatcagttctggccactgcatcctgacctggagcatcagtcctgccttggagccaatgaccacacttctcagctatgagctggccttcaagaagcaggaagaggcctgggagcaggcccagcacagggatcacattgtcggggtgacctggcttatacttgaagcctttgagctggaccctggctttatccatgaggccaggctgcgtgtccagatggccacactggaggatgatgtggtagaggaggagcgttatacaggccagtggagtgagtggagccagcctgtgtgcttccaggctccccagagacaaggccctctgatcccaccctgggggtggccaggcaacacccttgttgctgtgtccatctttctcctgctgactggcccgacctacctcctgttcaagctgtcgcccagggtgaagagaatcttctaccagaacgtgccctctccagcgatgttcttccagcccctctacagtgtacacaatgggaacttccaggtgtgtgcagagaccacagaaggacatggggggcaggggttgcccagagctctggcctgcccaagatgttggctttcatgagggttggcggccagtatgggaggcttgtcagtgcttggagccttttttgtatattcagtgaatttcaatttatacgcgtatctcaaatggggaaaaattagctttattttccattgctgatttctttttg

SEQ ID NO: 343167 - protein, 500 aa, Artificial Sequence
  derived and/or modified sequence
MGTWLLACICICTCVCLGVSVTGEGQGPRSRTFTCLTNNILRIDCHWSAPELGQGSSPWLLFTSNQAPGGTHKCILRGSECTVVLPPEAVLVPSDNFTITFHHCMSGREQVSLVDPEYLPRRHVKLDPPSDLQSNISSGHCILTWSISPALEPMTTLLSYELAFKKQEEAWEQAQHRDHIVGVTWLILEAFELDPGFIHEARLRVQMATLEDDVVEEERYTGQWSEWSQPVCFQAPQRQGPLIPPWGWPGNTLVAVSIFLLLTGPTYLLFKLSPRVKRIFYQNVPSPAMFFQPLYSVHNGNFQTWMGAHGAGVLLSQDCAGTPQGALEPCVQEATALLTCGPARPWKSVALEEEQEGPGTRLPGNLSSEDVLPAGCTEWRVQTLAYLPQEDWAPTSLTRPAPPDSEGSRSSSSSSSSNNNNYCALGCYGGWHLSALPGNTQSSGPIPALACGLSCDHQGLETQQGVAWVLAGHCQRPGLHEDLQGMLLPSVLSKARSWTF

SEQ ID NO: 343168 - protein, 329 aa, Artificial Sequence
  derived and/or modified sequence
MGTWLLACICICTCVCLGVSVTGEGQGPRSRTFTCLTNNILRIDCHWSAPELGQGSSPWLLFTSNQAPGGTHKCILRGSECTVVLPPEAVLVPSDNFTITFHHCMSGREQVSLVDPEYLPRRHVKLDPPSDLQSNISSGHCILTWSISPALEPMTTLLSYELAFKKQEEAWEQAQHRDHIVGVTWLILEAFELDPGFIHEARLRVQMATLEDDVVEEERYTGQWSEWSQPVCFQAPQRQGPLIPPWGWPGNTLVAVSIFLLLTGPTYLLFKLSPRVKRIFYQNVPSPAMFFQPLYSVHNGNFQVCAETTEGHGGQGLPRALACPRCWLS

SEQ ID NO: 343169 - DNA, 1503 bp, Artificial Sequence
  derived and/or modified sequence
atgggcacttggctgctggcctgtatctgtatatgtacatgcgtttgtctgggcgtgagtgtaaccggagagggccagggcccacggtcccgcacattcacatgtctcaccaataacatcttgagaatcgactgtcactggtccgctcccgagctggggcagggttcttctccatggctgctgttcacttcaaaccaagctcccggtgggacacataaatgcatcctgcgcggatctgagtgcacagtggtgctgcctccagaggccgttctcgtgccttctgataacttcaccatcacttttcatcactgtatgtccgggcgagaacaggtctctctcgtggatcccgaatatctaccccggaggcacgtgaagcttgaccccccctctgacttacagtcgaacattagcagcggacactgcatcctgacctggtctatctcccctgccctcgagccgatgacaacccttcttagttatgagctagcctttaaaaaacaggaggaagcatgggaacaagcacagcaccgagatcacattgtgggtgtaacctggctgattttagaggcttttgagcttgacccggggtttatccacgaggcccgattgagggtacagatggcaaccctggaagatgatgttgtagaggaggagaggtacactggtcaatggagcgaatggagccaaccagtctgttttcaagccccccaaaggcagggacccttaattcctccttgggggtggccaggcaatacgttggttgccgttagcatctttctgctcctgacaggccccacttacctgctctttaaactctcaccccgcgtgaaaaggatattctatcagaacgtgccatctcctgcgatgtttttccagccactctactcagtgcacaacggaaacttccaaacatggatgggcgcacacggagccggcgtgctgctaagtcaagattgcgcaggtactccacagggtgctctggagccatgtgtgcaggaggccactgctctgctcacctgtggaccagctagaccatggaagtcagtggctctcgaagaggaacaggaaggacccggcactcggctcccaggtaacctcagcagcgaggacgtgttacccgcaggctgtactgagtggagggtacagaccctcgcgtatctgcctcaagaggactgggcaccgacaagtttaacacgccccgcaccccccgactctgaggggagccggtcttcctcgtcttctagctctagcaataacaacaactattgcgccttggggtgctatggaggatggcaccttagtgcattgcctggcaatacacagtccagtggtcccatacccgccttagcttgcggattatcttgcgatcatcagggacttgaaacacagcagggtgtggcctgggtcttggccggccattgtcaacgccccggtctgcacgaggacttgcaaggcatgctactccctagcgtgctgtccaaggcaagatcttggacattctag

SEQ ID NO: 343170 - DNA, 1503 bp, Artificial Sequence
  derived and/or modified sequence
atgggcacctggctgctggcctgcatctgcatctgcacctgtgtgtgcctgggcgtgtctgtgactggagagggccagggccccaggagcaggaccttcacctgcctgaccaacaacatcctgagaattgactgccactggagcgcccctgagctgggccagggcagcagcccctggctgctcttcaccagcaaccaggcccctgggggcacccacaagtgcatcctgcggggcagcgagtgcaccgtggtgctgcccccagaggccgtgctggtgcccagcgacaacttcaccatcaccttccaccactgcatgagcggccgggagcaggtgtccctggtggaccctgagtacctgcccaggagacatgtgaagctggacccccccagcgacctgcagagcaacatcagcagcggccactgcatcctgacctggagcatcagccctgccctggagcccatgaccaccctgctgtcctatgagctggccttcaagaagcaggaggaggcctgggagcaggcccagcaccgggaccacatcgtgggcgtgacctggctgatcctggaggcctttgagctggaccccggcttcatccacgaggcccggctgcgggtgcagatggccaccctggaggatgatgtggtggaggaggagcgctacacaggccagtggagcgagtggagccagcctgtgtgcttccaggccccccagaggcagggccccctcatccccccctggggctggccaggcaacaccctggtggccgtgtccatcttcctgctgctgaccggccccacctacctgctcttcaagctgagcccccgggtgaagaggatcttctaccagaatgtgcccagccctgccatgttcttccagcccctgtacagcgtgcacaatggaaacttccagacctggatgggcgcccatggagctggggtgctgctgagccaggactgtgccggcaccccccagggcgccctggagccctgtgtgcaggaggccacagccctgctgacctgtggccctgcccggccctggaagtctgtggccctggaggaggagcaggagggccctggcacccggctgcccggcaacctgagcagtgaagatgtgctgcctgctggctgcacagagtggagggtgcagaccctggcctacctgccccaggaggactgggcccccaccagcctgaccaggcctgcccccccagattctgagggcagccgcagcagcagcagcagcagcagcagcaacaacaacaactactgtgccctgggctgctacggcggctggcacctgagcgccctgcccggcaacacccagagcagcggccccatcccagccctggcctgtggcctgagctgtgaccaccagggcctggagacccagcagggcgtggcctgggtgctggccggccactgccagaggcctggcctgcacgaggacctgcagggcatgctgctgcccagcgtgctgagcaaggcccgctcctggaccttctag

SEQ ID NO: 343171 - DNA, 1503 bp, Artificial Sequence
  derived and/or modified sequence
atgggcacctggctgctggcctgcatctgcatctgcacctgcgtgtgtctaggcgtaagcgtgaccggcgaaggccaggggccacgttccaggacattcacatgtctgactaacaatatactgagaatagactgccactggagtgctcctgagttgggacagggttcatcaccttggttactgtttaccagtaatcaggcccctggcggaactcacaaatgtattctcagggggagcgaatgtactgtcgtgttgccacccgaagcagttcttgtcccctctgacaattttaccattacattccaccactgtatgagcggccgagaacaggtgtcactggtggacccagaatatctgccccggcggcacgttaaactcgacccacctagcgacctccagagcaatatctcttctggccattgtattctgacctggagcataagccccgcactggaacccatgactaccctgctgtcatacgagttggcgttcaaaaaacaggaggaagcatgggagcaggctcagcaccgggaccacattgtgggcgtaacctggttaatcctcgaagctttcgagctggatcccggttttatccacgaggcccgcctgcgagtgcagatggccacccttgaggacgacgtggttgaggaagaacggtataccggacagtggagtgagtggtcccaacccgtgtgcttccaggccccccaaaggcaaggccccctcattcccccctgggggtggccaggcaataccttagtggcagtttccatctttcttctgctgacaggccccacatacctcctgttcaaactctcacccagggttaagcgcatcttctaccagaacgtgccttcaccggccatgtttttccagccgctctactcggttcacaatggcaacttccaaacttggatgggggctcacggcgcgggcgtgttgctcagccaggattgcgccgggacaccccagggagctctggaaccttgtgtacaggaagcaacagcgcttctgacctgtggaccagcgaggccctggaagtccgtggccctcgaagaggaacaggagggcccgggcactcggctaccgggcaacctcagctccgaagacgttctccctgcaggctgcaccgagtggagagtgcaaaccttggcctatcttccccaagaggactgggccccaacctcacttacgcgaccagctccgcccgacagcgagggcagccggtcaagctccagctcgtcatcttctaacaacaacaactactgtgcactaggatgctacggaggctggcacctctctgctctgcctggcaatactcagtccagcgggccgatacctgccctagcttgcggattgtcttgcgaccaccagggactggaaacgcaacagggagttgcctgggtcctggccggtcattgccagaggcccggattacatgaagacctgcaaggcatgctacttccgtccgtgttatcaaaagctcgctcctggaccttctag

SEQ ID NO: 343172 - DNA, 1503 bp, Artificial Sequence
  derived and/or modified sequence
atgggtacctggctcctggcttgtatatgcatctgcacatgtgtgtgtctgggggtgtccgtcaccggtgaaggacaaggcccaaggagccggactttcacatgccttaccaataatattcttagaatagattgtcactggagtgctcctgaactgggccaggggagctctccctggctgttgttcaccagcaaccaggcacccggtgggactcacaagtgtatcttgcggggttctgaatgtacagtggtactgcccccagaggccgtgctcgtgccctctgataactttacaatcacgttccatcactgtatgtccggcagagagcaggtgagtctcgtggatcctgagtatctccctaggcgacacgtgaaactggaccctcccagcgacttacagtccaacattagcagtgggcattgcattctgacgtggagcatcagcccagcattagaaccaatgacaacccttttgtcttacgagctggcttttaagaagcaagaggaggcatgggaacaagctcagcaccgtgatcatattgtgggggtaacatggcttatccttgaagcctttgagttggatcccggtttcatccatgaagcaagactcagggtgcagatggcaaccctggaggacgatgtggtggaagaagaaaggtataccgggcagtggtcggagtggagccagccggtgtgtttccaagctccgcagcggcagggccctctgattcctccctggggttggcccggaaacacattggtcgcagtatctatatttctgttgctgactggacctacgtatcttctgttcaaattgagcccaagggtgaagagaatcttctaccagaatgtacctagccctgctatgttttttcagcctctgtactccgtccacaacggcaatttccagacttggatgggcgctcacggggctggggtgctgctttcccaagattgtgccggtacacctcagggggctctggaaccctgtgttcaggaggctaccgcccttctgacctgcgggccagctcgtccttggaagagcgttgcgctggaagaagagcaggaaggtcccggaaccagactaccaggaaacctgtcctctgaggatgtgctgcctgccggttgtacagagtggagagtgcagacgctcgcctatctacctcaggaggactgggcaccaaccagtctaaccaggcccgcacccccagactccgaaggatccagaagtagcagcagcagttccagcagtaataacaacaattactgtgcactaggttgctatggcggatggcacctgtcagcgctgccgggtaatactcagtcctcaggacccatacccgctcttgcttgcgggctgtcctgcgatcatcaaggattagaaacccagcagggcgtggcatgggtcttagccggacattgtcagaggcccggtctccacgaggatttacagggcatgctcctgcctagcgtcctgtccaaggccagaagctggaccttttag

SEQ ID NO: 343173 - DNA, 1503 bp, Artificial Sequence
  derived and/or modified sequence
atgggcacctggctgctggcctgcatctgcatctgcacctgcgtgtgcctgggcgtgagcgtgaccggcgagggccagggccccagaagcagaaccttcacctgcctgaccaacaacatcctgagaatcgactgccactggagcgcccccgagctgggccagggcagcagcccctggctgctgttcaccagcaaccaggcccccggcggcacccacaagtgcatcctgagaggcagcgagtgcaccgtggtgctgccccccgaggccgtgctggtgcccagcgacaacttcaccatcaccttccaccactgcatgagcggcagagagcaggtgagcctggtggaccccgagtacctgcccagaagacacgtgaagctggacccccccagcgacctgcagagcaacatcagcagcggccactgcatcctgacctggagcatcagccccgccctggagcccatgaccaccctgctgagctacgagctggccttcaagaagcaggaggaggcctgggagcaggcccagcacagagaccacatcgtgggcgtgacctggctgatcctggaggccttcgagctggaccccggcttcatccacgaggccagactgagagtgcagatggccaccctggaggacgacgtggtggaggaggagagatacaccggccagtggagcgagtggagccagcccgtgtgcttccaggccccccagagacagggccccctgatccccccctggggctggcccggcaacaccctggtggccgtgagcatcttcctgctgctgaccggccccacctacctgctgttcaagctgagccccagagtgaagagaatcttctaccagaacgtgcccagccccgccatgttcttccagcccctgtacagcgtgcacaacggcaacttccagacctggatgggcgcccacggcgccggcgtgctgctgagccaggactgcgccggcaccccccagggcgccctggagccctgcgtgcaggaggccaccgccctgctgacctgcggccccgccagaccctggaagagcgtggccctggaggaggagcaggagggccccggcaccagactgcccggcaacctgagcagcgaggacgtgctgcccgccggctgcaccgagtggagagtgcagaccctggcctacctgccccaggaggactgggcccccaccagcctgaccagacccgccccccccgacagcgagggcagcagaagcagcagcagcagcagcagcagcaacaacaacaactactgcgccctgggctgctacggcggctggcacctgagcgccctgcccggcaacacccagagcagcggccccatccccgccctggcctgcggcctgagctgcgaccaccagggcctggagacccagcagggcgtggcctgggtgctggccggccactgccagagacccggcctgcacgaggacctgcagggcatgctgctgcccagcgtgctgagcaaggccagaagctggaccttctag

SEQ ID NO: 343174 - DNA, 550 bp, Artificial Sequence
  derived and/or modified sequence
acttcatttggagatgacagcacaatctgcccacatccacccttgatggctcccgcaccgacccttgccaaacttccctatgtgtctcttgggctggaatagagaagcttgggggaaaggggctgatcaggactggtgagagggccccccaggagagggcagaggtggttgtccccaccccttctgcagcagttgccccaggcacctgttcgacattggtgtctgagacagtgttgctactgctgagggaacatcaccctggctcacctccatctttcaaaatatggcaagctgcacaaatcgcggaggcctcccagagaaacacagctcctccaaggtgtcaagccacgcccaaatgatccaaaaagcagttgattttttagaccttttaatcggccacctgagcaaattctcaccagttttgatagttttccagtttagtcccttgggttttctagttagacagtcatctgcagataatgttcaatttttgtcctttgccccctccctcattctaccaagtggcacaggaaattggttggtttggtga

SEQ ID NO: 343175 - DNA, 990 bp, Artificial Sequence
  derived and/or modified sequence
atgggcacctggttacttgcctgcatatgtatatgcacttgtgtctgcctgggtgtgtcagtgaccggcgaagggcagggtcctcgaagcagaacctttacatgcctgacaaataacattctccgcatcgactgtcactggtcggcccccgagcttgggcagggttcttccccctggttactctttacttcgaatcaggcacctggcggcactcacaagtgtattctgcgaggcagtgagtgcaccgtcgttctacctccagaggccgtgctcgtgccctccgataattttactattaccttccaccactgtatgagcggaagggaacaggtgtccctcgtggaccctgaatatctccccaggagacatgtcaagctcgacccaccttccgacctgcagagtaatatcagtagtggccactgtattcttacctggtctattagcccagccctggaacctatgacaactttgctttcatacgaattagcttttaagaagcaggaggaagcatgggaacaggcccagcacagagatcacatagttggggtgacatggctgatcctcgaagctttcgagttggatcctggctttatccatgaggcaaggctccgcgtacagatggctactctggaggacgatgtggtggaagaagaaagatatactggccagtggtccgaatggtctcagccagtgtgctttcaggcccctcaacgtcagggacctctgatacccccttggggatggcctggcaacactttagtggctgtctcaatttttctcctcctgacaggcccaacatacctactattcaagctgtcaccacgtgtcaagcgcattttttaccagaatgtgccctcccccgccatgtttttccagccgttgtatagcgttcataatggcaacttccaagtgtgtgcggaaaccacagagggccacggagggcagggcctgccccgggcgctcgcttgtcctcgttgttggctgtcctag

SEQ ID NO: 343176 - DNA, 990 bp, Artificial Sequence
  derived and/or modified sequence
atgggcacctggctgctggcctgcatctgcatctgcacctgtgtgtgcctgggcgtgtctgtgactggagagggccagggccccaggagcaggaccttcacctgcctgaccaacaacatcctgagaattgactgccactggagcgcccctgagctgggccagggcagcagcccctggctgctcttcaccagcaaccaggcccctgggggcacccacaagtgcatcctgcggggcagcgagtgcaccgtggtgctgcccccagaggccgtgctggtgcccagcgacaacttcaccatcaccttccaccactgcatgagcggccgggagcaggtgtccctggtggaccctgagtacctgcccaggagacatgtgaagctggacccccccagcgacctgcagagcaacatcagcagcggccactgcatcctgacctggagcatcagccctgccctggagcccatgaccaccctgctgtcctatgagctggccttcaagaagcaggaggaggcctgggagcaggcccagcaccgggaccacatcgtgggcgtgacctggctgatcctggaggcctttgagctggaccccggcttcatccacgaggcccggctgcgggtgcagatggccaccctggaggatgatgtggtggaggaggagcgctacacaggccagtggagcgagtggagccagcctgtgtgcttccaggccccccagaggcagggccccctcatccccccctggggctggccaggcaacaccctggtggccgtgtccatcttcctgctgctgaccggccccacctacctgctcttcaagctgagcccccgggtgaagaggatcttctaccagaatgtgcccagccctgccatgttcttccagcccctgtacagcgtgcacaatggaaacttccaggtgtgtgccgagaccacagagggccacggcggccagggcctgccccgggccctggcctgcccccgctgctggctgtcctag

SEQ ID NO: 343177 - DNA, 990 bp, Artificial Sequence
  derived and/or modified sequence
atgggcacctggctgctggcctgcatctgcatctgcacctgcgtgtgtctgggcgtatcagtgactggggagggacaggggccacgctctcggacttttacatgcctaaccaacaatatcctacggattgactgccactggagtgcacccgaacttggacaaggaagttccccttggctgctgtttaccagtaaccaagcccccggaggcactcacaaatgcatcctgcggggcagcgagtgtacggtggttctcccaccggaggcggtgttggtgccaagcgataactttaccatcactttccaccattgcatgagcggccgagaacaggtgagtctagtagaccccgaatatttgcctcggcggcatgtcaagctagatcctcccagtgacctgcaaagcaatatttcatccggacactgcatcttgacctggagtatcagccctgcattagaaccaatgaccaccctgctctcctacgagttggcatttaaaaaacaggaggaggcgtgggagcaggcccagcatcgtgatcacattgtcggagtaacctggttgatcctcgaggcgttcgaactggatccagggtttatacacgaagcccggctgagagtgcagatggcaacgctggaggatgatgtcgtcgaggaggaacgctataccggacagtggtccgaatggagccagcctgtgtgtttccaagctccgcaaaggcaggggcctcttatccccccatggggttggccgggtaataccctggtcgccgttagcatcttcctgctgttgaccggtccaacctaccttcttttcaagcttagcccccgcgtgaaacggattttttatcagaatgtgccgtccccagctatgttcttccaacctctgtatagcgtccacaacggtaattttcaggtatgcgctgagacaacggagggtcacggcgggcagggcctacctagagccttggcttgtccccgttgctggctgtcgtag

SEQ ID NO: 343178 - DNA, 990 bp, Artificial Sequence
  derived and/or modified sequence
atgggcacctggctcctcgcatgtatatgcatttgtacatgcgtgtgcctgggggtatccgttaccggcgagggacagggccctcggagccgaacctttacctgcctgaccaacaacattctgagaattgactgccactggtccgccccagaactggggcaaggatcatcaccttggctcctgtttacaagcaatcaggcgccaggtggaacacacaaatgtatactaagaggaagcgagtgtacggtggtgctccccccagaggctgtgctggtcccatccgataattttacaatcacatttcaccattgcatgagtggcagagagcaggtgtctttagtggatccggagtacttgcctcgtagacacgtgaagctggaccccccaagtgatctacaatcaaacatctcttccggccattgtatactgacctggtctatcagtcccgctctggaacctatgacaactttgctgagttacgagcttgcatttaaaaagcaggaggaagcctgggaacaagcgcagcaccgcgatcacatcgtgggtgtgacctggctgatcctggaagcattcgaactcgatcctggattcatccatgaagctagattgagggtgcagatggccacactcgaggacgacgtggtcgaagaggagcgatatactggacaatggtctgagtggagtcaacctgtgtgctttcaggcgcctcagcgtcaaggtccacttattcctccttggggatggccagggaatactttagtggcagtgagcattttcctgctgctgactggacccacctacctgctgttcaagcttagtccccgtgtgaaaagaatattttaccagaatgttccatcccccgctatgttcttccaacctctgtacagcgttcacaacggaaatttccaggtgtgcgccgagactaccgaaggccacggcggtcaaggcctgcccagggcgctagcgtgcccacggtgttggctgtcatag

SEQ ID NO: 343179 - DNA, 990 bp, Artificial Sequence
  derived and/or modified sequence
atgggcacctggctgctggcctgcatctgcatctgcacctgcgtgtgcctgggcgtgagcgtgaccggcgagggccagggccccagaagcagaaccttcacctgcctgaccaacaacatcctgagaatcgactgccactggagcgcccccgagctgggccagggcagcagcccctggctgctgttcaccagcaaccaggcccccggcggcacccacaagtgcatcctgagaggcagcgagtgcaccgtggtgctgccccccgaggccgtgctggtgcccagcgacaacttcaccatcaccttccaccactgcatgagcggcagagagcaggtgagcctggtggaccccgagtacctgcccagaagacacgtgaagctggacccccccagcgacctgcagagcaacatcagcagcggccactgcatcctgacctggagcatcagccccgccctggagcccatgaccaccctgctgagctacgagctggccttcaagaagcaggaggaggcctgggagcaggcccagcacagagaccacatcgtgggcgtgacctggctgatcctggaggccttcgagctggaccccggcttcatccacgaggccagactgagagtgcagatggccaccctggaggacgacgtggtggaggaggagagatacaccggccagtggagcgagtggagccagcccgtgtgcttccaggccccccagagacagggccccctgatccccccctggggctggcccggcaacaccctggtggccgtgagcatcttcctgctgctgaccggccccacctacctgctgttcaagctgagccccagagtgaagagaatcttctaccagaacgtgcccagccccgccatgttcttccagcccctgtacagcgtgcacaacggcaacttccaggtgtgcgccgagaccaccgagggccacggcggccagggcctgcccagagccctggcctgccccagatgctggctgagctag

SEQ ID NO: 343180 - protein, 461 aa, Artificial Sequence
  derived and/or modified sequence
MSRQVVRSSKFRHVFGQPAKADQCYEDVRVSQTTWDSGFCAVNPKFVALICEASGGGAFLVLPLGKTGRVDKNAPTVCGHTAPVLDIAWCPHNDNVIASGSEDCTVMVWEIPDGGLMLPLREPVVTLEGHTKRVGIVAWHTTAQNVLLSAGCDNVIMVWDVGTGAAMLTLGPEVHPDTIYSVDWSRDGGLICTSCRDKRVRIIEPRKGTVVAEKDRPHEGTRPVRAVFVSEGKILTTGFSRMSERQVALWDTKHLEEPLSLQELDTSSGVLLPFFDPDTNIVYLCGKGDSSIRYFEITSEAPFLHYLSMFSSKESQRGMGYMPKRGLEVNKCEIARFYKLHERRCEPIAMTVPRKSDLFQEDLYPPTAGPDPALTAEEWLGGRDAGPLLISLKDGYVPPKSRELRVNRGLDTGRRRAAPEASGTPSSDAVSRLEEEMRKLQATVQELQKRLDRLEETVQAK

SEQ ID NO: 343181 - DNA, 1620 bp, Artificial Sequence
  derived and/or modified sequence
cattgtcttgacaagagcatcttcagcgggcgagtccccggctcctccagctccttcctcctcttcctcctcctcctccacctccggcttttgggggatcactgtcctctctcggcagcagaatgagccggcaggtggtccgctccagcaagttccgccacgtgtttggacagccggccaaggccgaccagtgctatgaagatgtgcgcgtctcacagaccacctgggacagtggcttctgtgctgtcaaccctaagtttgtggccctgatctgtgaggccagcgggggaggggccttcctggtgctgcccctgggcaagactggacgtgtggacaagaatgcgcccacggtctgtggccacacagcccctgtgctagacatcgcctggtgcccgcacaatgacaacgtcattgccagtggctccgaggactgcacagtcatggtgtgggagatcccagatgggggcctgatgctgcccctgcgggagcccgtcgtcaccctggagggccacaccaagcgtgtgggcattgtggcctggcacaccacagcccagaacgtgctgctcagtgcaggttgtgacaacgtgatcatggtgtgggacgtgggcactggggcggccatgctgacactgggcccagaggtgcacccagacacgatctacagtgtggactggagccgagatggaggcctcatttgtacctcctgccgtgacaagcgcgtgcgcatcatcgagccccgcaaaggcactgtcgtagctgagaaggaccgtccccacgaggggacccggcccgtgcgtgcagtgttcgtgtcggaggggaagatcctgaccacgggcttcagccgcatgagtgagcggcaggtggcgctgtgggacacaaagcacctggaggagccgctgtccctgcaggagctggacaccagcagcggtgtcctgctgcccttctttgaccctgacaccaacatcgtctacctctgtggcaagggtgacagctcaatccggtactttgagatcacttccgaggcccctttcctgcactatctctccatgttcagttccaaggagtcccagcggggcatgggctacatgcccaaacgtggcctggaggtgaacaagtgtgagatcgccaggttctacaagctgcacgagcggaggtgtgagcccattgccatgacagtgcctcgaaagtcggacctgttccaggaggacctgtacccacccaccgcagggcccgaccctgccctcacggctgaggagtggctggggggtcgggatgctgggcccctcctcatctccctcaaggatggctacgtacccccaaagagccgggagctgagggtcaaccggggcctggacaccgggcgcaggagggcagcaccagaggccagtggcactcccagctcggatgccgtgtctcggctggaggaggagatgcggaagctccaggccacggtgcaggagctccagaagcgcttggacaggctggaggagacagtccaggccaagtagagccccgcagggcctccagcagggtcagccattcacacccatccactcacctcccattcccagccacatggcagagaaaaaaatcataataaaatggctttattttctggta

SEQ ID NO: 343182 - DNA, 1386 bp, Artificial Sequence
  derived and/or modified sequence
atgtcacgccaggtcgtccgcagtagcaaattccggcacgtgttcggccaacccgcaaaggccgaccagtgctacgaagacgtgagagtgtcccagacaacctgggatagcgggttctgcgccgtcaaccctaaatttgtagccttgatttgtgaggcaagcggtggaggcgctttcctcgtactccccctcggcaagactgggagagtggacaagaacgcccctaccgtgtgtggccatacggctcctgtgctcgacattgcctggtgcccacataatgacaatgtaatcgcatccggatccgaggactgtaccgtgatggtatgggaaatcccagatggcggcctcatgctccccctgagggaaccagtcgtgacacttgaaggtcacaccaagcgcgttggtatcgtcgcatggcacaccaccgcccagaacgtgctgctgtctgcaggctgcgacaatgttatcatggtttgggacgtggggaccggcgccgctatgctgaccttgggtcccgaagtccatccagataccatttattccgtggattggtctagagacggaggcctgatctgtacaagctgtcgggataagagagtgcgcattatcgagccacggaaagggactgttgtagccgagaaggatcgccctcacgaagggacccgcccagtcagagcagtttttgtgtcagagggtaaaatcttgacaaccggattttctaggatgtcagagagacaggtggctctctgggacactaagcatctggaagagcccttgagtcttcaggaactcgacacaagcagtggagtgttactacctttctttgacccagacactaatattgtctacttatgcggaaagggggactcgtctattcggtattttgaaatcacaagcgaagccccatttttgcactacctgagcatgtttagttccaaagaatcccagcgtggcatgggctacatgcccaaacgggggcttgaggtgaacaagtgcgagatcgcccgattttataaactgcatgagaggcgctgcgagccaatcgccatgactgttcccaggaaatcagatctatttcaggaggacttatatccaccaactgccgggccagatccagcacttactgcagaggaatggcttggcggtcgggacgcgggcccactactcatctcccttaaggacggatacgtcccacctaagagtcgcgaactaagggtgaatcgaggattggacacagggagaagacgtgccgctcctgaggcatccggcacacccagctccgacgccgttagtcgattagaagaagaaatgcgcaaactgcaggccactgtgcaagaactgcaaaagcgtctcgacagactcgaggagaccgtgcaggccaaatag

SEQ ID NO: 343183 - DNA, 1386 bp, Artificial Sequence
  derived and/or modified sequence
atgagcagacaggtcgtcaggagctccaagttcaggcatgttttcggtcagcccgccaaggctgatcaatgctacgaagatgtgcgcgtgagccagacaacgtgggattcagggttctgcgcggtgaaccccaaatttgttgccttgatttgcgaggctagcggaggcggagcatttctcgtgctgcccttaggaaaaacaggccgtgtggataagaatgctccgacagtctgcggtcataccgctcccgtgcttgacatagcctggtgcccacacaatgataatgtgatcgccagtgggtctgaggattgcaccgttatggtgtgggagattcccgacggcggtctaatgttacccctgcgggaacccgtcgtgacgttagaagggcacacgaaaagagtggggattgttgcatggcacaccaccgctcagaacgtgctgctgtccgcaggttgtgataatgtgataatggtctgggatgtcggaaccggggccgcaatgttgaccctgggtcctgaggttcatcccgataccatttactccgtggattggagtagggatggcggccttatttgcacaagctgccgagacaaacgagtcaggatcatcgaacccaggaaggggaccgttgtggctgaaaaggacaggccacacgaaggcactagaccagtaagggcggtgttcgtatctgaaggtaagattctcaccaccggcttctctaggatgagcgagcgtcaagtggcattgtgggataccaagcatctggaggaacctctttcactacaggaactggatacttcaagtggcgtcctcctaccattttttgacccagatacaaacatcgtgtatctgtgcggaaaaggcgattcttccattcgatatttcgaaattacatccgaagcaccctttctgcattatctgtcaatgttcagtagtaaggagtcacagagggggatgggttacatgcctaagcggggcctcgaagtgaataagtgtgaaatcgcaaggttttataagttgcacgagcgccggtgcgaacccatagccatgactgtaccacggaagtcagacctatttcaggaagacctgtaccctcctacagctggcccagaccctgctctgaccgctgaagagtggctagggggtagggatgctggacctctgctgatttccctgaaggacggatacgtgcctcccaagtctcgcgaactgcgtgtgaaccgcggcctggacaccgggcggcgcagagcggctcctgaggcctctgggacccccagcagcgatgccgtttcaagactggaggaagagatgagaaaacttcaggccactgtccaggaattgcaaaagcgacttgataggctggaggagaccgtgcaagcaaaatag

SEQ ID NO: 343184 - DNA, 1386 bp, Artificial Sequence
  derived and/or modified sequence
atgagccggcaggtggtgcgcagcagcaagttcagacatgtgtttggccagcctgccaaggctgaccagtgctatgaagatgtgcgggtgtcccagaccacctgggacagcggcttctgtgctgtgaaccccaagtttgtggccctgatctgtgaggccagcggcggcggggccttcctggtgctgcccctgggcaagacaggccgggtggacaagaatgcccccaccgtgtgtggccacacagcccctgtgctggacatcgcctggtgcccccacaatgacaacgtgattgccagcggcagcgaggactgcaccgtgatggtgtgggagatcccagatggcggcctgatgctgcccctgcgggagcctgtggtgaccctggagggccacaccaagagggtgggcatcgtggcctggcacaccacagcccagaatgtgctgctgtctgctggctgtgacaacgtcatcatggtgtgggatgtgggcactggagctgccatgctgaccctgggccctgaggtgcacccagacaccatctacagcgtggactggagcagagatggcggcctcatctgcaccagctgccgggacaagagggtgcgcatcatcgagcccaggaaaggaacagtggtggccgagaaggaccggccccatgagggcaccaggcctgtgcgggctgtgtttgtgtctgagggcaagatcctgaccaccggcttcagcaggatgtctgagcggcaggtggccctgtgggacaccaagcacctggaggagcccctgagcctgcaggagctggacaccagcagcggcgtgctgctgcccttctttgatcctgacaccaacatcgtgtacctgtgtgggaaaggagacagcagcatccgctactttgagatcaccagcgaggcccccttcctgcactacctgtccatgttcagcagcaaggagagccagaggggcatgggctacatgcccaagaggggcctggaggtgaacaagtgtgagatcgcccgcttctacaagctgcatgaaagaagatgtgagcccatcgccatgacagtgcccaggaagagtgacctcttccaggaggacctgtacccacccacagctggccctgaccctgccctgacagctgaggagtggctgggcggcagagatgctggccccctgctgatcagcctgaaggatggctacgtgccccccaagagccgggagctgcgggtgaacagaggcctggacaccggcagaagaagagctgcccctgaggccagcggcacccccagcagtgatgctgtgtcccggctggaggaggagatgaggaagctgcaggccaccgtgcaggagctgcagaagaggctggaccggctggaggagaccgtgcaggccaagtag

SEQ ID NO: 343185 - DNA, 1386 bp, Artificial Sequence
  derived and/or modified sequence
atgagccggcaggtggtgcggagcagcaagttccggcacgtgttcggccagcctgcaaaggccgatcagtgctatgaagacgtccgcgtaagccaaacaacctgggacagcggtttctgcgccgtgaaccctaagtttgtggccctgatctgtgaagcctctggcggaggcgcatttctcgtgctaccgttaggcaaaacagggagagtcgacaagaacgcaccgactgtgtgtgggcacactgcccccgttctcgacattgcatggtgcccccataatgacaatgtcatagctagcggctcggaagactgtacagtaatggtatgggaaatacctgatggtggccttatgctccctctccgggagccggttgttactctggaagggcacacaaagcgggtcgggatcgtcgcctggcacacgaccgctcagaatgttctgctgagtgccggatgcgataatgtaattatggtctgggatgtggggacaggggcagcgatgctgacacttggccccgaagtgcacccggacaccatatattctgtggattggtctagggacggcggactgatttgtacttcctgtagagataaaagggtgagaatcatcgagcctagaaaaggcacagtggttgctgaaaaggacagaccacatgaagggacgagacctgtcagggccgtcttcgtatccgaaggcaaaatcctcactacaggtttcagccgaatgtctgagcggcaggtggcactttgggacactaagcatctggaggagcctctctctctccaggagttggatacatcctccggggtgctcctccctttctttgatcccgatactaacatcgtgtacctctgcggaaagggtgactcttcgatcagatatttcgaaatcacttctgaagcacctttcctgcactacctaagcatgttttcctctaaggagagccaacgcggaatggggtatatgcccaaacgcggcctggaggtaaataagtgtgaaatcgctcggttctacaagctgcatgaaagacggtgcgagcccattgccatgaccgtgcctcgcaaatccgatctgttccaagaggacctgtatcccccaactgcaggccccgatcccgctctgaccgccgaggagtggctgggtggccgtgatgcaggtccactgcttatcagtctaaaggacggctatgtcccccccaaatctagagagctgagagttaaccgtggactcgacactgggcggagaagagctgccccagaagctagtggcaccccctcttcggacgccgtcagtaggctcgaggaggaaatgaggaaactgcaagctacggtacaggagctacagaaacggcttgatcggctggaggagaccgtgcaggcgaagtag

SEQ ID NO: 343186 - DNA, 1386 bp, Artificial Sequence
  derived and/or modified sequence
atgagccggcaggtggtgcggagcagcaagttccggcacgtgttcggccagccggctaaggccgaccaatgttacgaggacgtgagggtgagtcagacaacatgggatagtgggttctgtgctgtcaatccaaaattcgttgctctgatctgtgaagctagcggcggtggtgcattccttgtgcttcccctggggaaaacaggacgtgtggataagaatgcacccaccgtgtgcggacatactgctccagtgttagacatcgcctggtgtccacacaacgacaacgtgatcgcttccggaagcgaagattgtacggtaatggtctgggaaattcctgatgggggccttatgctgcctctgcgggaacctgttgtgactctggagggccacactaagcgggtgggcatcgtggcctggcataccaccgcacaaaatgtactgctgagcgctggctgtgataacgtcattatggtgtgggatgtgggcacaggcgctgccatgttgacactggggcccgaagtacacccagataccatctactctgtagactggtcgcgggatggcggcctgatttgcactagctgtcgcgacaagcgcgtgagaatcatagagcctcgaaaagggaccgtggtagctgagaaggacaggccgcatgaggggacaagacccgtgcgagccgtcttcgtatccgaagggaagatcctgacgactgggttctccaggatgtctgagcggcaggtggctctctgggatactaaacatctggaggagcctctgtccttgcaagagttggatactagcagtggtgtgctgctgccctttttcgaccccgacacaaacatcgtgtacttgtgtgggaaaggagattccagcatcaggtatttcgagatcacctccgaagcacctttccttcactacttaagtatgttcagctcaaaggaaagccagcggggaatgggctacatgccaaagaggggcttagaggtcaacaagtgtgagatagcccgattctacaagcttcacgagagacgatgtgagccaattgctatgaccgtgccccggaagtcggatctttttcaggaggatctttaccctccgaccgctgggccggacccagcgctcactgccgaagagtggttgggtggtagggatgccggcccacttctcataagcttgaaagatggctacgtgccacccaagtcacgggagttgagggtcaaccgcggcttagatactggtagaagaagagccgcccccgaagcctctggtaccccatcatctgatgcagtaagtcggctcgaagaggaaatgaggaaattgcaggccaccgttcaggaactccagaagagactggacagacttgaagaaacggtgcaggctaaatag

SEQ ID NO: 343187 - DNA, 1386 bp, Artificial Sequence
  derived and/or modified sequence
atgtcccgccaagtggtcagatccagtaaattccgacatgtatttgggcagccagctaaggccgatcagtgctacgaagacgtgagagtctctcagacaacatgggatagtggcttttgtgccgtcaacccgaagtttgtggcccttatctgtgaggcctctggaggaggcgctttcttggttttgccactgggcaaaacagggagggtggacaaaaacgccccaacggtgtgtggtcacaccgcccctgtacttgacatcgcctggtgcccccataacgacaacgtgatcgcatcaggtagcgaggattgtacagttatggtgtgggaaattcctgatggaggattgatgctgcccctgcgggagcccgtcgttaccttggaggggcatacaaaaagggtcgggatagtagcatggcacacaaccgcacaaaacgtactgctctcagccggatgcgataatgttatcatggtctgggatgtcggcacaggagccgcaatgcttacattaggtcctgaggtccatccggacacaatttatagtgtcgattggagtcgggatggaggcctcatatgtacgagttgccgtgataagcgggtcaggattatcgaaccaagaaaggggacagtggtcgcagagaaagaccgcccacacgaaggtacgagacctgtgagggctgttttcgtgtccgaggggaagattttgacaactggattctctaggatgtcagagcggcaggtggccttatgggacacgaaacacttagaggagccactcagtttgcaggagttggataccagctccggagtcctgctgcctttttttgatcctgacaccaacatagtgtatttgtgcgggaagggggatagttccatccggtactttgagatcacttctgaggcaccatttctgcattacctgtctatgttttccagcaaggagagtcaaaggggcatgggctacatgcccaaacggggactggaagtgaataagtgcgagattgctagattttataagctgcatgaacgacgctgtgaaccaatagccatgactgtcccaaggaaatctgacctgtttcaggaggacttgtaccccccaacggctggaccagatcccgctctcaccgccgaggagtggctaggagggcgtgatgccggacccctgttaataagccttaaagacggctacgtgccacccaaatcaagagaactcagagtgaaccggggattagatacggggagaaggagggctgccccagaagcctctggcacacctagttctgacgctgtgtccaggcttgaggaggagatgcgcaaactgcaggccaccgtacaggaactccagaaacgcctcgatcgcctggaagaaacggtgcaagcgaaatag

SEQ ID NO: 343188 - DNA, 1386 bp, Artificial Sequence
  derived and/or modified sequence
atgtctcggcaagtggtcagatcttctaaatttcgccatgtctttgggcagcccgcaaaggcagaccagtgttacgaggacgtcagagtgagtcagaccacctgggatagtggcttttgtgctgtgaacccaaaattcgtcgccctgatatgtgaagctagcggtggcggtgcgtttttggtactgccgctgggaaagactgggagggtcgataagaacgcccctacagtctgtgggcatacagcgcctgtgcttgacatcgcatggtgcccccataatgacaacgtaatcgcttcgggctccgaagactgtactgtgatggtctgggagattccagacggcggattgatgctgcctcttcgcgagcccgttgtgaccctcgaaggccacaccaagagagtagggattgttgcctggcacaccacagcccaaaatgtcctcctgtctgccggatgtgacaatgtcattatggtatgggatgtcggaactggcgctgctatgctgacacttggaccggaagtgcaccccgataccatctattctgtggattggtcacgtgacggtggactaatctgtacgagctgcagggacaaacgcgttcgcatcattgagcctagaaagggaacggtggtggctgaaaaagaccgccctcacgaagggacaaggcctgtccgcgctgttttcgtgtcagagggcaagattcttactacaggcttctcaagaatgtccgagcgtcaggtcgctttatgggacaccaagcatctggaagaaccacttagcctgcaagagttggacacaagctccggagtactgttgcccttttttgatcctgataccaatatcgtgtacctgtgcggaaagggagattctagcattcgctatttcgaaattactagtgaggcaccgtttctacactacctgtcaatgttttccagtaaagagtctcaaagaggaatgggctacatgcccaagagggggctcgaggtgaacaaatgcgagatcgctcgattctacaagcttcatgaacgcagatgcgagcctattgctatgaccgttcctcgaaagagcgacctgtttcaggaggacctctacccccctactgccggtccggacccagccttaactgccgaagaatggctaggcggacgggacgcaggacctctgctgatctctctaaaagacgggtacgtgcctccaaagtcacgagaattgagggttaatcgaggacttgataccggacgcaggagagccgctccggaggctagtggtaccccctcttccgatgcggtgtctcgcctggaggaggaaatgaggaagttgcaggccactgtgcaggaactccagaaaaggctggaccgtctggaggagactgtgcaggctaaatag

SEQ ID NO: 343189 - DNA, 1622 bp, Artificial Sequence
  derived and/or modified sequence
gtcttgacaagagcatcttcagcgggcgagtccccggctcctccagctccttcctcctcttcctcctcctcctccacctccggcttttgggggatcactgtcctctctcggcagcagatacaggctgctcctcaagactggggctcttcacatacgctcctcaccgctctttgggcaggccgacctagcagcctcttcgggagtcctggggtggccgggggtgctggagcccccaaatgagccggcaggtggtccgctccagcaagttccgccacgtgtttggacagccggccaaggccgaccagtgctatgaagatgtgcgcgtctcacagaccacctgggacagtggcttctgtgctgtcaaccctaagtttgtggccctgatctgtgaggccagcgggggaggggccttcctggtgctgcccctgggcaagactggacgtgtggacaagaatgcgcccacggtctgtggccacacagcccctgtgctagacatcgcctggtgcccgcacaatgacaacgtcattgccagtggctccgaggactgcacagtcatggtgtgggagatcccagatgggggcctgatgctgcccctgcgggagcccgtcgtcaccctggagggccacaccaagcgtgtgggcattgtggcctggcacaccacagcccagaacgtgctgctcagtgcaggttgtgacaacgtgatcatggtgtgggacgtgggcactggggcggccatgctgacactgggcccagaggtgcacccagacacgatctacagtgtggactggagccgagatggaggcctcatttgtacctcctgccgtgacaagcgcgtgcgcatcatcgagccccgcaaaggcactgtcgtagctgagaaggaccgtccccacgaggggacccggcccgtgcgtgcagtgttcgtgtcggaggggaagatcctgaccacgggcttcagccgcatgagtgagcggcaggtggcgctgtgggacacaaagcacctggaggagccgctgtccctgcaggagctggacaccagcagcggtgtcctgctgcccttctttgaccctgacaccaacatcgtctacctctgtggcaagggtgacagctcaatccggtactttgagatcacttccgaggcccctttcctgcactatctctccatgttcagttccaaggagtcccagcggggcatgggctacatgcccaaacgtggcctggaggtgaacaagtgtgagatcgccaggttctacaagctgcacgagcggaggtgtgagcccattgccatgacagtgcctcgaaagtcggacctgttccaggaggacctgtacccacccaccgcagggcccgaccctgccctcacggctgaggagtggctggggggtcgggatgctgggcccctcctcatctccctcaaggatggctacgtacccccaaagagccgggagctgagggtcaaccggggcctggacaccgggcgcaggagggcagcaccagaggccagtggcactcccagctcggatgccgtgtctcggctggaggaggagatgcggaagctccaggccacggtgcaggagctccagaagcgcttggacaggctggaggagacagtccaggccaagtag

SEQ ID NO: 343190 - DNA, 1654 bp, Artificial Sequence
  derived and/or modified sequence
caccccggaggcgggcgcacggctgcttctcattcattgtcttgacaagagcatcttcagcgggcgagtccccggctcctccagctccttcctcctcttcctcctcctcctccacctccggcttttgggggatcactgtcctctctcggcagcagaatgagccggcaggtggtccgctccagcaagttccgccacgtgtttggacagccggccaaggccgaccagtgctatgaagatgtgcgcgtctcacagaccacctgggacagtggcttctgtgctgtcaaccctaagtttgtggccctgatctgtgaggccagcgggggaggggccttcctggtgctgcccctgggcaagactggacgtgtggacaagaatgcgcccacggtctgtggccacacagcccctgtgctagacatcgcctggtgcccgcacaatgacaacgtcattgccagtggctccgaggactgcacagtcatggtgtgggagatcccagatgggggcctgatgctgcccctgcgggagcccgtcgtcaccctggagggccacaccaagcgtgtgggcattgtggcctggcacaccacagcccagaacgtgctgctcagtgcaggttgtgacaacgtgatcatggtgtgggacgtgggcactggggcggccatgctgacactgggcccagaggtgcacccagacacgatctacagtgtggactggagccgagatggaggcctcatttgtacctcctgccgtgacaagcgcgtgcgcatcatcgagccccgcaaaggcactgtcgtagctgagaaggaccgtccccacgaggggacccggcccgtgcgtgcagtgttcgtgtcggaggggaagatcctgaccacgggcttcagccgcatgagtgagcggcaggtggcgctgtgggacacaaagcacctggaggagccgctgtccctgcaggagctggacaccagcagcggtgtcctgctgcccttctttgaccctgacaccaacatcgtctacctctgtggcaagggtgacagctcaatccggtactttgagatcacttccgaggcccctttcctgcactatctctccatgttcagttccaaggagtcccagcggggcatgggctacatgcccaaacgtggcctggaggtgaacaagtgtgagatcgccaggttctacaagctgcacgagcggaggtgtgagcccattgccatgacagtgcctcgaaagtcggacctgttccaggaggacctgtacccacccaccgcagggcccgaccctgccctcacggctgaggagtggctggggggtcgggatgctgggcccctcctcatctccctcaaggatggctacgtacccccaaagagccgggagctgagggtcaaccggggcctggacaccgggcgcaggagggcagcaccagaggccagtggcactcccagctcggatgccgtgtctcggctggaggaggagatgcggaagctccaggccacggtgcaggagctccagaagcgcttggacaggctggaggagacagtccaggccaagtagagccccgcagggcctccagcagggtcagccattcacacccatccactcacctcccattcccagccacatggcagagaaaaaaatcataataaaatggctttattttctggta

SEQ ID NO: 343191 - DNA, 1386 bp, Artificial Sequence
  derived and/or modified sequence
atgagcagacaggtggtgagaagcagcaagttcagacacgtgttcggccagcccgccaaggccgaccagtgctacgaggacgtgagagtgagccagaccacctgggacagcggcttctgcgccgtgaaccccaagttcgtggccctgatctgcgaggccagcggcggcggcgccttcctggtgctgcccctgggcaagaccggcagagtggacaagaacgcccccaccgtgtgcggccacaccgcccccgtgctggacatcgcctggtgcccccacaacgacaacgtgatcgccagcggcagcgaggactgcaccgtgatggtgtgggagatccccgacggcggcctgatgctgcccctgagagagcccgtggtgaccctggagggccacaccaagagagtgggcatcgtggcctggcacaccaccgcccagaacgtgctgctgagcgccggctgcgacaacgtgatcatggtgtgggacgtgggcaccggcgccgccatgctgaccctgggccccgaggtgcaccccgacaccatctacagcgtggactggagcagagacggcggcctgatctgcaccagctgcagagacaagagagtgagaatcatcgagcccagaaagggcaccgtggtggccgagaaggacagaccccacgagggcaccagacccgtgagagccgtgttcgtgagcgagggcaagatcctgaccaccggcttcagcagaatgagcgagagacaggtggccctgtgggacaccaagcacctggaggagcccctgagcctgcaggagctggacaccagcagcggcgtgctgctgcccttcttcgaccccgacaccaacatcgtgtacctgtgcggcaagggcgacagcagcatcagatacttcgagatcaccagcgaggcccccttcctgcactacctgagcatgttcagcagcaaggagagccagagaggcatgggctacatgcccaagagaggcctggaggtgaacaagtgcgagatcgccagattctacaagctgcacgagagaagatgcgagcccatcgccatgaccgtgcccagaaagagcgacctgttccaggaggacctgtacccccccaccgccggccccgaccccgccctgaccgccgaggagtggctgggcggcagagacgccggccccctgctgatcagcctgaaggacggctacgtgccccccaagagcagagagctgagagtgaacagaggcctggacaccggcagaagaagagccgcccccgaggccagcggcacccccagcagcgacgccgtgagcagactggaggaggagatgagaaagctgcaggccaccgtgcaggagctgcagaagagactggacagactggaggagaccgtgcaggccaagtag

SEQ ID NO: 343192 - DNA, 571 bp, Artificial Sequence
  derived and/or modified sequence
actgtggaatagtggtttctaaagctggctggacagcaaaaccacctggggagcttttaagaaactgaaattccatgtctcataccccagccctcacgtgaggtccaggaatctgtgtgattaaaaaatacaagccccaaaacaacttggaaagtggtcgttttgcaggtggggatttaggaaccaagaatccagaactctcctaccagggccccagaaacctttccaacatggctagatccatcagaaactgaagccgtggagaacgctctcggggcctttgccacttcttggagtagaagccgacagagagctgtttggaaacttctccttcacacaccagttgaagactaggctttggaggttttcaaagcagacggtgcttggatgggcagggagaagtaacattctgcaaatcgccgtcagaggtcctgaggacacagacctacctggcttgcattccccttgctgaatggcgtgtgctgcagctgcccactgagggctcttttccctgggattctggacttcagagtaggacagcaggctgggaagatgctgagttccatcaagt

SEQ ID NO: 343193 - DNA, 342 bp, Artificial Sequence
  derived and/or modified sequence
atgggcagccccttctactgcaacggcggctactggctgcagagaaccgagtgctggagaaccatgaacgagttccacttcagaagcgcccagctggccgtgcccggcagacagccccaggagctgttcagaagacacagagccaccagcgcctggagcagcagaagaagaagcgccctggtggtgggcaccatcggccccggccacggcagactgcaggaccccagctgcaccaagctgcccagcccccccgcctggttccccttcttcatgaacagaagcatgggccacagccaggtgggcatgcacgtgttccacagaatgggcaccaccagcagctag

SEQ ID NO: 343194 - protein, 611 aa, Artificial Sequence
  derived and/or modified sequence
MVWWPVGASLFASNVGSGHFIGLAGSGAATGISVSAYELNGLFSVLMLAWIFLPIYIAGQVTTMPEYLRKRFGGIRIPIILAVLYLFIYIFTKISVDMYAGAIFIQQSLHLDLYLAIVGLLAITAVYTVAGGLAAVIYTDALQTLIMLIGALTLMGYSFAAVGGMEGLKEKYFLALASNRSENSSCGLPREDAFHIFRDPLTSDLPWPGVLFGMSIPSLWYWCTDQVIVQRTLAAKNLSHAKGGALMAAYLKVLPLFIMVFPGMVSRILFPDQVACADPEICQKICSNPSGCSDIAYPKLVLELLPTGLRGLMMAVMVAALMSSLTSIFNSASTIFTMDLWNHLRPRASEKELMIVGRVFVLLLVLVSILWIPVVQASQGGQLFIYIQSISSYLQPPVAVVFIMGCFWKRTNEKGAFWGLISGLLLGLVRLVLDFIYVQPRCDQPDERPVLVKSIHYLYFSMILSTVTLITVSTVSWFTEPPSKEMVSHLTWFTRHDPVVQKEQAPPAAPLSLTLSQNGMPEASSSSSVQFEMVQENTSKTHSCDMTPKQSKVVKAILWLCGIQEKGKEELPARAEAIIVSLEENPLVKTLLDVNLIFCVSCAIFIWGYFA

SEQ ID NO: 343195 - protein, 519 aa, Artificial Sequence
  derived and/or modified sequence
MVWWPVGASLFASNVGSGHFIGLAGSGAATGISVSAYELNGLFSVLMLAWIFLPIYIAGQVTTMPEYLRKRFGGIRIPIILAVLYLFIYIFTKISVDMYAGAIFIQQSLHLDLYLAIVGLLAITAVYTVAGGLAAVIYTDALQTLIMLIGALTLMGYSDCPADSGCQEPVPCQRRCSDGCIPEGAAPLHNGVPWDGQPHPLPRSSGLCRSRDLPEDLQQPLRLFGHRVSQTRAGTPAHSASTIFTMDLWNHLRPRASEKELMIVGRVFVLLLVLVSILWIPVVQASQGGQLFIYIQSISSYLQPPVAVVFIMGCFWKRTNEKGAFWGLISGLLLGLVRLVLDFIYVQPRCDQPDERPVLVKSIHYLYFSMILSTVTLITVSTVSWFTEPPSKEMVSHLTWFTRHDPVVQKEQAPPAAPLSLTLSQNGMPEASSSSSVQFEMVQENTSKTHSCDMTPKQSKVVKAILWLCGIQEKGKEELPARAEAIIVSLEENPLVKTLLDVNLIFCVSCAIFIWGYFA

SEQ ID NO: 343196 - DNA, 1933 bp, Artificial Sequence
  derived and/or modified sequence
gcgggacagtggaagactggctgaggctggagtttggagtttgacccgcttggaggctctctcagcagcgggcatataggaggaagggtcactgctgtctccggaagctcttggctgcaaagagagaggatcccgggtatctccctccttacaaccaccgccacctcctagtgccttagaagccactgacagcccccagggcaggtgagccctgcatctggaataagtccacagtgaagaccaaaagagacacagtgaaaggctacttcctggctggaggggacatggtgtggtggccagtgggtgcatccttgtttgccagcaatgttggaagtggacatttcattggcctggcagggtcaggtgctgctacgggcatttctgtatcagcttatgaacttaatggcttgttttctgtgctgatgttggcctggatcttcctacccatctacattgctggtcaggtcaccacgatgccagaatacctacggaagcgcttcggtggcatcagaatccccatcatcctggctgtactctacctatttatctacatcttcaccaagatctcggtagacatgtatgcaggtgccatcttcatccagcagtctttgcacctggatctgtacctggccatagttgggctactggccatcactgctgtatacacggttgctggtggcctggctgctgtgatctacacggatgccctgcagacgctgatcatgcttataggagcgctcaccttgatgggctacagtgattgtccagcggactctggctgccaagaacctgtcccatgccaaaggaggtgctctgatggctgcatacctgaaggtgctgcccctcttcataatggtgttccctgggatggtcagccgcatcctcttcccagatcaagtggcctgtgcagatccagagatctgccagaagatctgcagcaacccctcaggctgttcggacatcgcgtatcccaaactcgtgctggaactcctgcccacagtgccagcaccatcttcaccatggacctctggaatcacctccggcctcgggcatctgagaaggagctcatgattgtgggcagggtgtttgtgctgctgctggtcctggtctccatcctctggatccctgtggtccaggccagccagggcggccagctcttcatctatatccagtccatcagctcctacctgcagccgcctgtggcggtggtcttcatcatgggatgtttctggaagaggaccaatgaaaagggtgccttctggggcctgatctcgggcctgctcctgggcttggttaggctggtcctggactttatttacgtgcagcctcgatgcgaccagccagatgagcgcccggtcctggtgaagagcattcactacctctacttctccatgatcctgtccacggtcaccctcatcactgtctccaccgtgagctggttcacagagccaccctccaaggagatggtcagccacctgacctggtttactcgtcacgaccccgtggtccagaaggaacaagcaccaccagcagctcccttgtctcttaccctctctcagaacgggatgccagaggccagcagcagcagcagcgtccagttcgagatggttcaagaaaacacgtctaaaacccacagctgtgacatgaccccaaagcagtccaaagtggtgaaggccatcctgtggctctgtggaatacaggagaagggcaaggaagagctcccggccagagcagaagccatcatagtttccctggaagaaaaccccttggtgaagaccctcctggacgtcaacctcattttctgcgtgagctgcgccatctttatctggggctattttgcttagtgtggggtgaacccaggggtccaaactctgtttctcttcagtgctccatttttttaatgaaagaaaaaataataaagcttttgtttacc

SEQ ID NO: 343197 - protein, 154 aa, Artificial Sequence
  derived and/or modified sequence
MQWLMRFRTLWGIHKSFHNIHPAPSQLRCRSLSEFGAPRWNDYEVPEEFNFASYVLDYWAQKEKEGKRGPNPAFWWVNGQGDEVKWSFREMGDLTRRVANVFTQTCGLQQGDHLALMLPRVPEWWLVAVGCMRTGIIFIPATILLKAKDILYRL

SEQ ID NO: 343198 - DNA, 465 bp, Artificial Sequence
  derived and/or modified sequence
atgcagtggctcatgcgcttccgtaccctatggggcatccataaatcttttcacaatatccaccctgcaccctcacagctccgatgccgctctctgtcagaatttggggccccccgatggaacgattacgaggtgcctgaagaattcaacttcgcatcctatgtgctggattactgggctcagaaagaaaaggaggggaaaagaggaccaaaccctgcgttctggtgggtaaacggtcagggtgacgaagtcaagtggtcctttagggagatgggggatttaacccgtcgagtggcaaatgtgtttacccagacgtgcggtctgcaacaaggtgaccacctggcactgatgctgcctcgcgtccccgagtggtggctagtggccgtgggttgtatgcgcactggtattatatttatccctgccaccatccttctgaaggccaaggatatcctgtacagactgtag

SEQ ID NO: 343199 - DNA, 465 bp, Artificial Sequence
  derived and/or modified sequence
atgcagtggctgatgaggttccgcaccctgtggggcatccacaagagcttccacaacatccacccagcccccagccagctgcgctgccgcagcctgtctgaatttggagccccccgctggaatgactatgaggtgcctgaggagttcaactttgccagctatgtgctggactactgggcccagaaggagaaggagggcaagaggggccccaacccagccttctggtgggtgaatggccagggagatgaggtgaagtggagcttccgggagatgggagacctgacccggcgggtggccaacgtgttcacccagacctgtggcctgcagcagggcgaccacctggccctgatgctgccccgggtgcctgagtggtggctggtggccgtgggctgcatgaggacaggcatcatcttcatcccagccaccatcctgctgaaggccaaggacatcctgtaccgcctgtag

SEQ ID NO: 343200 - DNA, 465 bp, Artificial Sequence
  derived and/or modified sequence
atgcagtggctgatgcggttccggaccctgtggggcatccacaagtcattccacaatattcacccagccccctcccagctgaggtgtcgaagcctgtctgagtttggcgcccccagatggaacgactatgaagtgccagaggaattcaatttcgccagctacgtactggattattgggctcagaaggagaaggaggggaaacgggggccaaatcccgctttctggtgggttaatggccagggcgatgaggtgaaatggagtttcagagagatgggcgatttaacgaggcgggtggccaacgtattcactcagacttgtggtttgcagcagggtgaccatctcgctttgatgctgccaagggtcccagagtggtggcttgtggccgtgggttgcatgaggactgggataattttcatcccagcaacaatactattgaaagctaaagacatcctgtatagattgtag

SEQ ID NO: 343201 - DNA, 465 bp, Artificial Sequence
  derived and/or modified sequence
atgcagtggcttatgagattcaggaccctttggggcattcataagagctttcataacatacatcctgccccaagccagcttcggtgtcgctccctgagcgagtttggcgcacctcggtggaacgattacgaggtccctgaggagttcaactttgctagctatgtattggactattgggcccaaaaagaaaaggaagggaagcggggtcccaatccagccttttggtgggttaacggtcaaggagacgaggtgaagtggagctttagagagatgggcgacctcacccggcgtgtggcaaacgtcttcacacaaacatgcggccttcaacagggtgaccacctcgcactgatgttgccccgtgtgccggagtggtggctcgtggccgtcggttgcatgcgcactggcattatctttatccctgctacgatcttgctcaaagcaaaagatattctgtacagattgtag

SEQ ID NO: 343202 - DNA, 465 bp, Artificial Sequence
  derived and/or modified sequence
atgcagtggctgatgagattcagaaccctgtggggcatccacaagagcttccacaacatccaccccgcccccagccagctgagatgcagaagcctgagcgagttcggcgcccccagatggaacgactacgaggtgcccgaggagttcaacttcgccagctacgtgctggactactgggcccagaaggagaaggagggcaagagaggccccaaccccgccttctggtgggtgaacggccagggcgacgaggtgaagtggagcttcagagagatgggcgacctgaccagaagagtggccaacgtgttcacccagacctgcggcctgcagcagggcgaccacctggccctgatgctgcccagagtgcccgagtggtggctggtggccgtgggctgcatgagaaccggcatcatcttcatccccgccaccatcctgctgaaggccaaggacatcctgtacagactgtag

SEQ ID NO: 343203 - DNA, 701 bp, Artificial Sequence
  derived and/or modified sequence
taacaaacaaatgaagaagcaaagaaaacaccctgggaggtcccccttcgctgtggccagaagccaagttctgctgggtgcacaatcctgcggatcacctgatcagagagaactgaacctacaaaagagagctcaacctccttttccatacctaccagggacctagttcagctacgtcctaaacagtaccaggtggtgacttgagaactctgtgcctggtttctgaggactgtttcaccatgcagtggctaatgaggttccggaccctctggggcatccacaaatccttccacaacatccaccctgccccttcacagctgcgctgccggtctttatcagaatttggagccccaagatggaatgactatgaagtaccggaggaatttaactttgcaagttatgtactggactactgggctcaaaaggagaaggagggcaagagaggtccaaatccagctttttggtgggtgaatggccaaggggatgaagtaaagtggagcttcagagagatgggagacctaacccgccgtgtagccaacgtcttcacacagacctgtggcctacaacagggagaccatctggccttgatgctgcctcgagttcctgagtggtggctggtggctgtgggctgcatgcgaacagggatcatcttcattcctgcgaccatcctgttgaaggccaaagacattctctatcgacta

SEQ ID NO: 343204 - DNA, 687 bp, Artificial Sequence
  derived and/or modified sequence
atgaagatcaagcccggatttatggggaaagcgacaccaccatacgatgtgcagttccatatggaagcaagtgtagagaattgtataatagtctccatgaacacagcagatcctggaagccagggaattacgcattccctgctcctacaagtgattgacgataagggatctattctcccgccgaacaccgaaggaaatatcggaattagaataaagcccgtgcgtcctgtctctctatttatgtgctacgagggggaccccgagaagactgcaaaagtagaatgtggcgatttctacaataccggcgatagagggaagatggacgaggaggggtatatctgttttttgggacgctcagatgatattattaatgccagcggctatagaataggacccgccgaggtggagtcagccctggtggagcacccggctgtcgctgagagcgccgtcgtcggtagtcctgatcctatccgtggggaggtcgtcaaggccttcatagtgttgactccgcagttcctgtctcacgacaaggatcagctgacaaaagagctacagcaacatgtcaagtccgtgactgccccctacaagtacccccggaaagtggagttcgtatcggagcttccaaagactatcacagggaagattgaacgcaaggaactgcgcaagaaagaaaccggtcagatgtag

SEQ ID NO: 343205 - DNA, 687 bp, Artificial Sequence
  derived and/or modified sequence
atgaagatcaagccaggcttcatgggcaaggccaccccaccctatgatgtgcagttccacatggaggcctctgtggagaactgcatcatcgtgtccatgaacacagctgaccccggcagccagggcatcacccacagcctgctgctgcaggtgattgatgacaagggcagcatcctgccccccaacacagagggcaacatcggcatccgcatcaagcctgtgcggcctgtgtccctcttcatgtgctatgaaggagaccctgagaagacagccaaggtggagtgtggggacttctacaacacaggagaccggggcaagatggatgaggagggctacatctgcttcctgggccgcagtgatgacatcatcaatgccagcggctaccgcatcggccctgctgaggtggagagcgccctggtggagcaccctgctgtggccgagagcgctgtggtgggcagcccagaccccatccggggggaggtggtgaaggccttcatcgtgctgaccccccagttcctgagccatgacaaggaccagctgaccaaggagctgcagcagcacgtgaagtctgtgacagccccctacaagtaccccaggaaggtggagtttgtgtctgagctgcccaagaccatcaccgggaagattgaaaggaaggagctgaggaagaaggagaccggccagatgtag

SEQ ID NO: 343206 - DNA, 687 bp, Artificial Sequence
  derived and/or modified sequence
atgaagatcaagcccggcttcatgggcaaggccacccccccctacgacgtacagttccatatggaggccagtgtggagaactgcatcattgtgtcgatgaatacagcagatcctggctcgcaggggatcacccactcattgcttctccaggtgatcgatgataagggctccatcctgccaccgaacactgaagggaacattggtatcaggatcaagcccgtgagaccggtctccctgtttatgtgctacgagggggatcccgagaaaacggccaaagtagagtgcggcgatttttataatactggagaccggggcaagatggatgaggagggctacatctgcttcctgggtcggtccgatgacatcatcaatgcttcaggttaccggattggcccagctgaagtcgaatctgcactggtagaacatcccgccgtggctgagtctgccgtggtgggttctccagaccccattaggggcgaagtagtgaaagctttcatcgtcctaaccccacagtttctctcccatgacaaagaccagctcacaaaggagttacagcaacacgtcaagagtgtcaccgccccatataaatacccccgtaaggtagagtttgtctcggagcttcccaagactatcactgggaaaatagaacggaaggagttgaggaagaaggagactggccagatgtag

SEQ ID NO: 343207 - DNA, 687 bp, Artificial Sequence
  derived and/or modified sequence
atgaaaatcaagccagggtttatgggcaaggcgacccccccttacgatgttcagttccacatggaggcatctgttgagaattgtatcatagtaagtatgaatactgccgatccgggatcccaaggcattactcatagtctgctgctgcaagtcattgatgacaaaggatccattctccctcccaacacagaaggaaatatcggcattcggattaagcccgttcggccagtgtccctgttcatgtgctatgagggcgacccggaaaaaacagcaaaagtggaatgcggggatttctacaatacaggagatcgtggaaagatggacgaggaaggctatatatgctttctgggaagatccgacgacatcatcaatgctagtggataccgaatcggtccagccgaagtcgaatctgcactggtagagcatcccgctgttgctgaaagcgctgtagtggggtcccccgacccaattcgaggagaggtcgtgaaggcttttatcgtgctgactcctcaattcctgtcacacgataaagaccagttaacgaaggagttgcagcagcatgttaaatccgtcacggcgccttacaagtaccctagaaaagtggaattcgtctcggaactgccaaaaacaataactggcaaaattgagaggaaggagctgcggaagaaggaaactgggcagatgtag

SEQ ID NO: 343208 - DNA, 687 bp, Artificial Sequence
  derived and/or modified sequence
atgaagatcaagcccggcttcatgggcaaggccacccccccctacgacgtgcagttccacatggaggccagcgtggagaactgcatcatcgtgagcatgaacaccgccgaccccggcagccagggcatcacccacagcctgctgctgcaggtgatcgacgacaagggcagcatcctgccccccaacaccgagggcaacatcggcatcagaatcaagcccgtgagacccgtgagcctgttcatgtgctacgagggcgaccccgagaagaccgccaaggtggagtgcggcgacttctacaacaccggcgacagaggcaagatggacgaggagggctacatctgcttcctgggcagaagcgacgacatcatcaacgccagcggctacagaatcggccccgccgaggtggagagcgccctggtggagcaccccgccgtggccgagagcgccgtggtgggcagccccgaccccatcagaggcgaggtggtgaaggccttcatcgtgctgaccccccagttcctgagccacgacaaggaccagctgaccaaggagctgcagcagcacgtgaagagcgtgaccgccccctacaagtaccccagaaaggtggagttcgtgagcgagctgcccaagaccatcaccggcaagatcgagagaaaggagctgagaaagaaggagaccggccagatgtag

SEQ ID NO: 343209 - protein, 189 aa, Artificial Sequence
  derived and/or modified sequence
MAAPRQIPSHIVRLKPSCSTDSSFTRTPVPTVSLASRELPVSSWQVTEPSSKNLWEQICKEYEAEQPPFPEGYKVKQEPVITVAPVEEMLFHGFSAEHYFPVSHFTMISRTPCPQDKSETINPKTCSPKEYLETFIFPVLLPGMASLLHQAKKEKCFEPTAANPTLAPADRRGSSPLHSILLESLCGSL

SEQ ID NO: 343210 - DNA, 570 bp, Artificial Sequence
  derived and/or modified sequence
atggccgcccccagacagatccccagccacatcgtgagactgaagcccagctgcagcaccgacagcagcttcaccagaacccccgtgcccaccgtgagcctggccagcagagagctgcccgtgagcagctggcaggtgaccgagcccagcagcaagaacctgtgggagcagatctgcaaggagtacgaggccgagcagccccccttccccgagggctacaaggtgaagcaggagcccgtgatcaccgtggcccccgtggaggagatgctgttccacggcttcagcgccgagcactacttccccgtgagccacttcaccatgatcagcagaaccccctgcccccaggacaagagcgagaccatcaaccccaagacctgcagccccaaggagtacctggagaccttcatcttccccgtgctgctgcccggcatggccagcctgctgcaccaggccaagaaggagaagtgcttcgagcccaccgccgccaaccccaccctggcccccgccgacagaagaggcagcagccccctgcacagcatcctgctggagagcctgtgcggcagcctgtag

SEQ ID NO: 343211 - DNA, 570 bp, Artificial Sequence
  derived and/or modified sequence
atggcggcgccaagacagatcccctcacacattgtccggctgaaaccctcatgctccaccgatagcagctttactagaactcctgtcccgaccgtgtcattagccagcagggaactccctgtgtcatcctggcaggtcacggaaccaagttcgaaaaacctttgggaacaaatttgcaaggaatatgaagctgagcagcctccgttccctgaggggtataaagtcaaacaggaaccagtcattaccgtcgcacccgtggaagagatgctgtttcacggttttagtgccgaacattacttccccgttagtcattttactatgatttcacgcacaccatgcccccaagataaatctgagacaatcaatcctaagacatgctcccccaaagaatatctggagactttcatttttccagttctgctgcctggaatggccagcctccttcaccaggccaagaaggaaaaatgttttgaacccacggccgctaacccaacactggctcccgccgaccgaaggggctcctctccattgcatagtattttactggagtctctctgcggtagcctctag

SEQ ID NO: 343212 - DNA, 570 bp, Artificial Sequence
  derived and/or modified sequence
atggccgccccccggcagatccccagccacatcgtgcggctgaagcccagctgcagcacagacagcagcttcaccaggacccctgtgcccaccgtgtccctggccagccgggagctgcctgtgtcctcctggcaggtgacagagcccagcagcaagaacctgtgggagcagatctgcaaggagtatgaggccgagcagccccccttccctgagggctacaaggtgaagcaggagcctgtgatcaccgtggcccctgtggaggagatgctgttccacggcttctctgctgagcactacttccctgtgagccacttcaccatgatcagcaggaccccctgcccccaggacaagtctgagaccatcaaccccaagacctgcagccccaaggagtacctggagaccttcatcttccctgtgctgctgcccggcatggccagcctgctgcaccaggccaagaaggagaagtgctttgagcccacagctgccaaccccaccctggccccagctgacagaagaggcagcagccccctgcacagcatcctgctggagagcctgtgtggcagcctgtag

SEQ ID NO: 343213 - DNA, 570 bp, Artificial Sequence
  derived and/or modified sequence
atggccgccccccggcagatccccagccacatcgtgcggctgaagccgtcttgctccacggactcttctttcacccgcacacctgtacccactgttagcctggcctctagggagctgcctgtgagcagctggcaagttaccgaaccgtccagtaaaaacttgtgggagcagatttgcaaggagtacgaagcagagcagcccccattccccgaaggatacaaggttaagcaggagcctgtcataaccgttgctcctgtggaggaaatgctcttccatgggttcagcgccgaacactattttcctgtctctcacttcactatgatcagtagaaccccttgtcctcaggacaaaagcgagactattaaccccaaaacctgttcacccaaagagtacctagagacctttattttcccggtgctacttcccggaatggcctctcttctacatcaggcaaagaaggagaaatgcttcgagccaactgcagctaatcctaccctagctccagctgataggcgcgggagcagccccctacactctattctgctcgaaagcttatgcggttcgctgtag

SEQ ID NO: 343214 - DNA, 570 bp, Artificial Sequence
  derived and/or modified sequence
atggcagccccaaggcagatcccaagccatatagtccgtctgaaaccttcctgcagtacagattcatcgttcactcgtacacccgtgcctactgtaagtctggcttcacgggaactgccagtgtctagctggcaggtaacggagcccagctcaaaaaacttgtgggaacagatctgtaaggagtacgaagctgaacagcccccattcccagagggctataaagtgaagcaggagcctgttatcactgttgcaccggttgaggaaatgctgttccatggcttttctgcagaacactactttccagtgagccactttaccatgattagccggaccccttgccctcaggacaaatccgaaactatcaatcccaagacctgtagccccaaggagtatttagagacctttatattccccgtgctgctcccaggtatggcatccctgctccatcaggcaaagaaggagaagtgtttcgagcctaccgctgcaaacccaactttggccccagcggatcgtaggggaagcagccctctgcacagcatcttgcttgagtctctgtgtggtagcctgtag

SEQ ID NO: 343215 - DNA, 600 bp, Artificial Sequence
  derived and/or modified sequence
atgctgttccacggcttcagcgccgagcactacttccccgtgagccacttcaccatgatcagcagaaccccctgcccccaggacaagagcgagaccatcaaccccaagacctgcagccccaaggagtacctggagaccttcatcttccccgtgctgctgcccggcatggccagcctgctgcaccaggccaagaaggagaagtgcttcgagagaaagagaaccaagttcatcgcctgcgacttcctgaccgagtggctgtacaaccagaaccccaagagagccggcgagcccttcaccgagttcttcagcatccccttcgtggaggagagactgaagcagcaccccagaccccccatccccctgagcctgctgctgaccgaggaggaggccgccctgtacatccagagcttctggagagcctgcgtggtgagatgcgaccccgagatccaggagctgagacagtggcagaagaagctgagagaggccaagcacatccaccagcaggtgaagatcttctgggccaagcaggagcagaaggtgaagtgcaagatggaggacgacgccgtgcccgccgccaagatgaagatccccagcagctag

SEQ ID NO: 343216 - DNA, 600 bp, Artificial Sequence
  derived and/or modified sequence
atgctctttcatgggttctcagcagagcattatttcccagttagccactttacaatgatctctagaactccttgcccgcaggataagtctgagacaattaaccccaaaacttgcagcccaaaagagtatctggagacttttatcttcccagtgctgttacctggcatggcgagtctgctccaccaggccaagaaggagaagtgtttcgaaaggaaaagaaccaagtttatagcgtgtgacttcctgactgaatggctctacaaccagaacccaaagagagccggagagcctttcacggaatttttctcaatcccctttgtcgaagaacgattaaaacagcaccctcgcccaccgatcccactctcgcttcttctgacagaggaagaagcggccttatatatccagtccttctggcgggcctgcgtggtcaggtgcgatcccgagattcaggagcttaggcaatggcagaagaagctgcgggaggccaagcatatccatcagcaggtcaaaattttctgggcgaagcaagaacagaaggtgaaatgtaagatggaagacgatgcagtacctgcggccaagatgaaaatccccagctcctag

SEQ ID NO: 343217 - DNA, 600 bp, Artificial Sequence
  derived and/or modified sequence
atgctgttccacggcttctctgctgagcactacttccctgtgagccacttcaccatgatcagcaggaccccctgcccccaggacaagtctgagaccatcaaccccaagacctgcagccccaaggagtacctggagaccttcatcttccctgtgctgctgcccggcatggccagcctgctgcaccaggccaagaaggagaagtgctttgagaggaagaggaccaagttcatcgcctgtgacttcctgacagagtggctgtacaaccagaaccccaagagagctggggagcccttcacagagttcttcagcatcccctttgtggaggagcggctgaagcagcaccccaggcctcccatccccctgagcctgctgctgacagaggaggaggccgccctgtacatccagagcttctggagggcctgtgtggtgcgctgtgaccctgagatccaggagctgcggcagtggcagaagaagctgcgggaggccaagcacatccaccagcaggtgaagatcttctgggccaagcaggagcagaaggtgaagtgcaagatggaggatgatgctgtgcctgctgccaagatgaagatccccagcagctag

SEQ ID NO: 343218 - DNA, 600 bp, Artificial Sequence
  derived and/or modified sequence
atgctgttccacggcttcagcgccgagcactacttccccgtgagccacttcacaatgatctctaggacaccctgcccgcaggataaatctgaaaccattaacccaaagacctgttcccccaaggaatacctcgaaaccttcatttttccagtgctcttgcctggtatggctagcctgctacaccaggctaaaaaggagaaatgctttgagaggaaaagaaccaagttcattgcctgtgacttcctaaccgagtggctctacaatcagaacccgaagcgagctggggagccattcaccgaattctttagtatcccattcgtggaggagcgcctcaagcagcacccacggccaccaatacccctgtcactgctgctgactgaagaagaggccgccctctacatccagagcttctggagagcctgtgtggtacgctgtgacccagaaatccaggaactcaggcagtggcagaaaaaactgcgggaggccaaacacattcatcagcaggtgaagattttctgggcaaagcaagaacagaaggtcaagtgcaagatggaggatgatgctgtgccagcagctaaaatgaagattccctcttcttag

SEQ ID NO: 343219 - DNA, 600 bp, Artificial Sequence
  derived and/or modified sequence
atgctcttccacggattttccgctgagcactacttcccagtgtcccactttacaatgattagcagaacaccttgtccacaagacaagagcgaaaccatcaaccccaaaacctgttccccgaaggagtacctcgagacattcatttttcctgtactgctgcccggaatggcctctttgctgcatcaggctaagaaggaaaaatgtttcgagcgaaagaggacaaagtttatcgcttgtgactttttgactgaatggctttacaatcagaatcccaaacgtgcaggcgagcccttcacggaattcttcagcatccccttcgttgaggaaaggctgaaacagcacccccgtccaccgatccctctgtccctgctgcttacggaggaggaagcagccctatacatccagtctttttggagagcctgcgtggttcgctgtgacccagagatccaggagctgcgtcagtggcagaagaaattacgtgaagccaaacatattcaccagcaggtgaagatattctgggcaaaacaagagcagaaggtgaaatgtaaaatggaggacgatgcagttccagccgctaaaatgaaaattccttcatcctag

SEQ ID NO: 343220 - protein, 286 aa, Artificial Sequence
  derived and/or modified sequence
MEVYIRHLEKVLRRYVQRLQWLLSGPVLCSRTWYRQSMDRGVMMTAASGSRRLFGTVLESKVCILLDTSGSMGPYLQQVKTELVLLIWEQLRKCCDSFNLLSFAESFQSWQDTLVETTDAACHEAMQWVTHLQAQGSTSILQALLKAFSFHDLEGLYLLTDGKPDTSCSLVLNEVQKLREKRDVKVHTISLNCSDRAAVEFLRKLASFTGGRYHCPVGEDTLSKIHSLLTKGFINEKDPTLPPFEGDDLRILAQEITKARSFLWQAQSFRSQLQKKNDAEPKVTLS

SEQ ID NO: 343221 - DNA, 4659 bp, Artificial Sequence
  derived and/or modified sequence
agttgcttggaggagcttggagaaaccagaagtgagatccaggagaagtaaggccctggagtgccaggagcccttctcccaaagatggagaaataaatgaagaaatacaggaaaataagcattgggtgttttgcaatggctacacaaactagtcatgtcttccatggtcaagaaaatatgtttctggaaaaccattgcattaggagaaacactggcagagattcaaagaagccactaaagcagaagaatatgaatggacttgggcaaaattcggacaatggattattggttacacatgttaaccagacacaggacttactgaggctgcaggggagtgagacccagtcttcagattgggaggactctgaagactggctttcggctcacagtttaaaatgtcagaaactcaccttggctgacctgataagccagggcacagaagtgctggaggagggcaccaatgtcgtgcagaaaatatgtttctccacccagatcatccgccattttgagtcaaagctttctgacactattgaagtctatcaagagagaattcagtggctcacagaaaacagcaagaaggcatttggcctcatcaaaggggccagagtcagcatcctcatagatgtgtcagccatcagcagtggccctcagaaagaagagttccaaaaggacctcatgagcctcatcgatgagcagctgagccacaaggagaagctgtttgtcctgtcctttggcaccaatgccgggtccctctggccagaccccatggaagtcagcgcctccaccctccaggaacttaagctctgggtaaagacgctgcagcctgatggaggcagcaacctgctacaagctctgaagaagatcttcactctcaagggactggattccctggtggccatcatgagaagctgcccagatcagccttctgaaatcctgtctgactacatccagcagtccaccatgggaagagacctcatcatccacttcatcacctacagatgcgatgatcagatgccccctgctgtcctgaagaaccttgcagaagctgttaggggctactaccactgctacagcccaaagatggagcactacaccagccgggacatggatgagctcctggcagaaattcagaaggcccagagcctcctcagccacgtgcaagccctgcagcacagcagcccctgtgaggcgctcacctgcaccatggaggagatttccacagagattacaaatgggccactcataagcctcttgcctaaacccccaaagcatgacgctcctctcaccattgagtttccaaacttggacaagacttctgcagagtggcttaaggtcaatggtctgaaagccaagaaattaagtctatatcaggtcctggcacccaatgcattctctcctgtggaggaatttgtacctattctccagaaaacagtatcatcgaccatccatgagaaggcaatgatacaatttgaatggcacgacgggacagtgaagaacattcatgtggacccacccttcctctataagtaccagcaacagctcagcagagctatgcggatgtatgagaggcggattgagtggctctccctggccagcagaagaatctggggcacagtctgtgaaaaaagggtggttgtactgctcgatatctctgcgaccaattccatgtacattattcatatccagcactccctgcggctgctgctggaggagcagttatccaacaaggactgtttcaacctcatcgcgtttggaagcacaattgaaagctggaggcctgagatggttcccgtgagtcacaacaatttacaaagtgcctggcggtgggccctgaacctgcggtgtcggggcagcaggaacgttctcagcgccctgcggaaggctgtggaagtagacttcaaggacaaagacaaacaccaatcgcagggaatctacctcttcactgggggcatccccgaccaggacatgcctacactcagtgcctacatggctgaggcctgtggcggctgcgacctccagctgaacgtgtgtctcttctacgtgggcgagccaaagatggacaccacaccccctgcccgctatgccagtcacactgacacagccgccgcctacaaggaggtcacccgggctgcaggtggccgcttccactggtttggagacacaggcatttatgagagcgatgacatcaactccatcatgtctgagatggaaaaggctctcaactactcccaaaagtgtgccttcctcatggcctccctgaagaaccattcaggaaaagtactgggaagttcagccctcccgaaagaaaaaccaaagacacttcagctaagaagtcagcccaagaagctctgccctcccaggcccaccgtccccctgggggccagaatgagcattaaagatgaccctgacagagagaagagccccccgctgaaatctctgaaatggcgtccactcagtagcagagttggcatctcaccagctgcggcccagccaacgaaagaagggatgatggaactgaggaggaagaccaagtcaagggaagcagagacatctcttttactgttctacacagagaaagggaatgacgtgggctcagtgtacaagaagtaccctcaaggaaggggcttgagaaggactagctcttctattgacttacccagaaaggatacagtttgctcaagccaagagtgggtggcaaaatatgggctcaaaaaattgaagctggagatttccagatgcatgggtcccaactgcactcatcaaaagtcaggacagaggtcagcatccgccaaacactgcagcatcttccccagcgttgagatccatggagtggtgagacacatccagtggacgcccagggagatggaggtgtacatcaggcacttggagaaggtgttaaggcgctatgtccagaggctgcagtggctgctgtccggtccagtcctctgcagtaggacctggtatagacagtccatggacaggggcgtcatgatgactgctgcttcagggagccgccgactgtttggcaccgttttggagagcaaagtatgcatattgctggacacgtcagggtccatgggcccctacctgcagcaggtgaagacagagctggttttgctgatttgggaacagctgcggaagtgctgtgacagttttaacctgctcagctttgcagagagctttcagtcatggcaggacacgctggtggagaccacagatgcagcgtgtcatgaggctatgcaatgggtgacccacctgcaagctcagggcagcacctccatcttgcaagcattgctgaaagctttcagtttccatgatctggaaggattgtacctcctgaccgacggaaagccagacacaagctgcagccttgtcctaaatgaagtccaaaaactcagggagaaaagagatgtgaaagtgcacaccatttccttgaactgctcagacagagcggcggttgagttcctgagaaagctggcttccttcaccggcggacgctatcactgccctgtgggtgaggacacactctccaaaattcacagcctgctgaccaaaggcttcatcaatgaaaaggatcccacattgccaccatttgaaggagatgatttaaggatcctggcccaggagatcaccaaggccagaagcttcctctggcaggcccaatccttcagatcccaactccagaagaaaaatgatgcagaaccaaaggtcactctttcctagagaagtgttctcagaaaagtcatcctgcaaaggaccactcactgagcaaatctcagccccgagggcaggatgggatgaaatgctgtgacctgcaggaaacatgattcctggtaccaggactctctggaagctgaggaaggaaagactttgtcttttgtgtgaggggccattcccgggtcttaatctaactctccagccctgtcccgcagcgcactctactctccagccactagattgtccctctctgggaagccctaaaccaaccccctgcctaaatggtggtgcttcttgcaaaccaaccccctgcctgaacggtgcttcttgccccctctgcctggagactcctgctcatccatcaaggcacagctcaaatgacatcagctccctgggacctatctagagcgaggggcctccagtctttctcttgcagcatcctgaccacgcagacctctcgcactcagcactctatgtcacgccaccttgctcgctgatctaactcttctccttgatggtgagctccttcgggatgagactggtgtcccaggatctgcaggtccccagaagctgccacataggagacacatggtgaacagtgagcaggcggctgagctgtgagagcctagctctggaaagcagctgatggggtggtctccaccctggttcataagaggctaatgcagagtcacagtcagcccatcctgggggaagaagaaacaagtgagcctcagcaccaccctccatccctgcccaaccaaactgaagtgaaggctgctcatctgggttcattttctaaaattaaaaacaattaattttattctactaataggatcaacatgactttaactgtttgaagtgatcattggcgtgtgtgtgtgtgcataaatttttagtgacataaaactttattaaaagactcataccataataaagaatttc

SEQ ID NO: 343222 - protein, 1153 aa, Artificial Sequence
  derived and/or modified sequence
MSQEPTTYSLFLFLFLSHGVSSYTVPNSRQDLHPLLQNMAEEIIDGSYLNALLDLIQFQSSHVWTDDLSHRVLAYLNSRNVAFTIPSLQAAVENHLEQRLHQPQKLLEDLRKTDAQQFRTAMKCLLEDKKDGLDLKDIIIDLGEIRERALQSPGVNRSLFLITLERCFQMLNSLECVEILGKVLRGSSGSFLQPDITERLPRDLREDAFKNLSAVFKDLYDKTSAHSQRALYSWMTGILQTSSNATDDSASWVSAEHLWVLGRYMVHLSFEEITKISPIEIGLFISYDNATKQLDMVYDITPELAQAFLERISSSNFNMRNTSTIHRQAHELWALEPFPKMLGLLVCFYNDLELLDATVAQVLLYQMIKCSHLRGFQAGVQKLKAELLDIAMENQTLNETLGSLSDAVVGLTYSQLESLSPEAVHGAISTLNQVSGWAKSQVIILSAKYLAHEKVLSFYNVSQMGALLAGVSTQAFCSMKRKDISQVLRSAVSQYVSDLSPAQQQGILSKMVQAEDTAPGIVEIQGAFFKEVSLFDLRRQPGFNSTVLKDKELGRSQALFLYELLLKTTRRPEELLSAGQLVKGVTCSHIDAMSTDFFLAHFQDFQNNFALLSPYQVNCLAWKYWEVSRLSMPPFLLAALPARYLASVPASQCVPFLISLGKSWLDSLVLDSHKKTSVLRKVQQCLDDSIADEYTVDIMGNLLCHLPAAIIDRGISPRAWATALHGLRDCPDLNPEQKAAVRLKLLGQYGLPQHWTAETTKDLGPFLVLFSGDELSSIATKFPEILLQAASKMARTLPTKEFLWAVFQSVRNSSDKIPSYDPMPGCHGVVAPSSDDIFKLAEANACWALEDLRCMEEDTFIRTVELLGAVQGFSRPQLMTLKEKAIQVWDMPSYWREHHIVSLGRIALALNESELEQLDLSSIDTVASLSWQTEWTPGQAESILQGYLDDSGYSIQDLKSFHLVGLGATLCAINITEIPLIKISEFRVVVARIGTLLCSTHVLAEFKRKAEVVFGDPTEWTSSVLQELGTIAAGLTKAELRMLDKDLMPYFQPSAIKCLPDEIFKELSAEQIASLGPENAAAVTHAQRRRLSPLQLQSLQQALDGAKTHSWQDAPASAGPTRTSSSRSPAGALQSWGLWLGCPLLVLMAKLLW

SEQ ID NO: 343223 - protein, 548 aa, Artificial Sequence
  derived and/or modified sequence
PRAVWVEARGGAQHPTMRRTAPLHRGTWSKMSIILRARYLASVPASQCVPFLISLGKSWLDSLVLDSHKKTSVLRKVQQCLDDSIADEYTVDIMGNLLCHLPAAIIDRGISPRAWATALHGLRDCPDLNPEQKAAVRLKLLGQYGLPQHWTAETTKDLGPFLVLFSGDELSSIATKFPEILLQAASKMARTLPTKEFLWAVFQSVRNSSDKIPSYDPMPGCHGVVAPSSDDIFKLAEANACWALEDLRCMEEDTFIRTVELLGAVQGFSRPQLMTLKEKAIQVWDMPSYWREHHIVSLGRIALALNESELEQLDLSSIDTVASLSWQTEWTPGQAESILQGYLDDSGYSIQDLKSFHLVGLGATLCAINITEIPLIKISEFRVVVARIGTLLCSTHVLAEFKRKAEVVFGDPTEWTSSVLQELGTIAAGLTKAELRMLDKDLMPYFQPSAIKCLPDEIFKELSAEQIASLGPENAAAVTHAQRRRLSPLQLQSLQQALDGAKTHSWQDAPASAGPTRTSSSRSPAGALQSWGLWLGCPLLVLMAKLLW

SEQ ID NO: 343224 - protein, 1139 aa, Artificial Sequence
  derived and/or modified sequence
MSQEPTTYSLFLFLFLSHGVSSYTVPNSRQDLHPLLQNMAEEIIDGSYLNALLDLIQFQSSHVWTDDLSHRVLAYLNSRNVAFTIPSLQAAVENHLEQRLHQPQKLLEDLRKTDAQQFRTAMKCLLEDKKDGLDLKDIIIDLGEIRERALQSPGVNRSLFLITLERCFQMLNSLECVEILGKVLRGSSGSFLQPDITERLPRDLREDAFKNLSAVFKDLYDKTSAHSQRALYSWMTGILQTSSNATDDSASWVSAEHLWVLGRYMVHLSFEEITKISPIEIGLFISYDNATKQLDMVYDITPELAQAFLERISSSNFNMRNTSTIHRLGLLVCFYNDLELLDATVAQVLLYQMIKCSHLRGFQAGVQKLKAELLDIAMENQTLNETLGSLSDAVVGLTYSQLESLSPEAVHGAISTLNQVSGWAKSQVIILSAKYLAHEKVLSFYNVSQMGALLAGVSTQAFCSMKRKDISQVLRSAVSQYVSDLSPAQQQGILSKMVQAEDTAPGIVEIQGAFFKEVSLFDLRRQPGFNSTVLKDKELGRSQALFLYELLLKTTRRPEELLSAGQLVKGVTCSHIDAMSTDFFLAHFQDFQNNFALLSPYQVNCLAWKYWEVSRLSMPPFLLAALPARYLASVPASQCVPFLISLGKSWLDSLVLDSHKKTSVLRKVQQCLDDSIADEYTVDIMGNLLCHLPAAIIDRGISPRAWATALHGLRDCPDLNPEQKAAVRLKLLGQYGLPQHWTAETTKDLGPFLVLFSGDELSSIATKFPEILLQAASKMARTLPTKEFLWAVFQSVRNSSDKIPSYDPMPGCHGVVAPSSDDIFKLAEANACWALEDLRCMEEDTFIRTVELLGAVQGFSRPQLMTLKEKAIQVWDMPSYWREHHIVSLGRIALALNESELEQLDLSSIDTVASLSWQTEWTPGQAESILQGYLDDSGYSIQDLKSFHLVGLGATLCAINITEIPLIKISEFRVVVARIGTLLCSTHVLAEFKRKAEVVFGDPTEWTSSVLQELGTIAAGLTKAELRMLDKDLMPYFQPSAIKCLPDEIFKELSAEQIASLGPENAAAVTHAQRRRLSPLQLQSLQQALDGAKTHSWQDAPASAGPTRTSSSRSPAGALQSWGLWLGCPLLVLMAKLLW

SEQ ID NO: 343225 - DNA, 3462 bp, Artificial Sequence
  derived and/or modified sequence
atgtcacaggagccaaccacctattcactgtttctgtttttatttttgagccatggtgtcagctcctacaccgtaccaaattctaggcaggatctacatcccttgctgcagaatatggccgaggagattatcgacggaagttaccttaatgcccttctggatctgattcaattccagtccagccatgtttggacggacgacttgagccatcgcgtcttggcttacctgaattcaaggaacgtggccttcaccatcccttccctgcaggctgccgtggagaatcacctggaacagcgtctgcatcagccccagaaactcctcgaagaccttcgcaagacagacgcccagcagttccggactgccatgaagtgcctgcttgaggacaaaaaagatggcctggacctgaaagacatcattatcgatctgggagaaattagagagagagcgctccagagccctggtgtgaacagatccctcttcctgattaccctcgaacgatgttttcagatgctcaacagcctggaatgcgtggaaatcctggggaaggtgctgagaggaagctctggctcctttttgcagcccgatattaccgaacgtctgcctcgggatctccgggaggatgcttttaaaaatctcagtgcagtgtttaaagatctatatgataaaacctcggctcactcacagcgcgccctttacagctggatgaccggaatcctccagaccagcagcaacgccaccgatgactcagccagctgggtgagcgcagagcatttatgggtgctgggccggtacatggttcatctcagtttcgaagagatcacgaaaatatctcccatcgaaattgggctatttatctcatacgataacgcaaccaagcagctggatatggtttatgatatcacacctgaacttgcccaggcttttcttgagagaatctcctcaagcaatttcaatatgagaaataccagtaccatacacaggcaggcccatgagctgtgggcactagaaccttttcccaagatgttgggtctgcttgtgtgcttttacaacgatctggagttactcgacgccaccgtggcgcaggtgctactttatcagatgatcaagtgctctcatctgcgcggcttccaggccggagttcagaagctcaaggcggaactgttggacattgctatggaaaatcagacgctaaacgaaaccctaggcagtctcagcgacgccgtggtgggtctgacttacagtcaactagaaagcctctcaccagaagctgttcacggagcaatcagcaccttaaaccaggtcagtggttgggcaaagagccaggtgataattttgtcagccaaatatctggcccacgagaaggtcctgtccttctacaatgtctcacagatgggggccctgctcgcaggagtgagtactcaagccttttgtagcatgaagcggaaagatataagccaagtgctgaggagcgccgtctctcagtacgtgtccgatttaagccctgctcagcaacagggaatactgtccaaaatggtacaagccgaggacactgccccaggcattgtggaaattcagggagcgttcttcaaagaagtcagcttgttcgatctccgaaggcaacctggatttaactccactgtactgaaggacaaagagcttggacggtcccaggcactcttcctctatgaactgctcctcaagactacccggaggcccgaggaacttctgtctgcggggcaacttgttaagggtgtcacctgcagccatattgatgctatgtctaccgacttcttccttgcacacttccaagactttcagaacaattttgcactccttagtccataccaggttaactgtttagcttggaaatattgggaggtgtccaggctgtccatgcccccttttctgctagccgctctgccggctcggtatctggcttcagtccccgcttcccagtgtgtccccttcctcatttccctgggcaagtcatggttggactccctggtcctggattcacacaagaagacctcagtgctgcgcaaagtacagcaatgcctcgatgactctatagcagacgaatacactgtcgatattatgggcaatttgctgtgccatctgccagctgccattatagatagaggcatctcaccacgagcttgggctacagcccttcatggcctacgagactgtccagatctaaatccagagcagaaggcagccgtgagactgaagcttcttggtcagtatggtctgcctcagcactggacagccgagactactaaggatctgggaccttttctcgtgctgttctccggggacgaactatctagcatcgcaaccaaatttcccgaaatcctgctccaggccgcttcaaaaatggcccgtacactccccacaaaggaatttctgtgggctgtctttcagagtgttcggaacagcagtgacaaaataccttcgtatgatccaatgcccggatgccatggagttgtagccccatccagcgacgatatttttaaactggcagaggccaacgcctgctgggcccttgaggacctgaggtgcatggaggaggacacattcatccgaactgtggagctgttgggcgctgtgcaaggattctcccgaccccaattaatgacactgaaagaaaaagccatccaggtctgggacatgccttcctattggcgcgaacaccacatcgtttcgttaggaagaatcgcactggcccttaacgagagtgaactcgagcaactcgatttaagttcaatcgacacagtcgcttccctgtcatggcagactgagtggactcctgggcaggcggagtcaattttacaggggtacttagatgactctggctactcgatacaggacctgaagtccttccacctcgtgggcctcggggccaccctatgtgctatcaatattacagagatccctctgattaagatctcagaatttagagtggtggtagctcgaattggaactctgctatgctctacccacgtgctggccgaatttaaaagaaaagctgaagtggtcttcggcgacccaacagagtggacctcatctgtgctgcaggaactcggaacaattgccgccggcctgacaaaggcagagctgaggatgctggacaaggatcttatgccatattttcagccttcggccatcaagtgtttgcctgacgaaatcttcaaagagctctccgccgagcagatcgccagcctgggccctgagaacgccgcagccgtgacacacgctcagagaagacgcctgtccccactgcagcttcagtcacttcagcaagcactggacggtgccaaaacacatagctggcaggatgcacccgcttccgctggtcccacacgtacatccagtagtcgctcccccgccggtgcgcttcagagctgggggctgtggctgggctgccctctcctcgtgctgatggccaaattactgtggtag

SEQ ID NO: 343226 - DNA, 3420 bp, Artificial Sequence
  derived and/or modified sequence
atgagccaggaacctacaacctacagcctgtttctcttcctgtttctgtcccacggcgtgagcagttacaccgtacccaactctagacaagacctccaccccttgctccagaatatggctgaagagataattgacggatcatatctgaacgcccttctggatttgattcagtttcaaagttcccacgtgtggactgatgacctgagccatcgcgtactcgcttatttaaattcacgcaatgtggccttcacaataccatctctccaagctgccgtggaaaatcacctagagcagcggttgcaccagcctcagaagttgctggaggatctgagaaagaccgacgcccagcagttcagaaccgccatgaagtgtctgctggaggataagaaagatggcctcgatctgaaggacatcataatagatctgggcgaaattagagaacgcgccttacagagccccggggtgaacagaagcttgttcctgattactctcgaaaggtgcttccagatgttaaactctctggagtgcgtggaaatattaggaaaggtgttgagaggcagtagtggatcgttcctgcagcctgacataaccgagcgccttccacgggatctccgggaggacgctttcaagaatctgtcagcggtgttcaaggatctctacgacaaaacaagtgctcattcccagcgcgctctgtatagttggatgacaggcatcctgcagaccagttctaacgccactgacgactccgcctcttgggtctctgccgaacacttgtgggtgctgggccggtatatggtacatttaagctttgaggagattaccaagatctccccaattgaaatcggactcttcattagctacgataatgccaccaaacagctggacatggtgtacgatatcacgcccgaactcgcccaggccttcctcgaacgcatctccagtagtaacttcaacatgcgcaacacatccactatccaccgtcttggtctgttagtctgtttttacaacgacctggaattgttggacgcgaccgttgcacaggtcctgctgtatcagatgataaaatgctcgcatttgagaggatttcaagcgggagtgcaaaaactcaaggccgagttactagacatagcaatggagaaccagactctaaatgaaaccctggggagtttatccgacgccgtggtgggtctgacatattctcagctagagtctctcagcccagaagctgtacacggcgctataagcactctaaatcaggtttccggatgggccaaatcacaggtgatcatactgtccgccaagtacctcgctcacgagaaagtgctgtccttttataacgtgtctcaaatgggcgcactgctggcgggggtctccactcaggccttctgcagcatgaagaggaaagatatctcccaagtcctgcgcagtgctgtcagccagtacgtttctgacctgagcccagcccagcagcaagggattctcagcaagatggtccaagcagaggatacagcccctgggatcgtagagattcagggcgcgttcttcaaggaagtgagccttttcgatctccgcagacaacccggattcaatagcaccgtacttaaagacaaggaacttggccgctcacaggccctcttcctatacgaacttcttctcaagacaacacggcgtcccgaggaactactctccgcgggccaactggtcaagggcgtgacttgtagccacattgacgccatgtccaccgacttttttctcgcccattttcaggattttcagaataacttcgctctgctatctccttaccaggtaaactgccttgcctggaaatactgggaggtctcacgcctgtctatgccgcccttcttgctcgccgccctgccagccaggtacctggcttcggtgcctgcatcccagtgcgtgccattcctaatcagtctgggtaaaagttggctggacagcttggtgttggactcccataaaaaaacctctgttctcaggaaggtccagcagtgcttggacgacagcatagcggacgagtatacagtggacatcatgggcaacctactctgtcaccttccagctgcaataatcgataggggtatctccccccgagcatgggccacggctcttcacggattacgcgattgtccagacctaaaccccgagcagaaggcggccgtgcggctgaagcttcttgggcagtacggactgcctcagcattggactgccgaaactacgaaggacctcggtcccttcttagttctgttcagcggagatgagctctcatctatcgccacgaagtttcccgagattttacttcaggcagcatcaaaaatggctcggacactgccaacaaaagagtttctgtgggccgtgttccagtccgtacggaattcttctgacaaaatcccatcgtacgatcccatgccgggatgtcatggggtcgttgcgccctcaagtgatgatatctttaagctggcggaagccaacgcctgctgggccctggaggacttacgctgtatggaggaggacaccttcatccgtaccgttgagctgctgggcgctgtacaaggcttttccagacctcagctcatgaccttgaaggagaaagctattcaagtttgggacatgccaagctattggagggaacaccatattgtttcactgggaagaattgctctcgctttaaacgagtcagaactggagcagctggatctctcttctattgacacagtggcttctctctcgtggcaaactgagtggaccccaggccaggcagaatctatcctgcaggggtacctggacgatagcgggtattctatccaggatctgaagagcttccacctcgtcggacttggtgcaacactgtgtgcaatcaatatcacagagatcccgctaattaaaatttcggaattcagagtcgtagtggcccgtatcggcaccttgctgtgctctacccacgtactcgccgagttcaaacgcaaagcggaggtagtgttcggcgacccgacagagtggacgtctagcgtgctgcaagaactgggaactatagctgccggcctgactaaggccgagttgagaatgctggacaaggatttgatgccttacttccagccctctgccattaagtgcctaccagatgagatcttcaaagaactgtcggcagagcagatcgccagtctgggtcctgagaacgccgccgcggtaactcatgcccaacgcagaagactgtcaccgctgcagcttcagagcttgcagcaggcgctggatggagcaaagacacactcgtggcaggatgcccctgcctcagctggcccgacccggacgtcaagcagcaggtctccggccggtgccttgcagagctggggactgtggctggggtgtccactgctagttctgatggcaaagttgctgtggtag

SEQ ID NO: 343227 - DNA, 3462 bp, Artificial Sequence
  derived and/or modified sequence
atgagccaggagcccaccacctacagcctcttcctgttcctgttcctgagccacggcgtgagcagctacacagtgcccaacagccggcaggacctgcaccccctgctgcagaacatggccgaggagatcattgatggcagctacctgaatgccctgctggacctgatccagttccagagcagccacgtgtggacagatgacctgagccaccgggtgctggcctacctgaacagcagaaatgtggccttcaccatccccagcctgcaggccgctgtggagaaccacctggagcagaggctgcaccagccccagaagctgctggaggacctgaggaagacagatgcccagcagttcagaacagccatgaagtgcctgctggaggacaagaaggatggcctggacctgaaggacatcatcatcgacctgggggagatccgggagcgggccctgcagagccctggggtgaacagaagcctcttcctgatcaccctggagcgctgcttccagatgctgaacagcctggagtgtgtggagatcctgggcaaggtgctgcggggcagcagcggcagcttcctgcagcctgacatcacagagcggctgccccgggacctgcgggaggatgccttcaagaacctgtctgctgtgttcaaggacctgtatgacaagaccagcgcccacagccagagggccctgtacagctggatgacaggcatcctgcagaccagcagcaatgccacagatgattctgcctcctgggtgtctgctgagcacctgtgggtgctgggccgctacatggtgcacctgagctttgaggagatcaccaagatcagccccattgaaattggcctcttcatctcctatgacaatgccaccaagcagctggacatggtgtatgacatcaccccagagctggcccaggccttcctggagcgcatcagcagcagcaacttcaacatgaggaacaccagcaccatccaccggcaggcccacgagctgtgggccctggagcccttccccaagatgctgggcctgctggtgtgcttctacaatgacctggagctgctggatgccaccgtggcccaggtgctgctgtaccagatgatcaagtgcagccacctgcggggcttccaggccggcgtgcagaagctgaaggccgagctgctggacatcgccatggagaaccagaccctgaatgagaccctgggcagcctgagtgatgctgtggtgggcctgacctacagccagctggagagcctgagccctgaggccgtgcatggagccatcagcaccctgaaccaggtgtctggctgggccaagagccaggtgatcatcctgagcgccaagtacctggcccacgagaaggtgctgtccttctacaacgtgtcccagatgggcgccctgctggccggcgtgtccacccaggccttctgcagcatgaagaggaaggacatcagccaggtgctgcggtctgctgtgtcccagtatgtgtctgacctgagccctgcccagcagcagggcatcctgagcaagatggtgcaggccgaggacacagcccctggcatcgtggagatccagggcgccttcttcaaggaggtgtccctgtttgacctgcggcggcagcccggcttcaacagcacagtgctgaaggacaaggagctgggccgcagccaggccctcttcctgtatgagctgctgctgaagaccacccggcggcctgaggagctgctgtctgctggccagctggtgaagggcgtgacctgcagccacattgatgccatgagcacagacttcttcctggcccacttccaggacttccagaacaactttgccctgctgagcccctaccaggtgaactgcctggcctggaagtactgggaggtgtcccggctgtccatgccacccttcctgctggccgccctgcctgcccgctacctggcctctgtgcctgccagccagtgtgtgcccttcctgatcagcctgggcaagtcctggctggacagcctggtgctggacagccacaagaagacctctgtgctgaggaaggtgcagcagtgcctggatgacagcattgctgatgagtacacagtggacatcatgggcaacctgctgtgccacctgcctgctgccatcatcgaccggggcatcagcccccgggcctgggccacagccctgcacggcctgcgggactgcccagacctgaaccctgagcagaaggctgctgtgcggctgaagctgctgggccagtatggcctgccccagcactggacagctgagaccaccaaggacctgggccccttcctggtgctcttctctggagatgagctgagcagcatcgccaccaagtttcctgagatcctgctgcaggccgccagcaagatggcccggaccctgcccaccaaggagttcctgtgggccgtgttccagagcgtgaggaacagcagtgacaagatccccagctatgaccccatgcctggctgccacggcgtggtggcccccagcagtgatgacatcttcaagctggccgaggccaatgcctgctgggccctggaggacctgcgctgcatggaggaggacaccttcatcagaacagtggagctgctgggcgctgtgcagggcttcagccggccccagctgatgaccctgaaggagaaggccatccaggtgtgggacatgcccagctactggagggagcaccacatcgtgtccctgggccgcatcgccctggccctgaatgaaagtgagctggagcagctggacctgagcagcattgacacagtggccagcctgtcctggcagacagagtggaccccaggccaggccgagagcatcctgcagggctacctggatgattctggctacagcatccaggacctgaagagcttccacctggtgggcctgggcgccaccctgtgtgccatcaacatcacagagatccccctcatcaagatcagcgagttccgggtggtggtggccagaattggcaccctgctgtgcagcacccacgtgctggccgagttcaagaggaaggccgaggtggtgtttggagaccccacagagtggaccagctctgtgctgcaggagctgggcaccatcgctgctggcctgaccaaggccgagctgaggatgctggacaaggacctgatgccctacttccagcccagcgccatcaagtgcctgcctgatgagatcttcaaggagctgtctgctgagcagatcgccagcctgggcccagaaaatgctgctgctgtgacccacgcccagaggcggcggctgagccccctgcagctgcagagcctgcagcaggccctggatggagccaagacccacagctggcaggatgccccagccagcgctggccccaccaggaccagcagcagccgcagccctgctggggccctgcagagctggggcctgtggctgggctgccccctgctggtgctgatggccaagctgctgtggtag

SEQ ID NO: 343228 - DNA, 3420 bp, Artificial Sequence
  derived and/or modified sequence
atgagccaggagcccaccacctacagcctcttcctgttcctgttcctgagccacggcgtgagcagctacacagtgcccaacagccggcaggacctgcaccccctgctgcagaacatggccgaggagatcattgatggcagctacctgaatgccctgctggacctgatccagttccagagcagccacgtgtggacagatgacctgagccaccgggtgctggcctacctgaacagcagaaatgtggccttcaccatccccagcctgcaggccgctgtggagaaccacctggagcagaggctgcaccagccccagaagctgctggaggacctgaggaagacagatgcccagcagttcagaacagccatgaagtgcctgctggaggacaagaaggatggcctggacctgaaggacatcatcatcgacctgggggagatccgggagcgggccctgcagagccctggggtgaacagaagcctcttcctgatcaccctggagcgctgcttccagatgctgaacagcctggagtgtgtggagatcctgggcaaggtgctgcggggcagcagcggcagcttcctgcagcctgacatcacagagcggctgccccgggacctgcgggaggatgccttcaagaacctgtctgctgtgttcaaggacctgtatgacaagaccagcgcccacagccagagggccctgtacagctggatgacaggcatcctgcagaccagcagcaatgccacagatgattctgcctcctgggtgtctgctgagcacctgtgggtgctgggccgctacatggtgcacctgagctttgaggagatcaccaagatcagccccattgaaattggcctcttcatctcctatgacaatgccaccaagcagctggacatggtgtatgacatcaccccagagctggcccaggccttcctggagcgcatcagcagcagcaacttcaacatgaggaacaccagcaccatccaccggctgggcctgctggtgtgcttctacaatgacctggagctgctggatgccaccgtggcccaggtgctgctgtaccagatgatcaagtgcagccacctgcggggcttccaggccggcgtgcagaagctgaaggccgagctgctggacatcgccatggagaaccagaccctgaatgagaccctgggcagcctgagtgatgctgtggtgggcctgacctacagccagctggagagcctgagccctgaggccgtgcatggagccatcagcaccctgaaccaggtgtctggctgggccaagagccaggtgatcatcctgagcgccaagtacctggcccacgagaaggtgctgtccttctacaacgtgtcccagatgggcgccctgctggccggcgtgtccacccaggccttctgcagcatgaagaggaaggacatcagccaggtgctgcggtctgctgtgtcccagtatgtgtctgacctgagccctgcccagcagcagggcatcctgagcaagatggtgcaggccgaggacacagcccctggcatcgtggagatccagggcgccttcttcaaggaggtgtccctgtttgacctgcggcggcagcccggcttcaacagcacagtgctgaaggacaaggagctgggccgcagccaggccctcttcctgtatgagctgctgctgaagaccacccggcggcctgaggagctgctgtctgctggccagctggtgaagggcgtgacctgcagccacattgatgccatgagcacagacttcttcctggcccacttccaggacttccagaacaactttgccctgctgagcccctaccaggtgaactgcctggcctggaagtactgggaggtgtcccggctgtccatgccacccttcctgctggccgccctgcctgcccgctacctggcctctgtgcctgccagccagtgtgtgcccttcctgatcagcctgggcaagtcctggctggacagcctggtgctggacagccacaagaagacctctgtgctgaggaaggtgcagcagtgcctggatgacagcattgctgatgagtacacagtggacatcatgggcaacctgctgtgccacctgcctgctgccatcatcgaccggggcatcagcccccgggcctgggccacagccctgcacggcctgcgggactgcccagacctgaaccctgagcagaaggctgctgtgcggctgaagctgctgggccagtatggcctgccccagcactggacagctgagaccaccaaggacctgggccccttcctggtgctcttctctggagatgagctgagcagcatcgccaccaagtttcctgagatcctgctgcaggccgccagcaagatggcccggaccctgcccaccaaggagttcctgtgggccgtgttccagagcgtgaggaacagcagtgacaagatccccagctatgaccccatgcctggctgccacggcgtggtggcccccagcagtgatgacatcttcaagctggccgaggccaatgcctgctgggccctggaggacctgcgctgcatggaggaggacaccttcatcagaacagtggagctgctgggcgctgtgcagggcttcagccggccccagctgatgaccctgaaggagaaggccatccaggtgtgggacatgcccagctactggagggagcaccacatcgtgtccctgggccgcatcgccctggccctgaatgaaagtgagctggagcagctggacctgagcagcattgacacagtggccagcctgtcctggcagacagagtggaccccaggccaggccgagagcatcctgcagggctacctggatgattctggctacagcatccaggacctgaagagcttccacctggtgggcctgggcgccaccctgtgtgccatcaacatcacagagatccccctcatcaagatcagcgagttccgggtggtggtggccagaattggcaccctgctgtgcagcacccacgtgctggccgagttcaagaggaaggccgaggtggtgtttggagaccccacagagtggaccagctctgtgctgcaggagctgggcaccatcgctgctggcctgaccaaggccgagctgaggatgctggacaaggacctgatgccctacttccagcccagcgccatcaagtgcctgcctgatgagatcttcaaggagctgtctgctgagcagatcgccagcctgggcccagaaaatgctgctgctgtgacccacgcccagaggcggcggctgagccccctgcagctgcagagcctgcagcaggccctggatggagccaagacccacagctggcaggatgccccagccagcgctggccccaccaggaccagcagcagccgcagccctgctggggccctgcagagctggggcctgtggctgggctgccccctgctggtgctgatggccaagctgctgtggtag

SEQ ID NO: 343229 - DNA, 3462 bp, Artificial Sequence
  derived and/or modified sequence
atgagccaggagcccaccacctacagcctgttcctgttcctgttcttatcccacggagtgtcgtcttatacggtgcccaattcacgtcaggatctccatcctcttctgcagaatatggcagaagaaatcattgacggatcgtatctaaatgcacttctggatttaatacagttccagtcctcgcacgtgtggaccgatgacctgtcccatcgggtacttgcatacctgaactctaggaacgtggcctttaccatccccagcctccaggccgcagtggagaatcacctggagcagcggttgcatcaacctcagaagctgctagaagacctgagaaaaacggacgcacagcaatttcggaccgcgatgaagtgccttctggaggacaaaaaagacggtctcgacttaaaggatatcatcatcgaccttggggagattcgcgaaagagcgctgcagtctcctggcgttaatagaagcttgtttcttatcaccctcgaacggtgctttcaaatgctgaattcactggaatgcgtggaaatactgggcaaggttctcagaggcagttctggcagcttcctgcagcctgatatcaccgaaagactgcctagagacctgagggaggatgcatttaaaaacctgagtgctgtgttcaaggacctgtacgataaaacttcagcgcacagtcagcgggccctctattcgtggatgactggtattttacaaacatccagcaacgccacggatgactccgccagttgggtatccgccgagcacctgtgggtcttaggccggtatatggtgcatctcagctttgaagaaatcaccaaaatatccccaatagagataggtctcttcatatcttacgataacgccacaaaacagttagatatggtttatgatatcactccagaactggcccaggcttttctggaaagaatatcctcgtccaatttcaacatgcgcaatacaagcacaatccaccggcaagctcatgagctctgggcgctcgaaccttttccaaagatgttaggactactcgtgtgtttttacaatgacctagaattactggatgccaccgtagcgcaagtgttgctttaccagatgataaaatgttcccacctgagaggcttccaggcgggagtgcagaagctaaaagccgaactactggatatagcaatggagaaccagaccttgaacgaaacacttgggtccctgtccgacgcggttgtaggtctaacctactctcagctggagagcctcagtccagaggccgttcacggagcaatttcaacgttaaaccaggtctcaggctgggctaaatcccaggtgatcatcctgtctgcaaaatacctggcacacgagaaggtgctgagcttctacaacgtgagtcagatgggggccctcctggctggggtatctacacaagcgttctgctctatgaagagaaaggatatctcacaggttttacgtagcgccgtatctcagtacgtcagtgatctgtcccccgcacagcaacagggcattttgtctaagatggtgcaggcggaggacacggcacccggtatcgtggaaatacagggcgccttttttaaagaggtgtctctgtttgacctgcgccgccaacctgggtttaactctacagtgcttaaggataaagagttggggaggagtcaggcactctttctgtatgagttgctgcttaagaccacgcgcagacccgaagaacttctgtccgcaggacaactagtcaagggagtgacatgttctcacattgacgcgatgtctaccgattttttcttagctcactttcaggattttcaaaacaatttcgccctgttgtcgccctatcaggtgaactgccttgcttggaaatactgggaagttagcaggctgagcatgcctcccttcttgctggccgccctgccagcccgatacctggcatcggtccctgctagtcagtgtgtgccattcctgatcagcctgggcaagagctggcttgattcactcgtgctagacagccacaagaaaacgagcgtactaagaaaagtacagcagtgtctggacgattctattgccgatgagtacactgttgacatcatgggaaaccttctgtgtcatctccctgctgccatcatcgatagaggaatctcccctcgggcgtgggccactgccctgcatggacttagggattgtcccgacctgaaccctgagcagaaggctgctgttcggctgaagctgctggggcagtacggtcttccccagcactggaccgcagaaaccaccaaagatttaggcccatttttagtcctgttcagtggcgacgagctctcgagtatcgcaaccaagttcccagagattctgttacaagccgcttccaagatggcaaggacgctgcccaccaaggaattcctatgggcagtgtttcagtctgtacgaaactctagtgacaagattcccagctatgaccctatgcccgggtgccacggggttgtggctcctagctcagatgacatctttaagctggcagaagcaaacgcctgctgggccctggaagatctgcggtgcatggaagaagatactttcatccggacagtcgagctcctcggagccgttcagggattcagtcgacctcagttgatgacactgaaagagaaagctattcaggtttgggatatgccatcctattggcgcgagcatcatattgtgtctctgggtcgtattgcactggcactgaatgagtccgagcttgaacagctggatttgtcctctatcgacaccgtagccagtctctcctggcagactgaatggaccccgggtcaagccgaaagtattctgcagggctacctggacgacagcggctacagcatccaagatctaaagtccttccacctggtgggactgggcgcgaccctgtgcgccattaatataaccgagattccacttatcaagatctcagaattccgggtcgttgttgccaggattggaactctgctatgttctacccacgtgctcgccgagttcaaaaggaaggcagaggttgtctttggagatccaacagagtggacctccagtgtcctccaggaactggggaccatcgctgccggactcaccaaggccgaactgagaatgctggataaggatctgatgccttattttcagcccagcgccatcaagtgtctcccagatgagatattcaaggaactgagcgctgaacagattgcctcactgggccctgagaatgccgccgctgtgactcacgcacagaggagacgcctaagccctcttcagctgcagagccttcagcaggctctagacggcgccaagactcacagctggcaagatgcacccgcgagcgccgggcctacacggacttcttcaagcagatctccagcaggggctttgcaatcatgggggctctggcttggctgccccctgctggtgctgatggcgaagttgctgtggtag

SEQ ID NO: 343230 - DNA, 3420 bp, Artificial Sequence
  derived and/or modified sequence
atgagccaggagcccaccacctacagcctgttcctgttcctgttcctgagtcatggggtgagcagctacaccgtcccaaatagtcgtcaggatctgcacccgctcctccagaatatggctgaggaaataatcgacgggtcttatctcaatgccctcttggaccttattcagtttcaatcttcgcatgtgtggaccgacgacttgtctcatagggtgctagcctatcttaattctcgcaacgtcgcttttaccattcccagtcttcaagccgctgtggagaaccacttagagcagagactccaccagccacagaagctgttagaggatttgcgaaagaccgatgcccaacagttccgcaccgctatgaagtgcctgctcgaggataagaaggacggcctcgatctcaaggatatcattattgacctgggtgaaattcgcgaacgggctctccaatccccaggcgtgaatagatctttatttctgataactttagagcggtgcttccagatgctaaacagtctggagtgcgtcgaaattttgggcaaggtcttgcggggcagcagcgggagcttcctacaacccgacattacagagcgactccctcgcgacctccgcgaggatgcattcaaaaacctgtcagctgtcttcaaggatctgtatgacaagactagcgcccatagtcagcgcgcactgtactcatggatgaccggcatactacagacgagctctaatgccacggatgatagtgcatcttgggtgtccgccgaacatctctgggtgctgggtaggtacatggttcatctttcgttcgaggaaataaccaagatttcccccatcgagatcggcctttttatttcttatgataacgccacgaagcagcttgacatggtatatgatataactcccgagctcgcgcaggccttcctcgaaaggatcagtagttctaatttcaacatgagaaatacgagtaccatacacagattggggttacttgtttgcttctacaatgatttagagctccttgatgccactgtagcccaggtcctcttataccagatgattaagtgctcccatctcagaggctttcaggctggcgtacagaaactcaaagcagagcttcttgacatcgccatggaaaatcagacattgaacgagacacttggttccctgagtgacgcggtggtgggactgacatactcccagctggaatcattgagccccgaggcagtgcatggagccatttctacgctgaaccaggtcagcgggtgggccaaatcccaggtcatcattttgagcgcaaagtaccttgcacacgagaaggtactatctttctataacgtatcacaaatgggggctctactagccggcgtgtccacccaagctttctgctctatgaagcggaaggacatttcgcaagtgctccgaagcgctgtgagccagtacgtcagcgacctctccccagcccagcagcaaggaattttgtcgaagatggttcaggctgaagacaccgcaccaggaattgttgaaattcagggagcttttttcaaggaggtttctctttttgatctaaggagacaaccaggctttaactccactgtattgaaagacaaagagctgggcagaagccaggcgctctttctatatgaacttctgctaaagaccacccgccggcctgaggaactgctgtccgctggtcagctggtcaagggagtgacatgttcccatatagacgcgatgtctaccgactttttcctggcccactttcaagatttccagaacaacttcgcactcctttccccgtaccaggtcaactgtctcgcctggaagtactgggaggtgagccgacttagcatgcccccgttcctgcttgccgctttacccgcacgatacctggccagtgttccggcaagtcagtgcgtccctttcctcatttcactcggcaaatcctggctcgacagcctcgtgctggatagccacaaaaaaactagcgtcctgaggaaagtccagcaatgccttgatgacagtatcgctgacgagtatacggtggacattatgggcaatttgttgtgtcacctgccagctgcaatcatcgatcgcggaatctcgcctagagcctgggccactgcactacacggcctgagggactgtccagacttgaatcccgaacagaaggctgctgttagactcaaacttttagggcagtatggtctgcctcaacactggactgctgagactacgaaagacttaggcccttttttagtgttgttttctggcgacgaactctcatctatcgcaacgaaatttccagaaatcttattgcaagcagcttctaagatggctagaactctacccacaaaggagtttctctgggcagtgtttcagagcgtcaggaattcatcagacaagatacccagttacgatcctatgcctggctgccatggcgtggtggctccctcctcagatgacattttcaagctggcggaggctaatgcgtgctgggcgctcgaagacctcaggtgtatggaggaagacacctttataagaaccgtggagctcctaggcgccgtgcaaggtttcagcaggcctcaactcatgaccctgaaggagaaggctattcaggtgtgggacatgccatcctactggagagagcaccacattgtgtcactcggccggattgcccttgccctgaacgagtctgagcttgagcagttggacctgtccagcatagacactgtagcgtcactgtcctggcagaccgaatggactcctggacaagcagagagcattctccagggctaccttgacgactccgggtattccatccaggacctcaaatcttttcatctggtgggtctcggcgccactctttgcgccatcaacataactgaaattcctttaatcaaaatttctgagtttagggtcgtcgtggccaggatcggcaccctgttgtgttctacacacgtcttggcggaatttaagaggaaggccgaagtggtgtttggcgacccgacagaatggaccagttcagtgctgcaggagctcgggacaatcgctgctggtctaactaaggcagagttgcgaatgttagacaaggaccttatgccatatttccaaccctccgcaattaaatgcctccccgacgagatcttcaaagagctgagcgcagagcagattgcgagcttggggccagagaatgctgcggcagtgactcacgctcagagaagacgcttatctcctttgcagcttcagtctttgcagcaggctctggatggggctaagacccatagctggcaggacgctccggcatcagcaggcccgacccgaactagcagttcacggagtcccgcaggcgccctgcagtcgtgggggctgtggcttggctgtcctctcctggtattgatggccaagctgctgtggtag

SEQ ID NO: 343231 - DNA, 3651 bp, Artificial Sequence
  derived and/or modified sequence
aatgtctcaggaacctacgacatactcccttttcctattcctttttctgagccatggagtgtcgagttatacagtgccaaattccaggcaggatttgcatccattgttgcaaaacatggcggaagaaataatagatggaagctatctgaatgcactgctggatctcatacagtttcaaagctcccacgtgtggacggatgacctgtcccacagagtcctggcctatctgaattcccggaatgttgccttcaccatccccagcctgcaggcagccgtggaaaaccacctggagcagcgtctgcaccagccccagaagctgctggaggacctgaggaagacagacgcccagcagttccgcactgccatgaaatgcctcttagaagacaagaaggacggcttggacctgaaagacatcatcatcgacttaggagagattcgagaacgagccttgcagagccctggcgtgaaccgcagcctgtttctcatcacactggagaggtgtttccagatgctgaactccctggagtgtgtggagatcctgggcaaggtgctgagggggtcctcagggagctttctccagccagacatcacagagcggctccctcgggacctgcgcgaggatgcctttaagaacctatctgcagtgttcaaagatctctacgacaaaacctcggctcattcccagagagctctctattcctggatgactggaatactgcagacatcctccaatgccactgatgactctgcttcatgggtcagtgcggaacacttatgggttttgggcagatacatggttcacctatcgtttgaagaaattacgaaaattagtcctatagaaattgggctgtttatcagctatgacaacgccaccaagcagctggacatggtctatgacatcacacctgagctggcccaggcgtttctggagaggatcagctcctccaactttaacatgaggaatacctccaccatccacaggcaagcgcatgagctctgggccttggagccctttcccaagatgctggggctgctggtttgtttctacaatgacctggaattgctggatgccactgtggctcaagtcctgctttaccagatgatcaagtgcagccacctgaggggcttccaggctggcgtccagaagctcaaagcagaactcctggacattgccatggagaaccagaccctcaatgagaccctgggttctttgtcggatgcagttgtaggtttgacctacagccaactggaatccctctcccccgaggctgtgcacggagccatctccaccctcaaccaggtctcaggttgggccaagagccaggtcatcatcttgtctgccaaatacttggcccatgagaaggtgctgtctttctacaatgtcagccagatgggcgcactgctggctggggtcagcacccaggccttctgcagcatgaaacgcaaggacatctcgcaggtcctgagaagtgccgtctcccagtatgtatccgacttgtcacctgcccagcagcaaggtatcctcagcaagatggtccaagcggaagacactgccccaggcatcgtggagatacaaggggctttctttaaggaagtgtctctctttgatttaaggaggcaacctggattcaactctacagtcctgaaggataaggaacttggaaggagccaggctctgttcctgtatgagcttctgttaaagaccaccagaaggcctgaggagcttttgagtgctgggcagctggtcaaaggcgtgacctgctcacacattgatgccatgagcactgacttctttctggcccatttccaggattttcagaacaacttcgccctgctttcaccctatcaggttaattgtttggcgtggaaatactgggaagtttccagattgtctatgccacctttcctcttggctgcactcccggcccgctacctggcttctgtcccagcctcccagtgtgtgccctttctgatcagcctggggaagagctggttggactccttggttttagattcccacaaaaagacttcagtcctcaggaaagtgcagcagtgcctggacgactccattgctgatgagtacactgtggacatcatggggaacctgctgtgtcacttgccggcagccatcatcgacagggggatctcccccagggcttgggcgactgctctacacggcctcagagactgcccagacctcaaccctgagcaaaaggctgcagtgaggctcaagctcctgggacagtatggactccctcagcactggacagccgagaccacgaaggacttgggaccctttctagtacttttctcaggagatgaattaagctctatagccacaaagtttcctgagatccttctgcaagcagcttccaagatggccaggaccctgcccactaaagaattcctctgggctgtctttcagtctgttcggaacagcagtgataagatccccagctatgaccctatgcctggttgccatggagtcgtggccccctcttctgatgacatcttcaagttggccgaagccaacgcctgctgggccctggaggacctgcggtgcatggaggaagacacattcatcaggaccgtggaactgctgggagctgtccagggtttcagccggcctcagctgatgaccctgaaggagaaagcaatacaggtttgggacatgccatcttactggagagaacaccatatcgtctccctggggcgcattgctctggctcttaatgagagtgagctggagcagctggacctcagctccatagacactgtggcttccctaagctggcaaacagaatggaccccgggacaggctgaatccattttgcaagggtacctggatgattcaggatacagtatccaggacctgaagagctttcatttggtaggacttggtgcaaccctgtgtgctataaacatcactgaaatcccacttataaagatctcagaattcagggtggtagtggccagaattgggaccctgctctgcagcacacatgtcttagccgagtttaagaggaaggctgaagttgtgtttggggatcccactgagtggaccagttctgtcttgcaggagcttgggaccattgcagctggattaactaaggcagagctccggatgcttgacaaggatttgatgccatatttccagccatcagcaataaaatgccttcctgatgagatattcaaagagctgtccgcggagcagatcgcctccctgggtccggagaacgccgcggcggtgacccacgcccagcgccggcggctcagtccactgcagctgcagagcctccagcaggcgctagatggcgccaagactcactcctggcaggacgcgcccgctagcgccggtcccactagaacctcatcctcgcgttctcccgcaggagctctccagtcgtggggtctttggcttggttgtcccctgctggttctaatggccaagctcctgtggtgagtggcctgagcgcatcgtcctgtgttgccccaagcagctggccaacatgtgtagagacaggatgctccagatggtgggacacccttccctggatccagaccctcatctagggcagggaaaccctggggccttgatggtgaaaatgcaccccaaatgaaaaataattattaaaaatgatcttgcaaatt

SEQ ID NO: 343232 - DNA, 3610 bp, Artificial Sequence
  derived and/or modified sequence
aatgtctcaggaacctacgacatactcccttttcctattcctttttctgagccatggagtgtcgagttatacagtgccaaattccaggcaggatttgcatccattgttgcaaaacatggcggaagaaataatagatggaagctatctgaatgcactgctggatctcatacagtttcaaagctcccacgtgtggacggatgacctgtcccacagagtcctggcctatctgaattcccggaatgttgccttcaccatccccagcctgcaggcagccgtggaaaaccacctggagcagcgtctgcaccagccccagaagctgctggaggacctgaggaagacagacgcccagcagttccgcactgccatgaaatgcctcttagaagacaagaaggacggcttggacctgaaagacatcatcatcgacttaggagagattcgagaacgagccttgcagagccctggcgtgaaccgcagcctgtttctcatcacactggagaggtgtttccagatgctgaactccctggagtgtgtggagatcctgggcaaggtgctgagggggtcctcagggagctttctccagccagacatcacagagcggctccctcgggacctgcgcgaggatgcctttaagaacctatctgcagtgttcaaagatctctacgacaaaacctcggctcattcccagagagctctctattcctggatgactggaatactgcagacatcctccaatgccactgatgactctgcttcatgggtcagtgcggaacacttatgggttttgggcagatacatggttcacctatcgtttgaagaaattacgaaaattagtcctatagaaattgggctgtttatcagctatgacaacgccaccaagcagctggacatggtctatgacatcacacctgagctggcccaggcgtttctggagaggatcagctcctccaactttaacatgaggaatacctccaccatccacaggctggggctgctggtttgtttctacaatgacctggaattgctggatgccactgtggctcaagtcctgctttaccagatgatcaagtgcagccacctgaggggcttccaggctggcgtccagaagctcaaagcagaactcctggacattgccatggagaaccagaccctcaatgagaccctgggttctttgtcggatgcagttgtaggtttgacctacagccaactggaatccctctcccccgaggctgtgcacggagccatctccaccctcaaccaggtctcaggttgggccaagagccaggtcatcatcttgtctgccaaatacttggcccatgagaaggtgctgtctttctacaatgtcagccagatgggcgcactgctggctggggtcagcacccaggccttctgcagcatgaaacgcaaggacatctcgcaggtcctgagaagtgccgtctcccagtatgtatccgacttgtcacctgcccagcagcaaggtatcctcagcaagatggtccaagcggaagacactgccccaggcatcgtggagatacaaggggctttctttaaggaagtgtctctctttgatttaaggaggcaacctggattcaactctacagtcctgaaggataaggaacttggaaggagccaggctctgttcctgtatgagcttctgttaaagaccaccagaaggcctgaggagcttttgagtgctgggcagctggtcaaaggcgtgacctgctcacacattgatgccatgagcactgacttctttctggcccatttccaggattttcagaacaacttcgccctgctttcaccctatcaggttaattgtttggcgtggaaatactgggaagtttccagattgtctatgccacctttcctcttggctgcactcccggcccgctacctggcttctgtcccagcctcccagtgtgtgccctttctgatcagcctggggaagagctggttggactccttggttttagattcccacaaaaagacttcagtcctcaggaaagtgcagcagtgcctggacgactccattgctgatgagtacactgtggacatcatggggaacctgctgtgtcacttgccggcagccatcatcgacagggggatctcccccagggcttgggcgactgctctacacggcctcagagactgcccagacctcaaccctgagcaaaaggctgcagtgaggctcaagctcctgggacagtatggactccctcagcactggacagccgagaccacgaaggacttgggaccctttctagtacttttctcaggagatgaattaagctctatagccacaaagtttcctgagatccttctgcaagcagcttccaagatggccaggaccctgcccactaaagaattcctctgggctgtctttcagtctgttcggaacagcagtgataagatccccagctatgaccctatgcctggttgccatggagtcgtggccccctcttctgatgacatcttcaagttggccgaagccaacgcctgctgggccctggaggacctgcggtgcatggaggaagacacattcatcaggaccgtggaactgctgggagctgtccagggtttcagccggcctcagctgatgaccctgaaggagaaagcaatacaggtttgggacatgccatcttactggagagaacaccatatcgtctccctggggcgcattgctctggctcttaatgagagtgagctggagcagctggacctcagctccatagacactgtggcttccctaagctggcaaacagaatggaccccgggacaggctgaatccattttgcaagggtacctggatgattcaggatacagtatccaggacctgaagagctttcatttggtaggacttggtgcaaccctgtgtgctataaacatcactgaaatcccacttataaagatctcagaattcagggtggtagtggccagaattgggaccctgctctgcagcacacatgtcttagccgagtttaagaggaaggctgaagttgtgtttggggatcccactgagtggaccagttctgtcttgcaggagcttgggaccattgcagctggattaactaaggcagagctccggatgcttgacaaggatttgatgccatatttccagccatcagcaataaaatgccttcctgatgagatattcaaagagctgtccgcggagcagatcgcctccctgggtccggagaacgccgcggcggtgacccacgcccagcgccggcggctcagtccactgcagctgcagagcctccagcaggcgctagatggcgccaagactcactcctggcaggacgcgcccgctagcgccggtcccactagaacctcatcctcgcgttctcccgcaggagctctccagtcgtggggtctttggcttggttgtcccctgctggttctaatggccaagctcctgtggtgagtggcctgagcgcatcgtcctgtgttgccccaagcagctggccaacatgtgtagagacaggatgctccagatggtgggacacccttccctggatccagaccctcatctagggcagggaaaccctggggccttgatggtgaaaatgcaccccaaatgaaaaataattattaaaaatgatcttgcaaatta

SEQ ID NO: 343233 - DNA, 3462 bp, Artificial Sequence
  derived and/or modified sequence
atgtctcaagaacctacaacatattcactgtttctgtttttgttcctatcccatggagtgtcgtcctatacggtgccgaactcaagacaagatcttcatcctctattgcagaatatggccgaggagattatcgatggttcataccttaatgcccttctcgacctgatccaattccagtcctcacacgtgtggacagatgacctaagtcatcgcgtgctggcgtatttgaacagcaggaatgtggctttcacaattccgagtcttcaagcggctgtggaaaatcaccttgaacagagactgcatcagccccaaaaactgctggaagacctgaggaaaacggacgcccagcagttccggaccgccatgaaatgtttgctggaggataagaaggacgggctggatcttaaggatatcatcattgacctcggcgaaattagggaacgggcactgcaaagccccggagtgaaccgctccctcttcttaattaccttggaacggtgctttcaaatgttgaactccctggaatgtgtggagatcttgggtaaagtccttagaggctcttctggctcatttcttcagcctgacattacagagcgtctgccgagggatctgcgtgaagatgccttcaaaaacctctctgccgtgttcaaagatctttatgacaagacctctgcccattcacagagggccctttacagctggatgactgggatccttcaaacgagcagtaacgccaccgacgattctgctagctgggtaagtgctgaacatctgtgggtgttgggtaggtacatggtccacctgtcttttgaagagatcacgaagatctctccaattgaaatcggcctcttcatctcttacgataacgccacaaagcagctcgatatggtctacgacataacaccggaactcgctcaagcctttcttgaacgaatttcttcctcaaattttaacatgcgaaatacatctactatccaccggcaagctcatgaactttgggcacttgagccttttcctaagatgcttggactgctggtgtgcttttataacgacctagagttactggatgctaccgttgcccaagtgttactctaccagatgataaagtgtagccatctgagagggtttcaagccggagtccaaaagctgaaggccgaacttcttgacatcgccatggagaatcagactctgaacgagacgctcggatccctttccgacgccgtggtgggcctcacttattcccagctagaaagccttagccctgaagccgtgcatggcgcaatcagcacactgaatcaggtgagcggatgggccaaatcccaagtgataattctctccgcaaaataccttgctcatgagaaggtcctcagcttctacaatgtatctcagatgggcgctttactggctggcgtttcaacacaggctttctgcagcatgaaacggaaagatatatcacaagtcctgcggagtgcagtgtcccagtacgtgtccgatctgtcccccgcacagcaacagggaatactgagcaagatggtgcaggcagaagataccgcccctggcatcgtggagatccagggtgcttttttcaaagaagtctcgctgtttgacctaaggcggcagcccggttttaactccacggtgctgaaggacaaggaattaggacggtcacaggccttgttcttgtatgagctcctgttgaaaaccacgaggcgcccagaggagctgctatcagcgggacagctggtgaagggggttacctgttcgcatatcgatgctatgagtaccgacttctttctggcccactttcaggatttccaaaacaattttgctcttcttagcccctatcaggtcaattgcctcgcctggaagtattgggaagttagccgcctgtcaatgccgccttttctgctagccgctctcccagccaggtatcttgcgagtgttcccgcatcacagtgcgtgcctttcctcatctcactggggaagagttggctggattctctggtcctggattcacacaagaaaacctccgtgttaagaaaggtacaacagtgtttagacgactccattgccgacgagtataccgtcgacataatgggaaatctgctctgtcacctgcctgctgcaattattgacagaggcatctcaccaagggcatgggctaccgccttacacggattacgggattgtcccgatttgaatccggaacagaaggcggcagtgaggctaaaacttctcggccagtacggactcccccaacattggaccgctgagacgaccaaagacctaggcccatttctggtgctattttccggagatgaattgtcaagcatcgcaacgaaattcccagagattctgctgcaagccgctagcaaaatggcgcgtacactgccaaccaaggagtttctgtgggctgtgttccaatccgtacgcaacagcagcgataaaatccccagctacgacccaatgccaggctgtcacggtgtggtggcaccatcctccgacgacatatttaagctcgctgaggcaaacgcttgttgggccctggaggatctacgctgtatggaagaggacacttttattcggaccgtggaacttttaggtgcagtccagggcttctccagaccccaacttatgaccttaaaggaaaaagcgatccaagtctgggatatgccttcctactggagagaacatcacatcgtgagtctcggcagaatagccctggcattgaatgagtcagaacttgagcaactggacttgagctcaattgacacagtcgcctcgctctcttggcaaacagagtggacacctggtcaggcagagtctatcctgcagggatacctcgatgactccggctattccatccaggatctgaagagcttccatctggtgggtttaggggcaaccctgtgcgctatcaacatcacggagattcctctcatcaaaatcagtgaattccgggtggtggtcgcgcgaatcggtaccctcctgtgcagcactcacgttcttgcagagtttaagcggaaggccgaggtggtcttcggcgatccaaccgagtggacttcctcagtactgcaagaactcggaactatcgccgctggcctcacaaaagcggagttgcgcatgctggataaggacctcatgccttattttcagccgagcgccataaaatgcctgcctgacgaaatcttcaaggaactctccgctgaacagatcgcttctctggggcctgaaaatgcagccgctgtgacacatgcccagagaagacggctcagtccactccagctccaatcgctacagcaggctttggatggtgcgaagacgcatagctggcaggatgccccagcctccgcgggtcccactcggacttcgtcttcccgctcccctgccggagcgttgcaatcttggggcctgtggctcggttgccccctgctcgtcctaatggcaaagctactctggtag

SEQ ID NO: 343234 - DNA, 3420 bp, Artificial Sequence
  derived and/or modified sequence
atgtcccaggagcccacgacttatagtctgtttctattcctcttcttgtcccatggagtctcctcctatacagtgccaaacagcaggcaggatctgcaccccctgctccagaatatggccgaggaaatcatcgatggctcctatctcaatgcactgcttgatttgatccagtttcaaagctcccacgtttggaccgatgacctatcccacagagtgttggcctacttgaacagtcgtaatgtggcattcactattccttccctgcaggctgctgtagaaaatcacctcgagcaacggcttcatcagccccagaagctgctcgaggacttgaggaagacggacgcccagcagttccgaaccgcgatgaagtgcttactggaagataagaaggacggccttgatctgaaggatataattatcgacctgggggaaattagagagcgcgctttacagagccccggagtcaaccggtccttgtttctcattaccttggagcgctgtttccagatgttgaattcattggaatgtgtggagattctagggaaggtgctgagaggaagctctgggagctttctccagcctgacatcaccgagcgattgcccagagaccttagagaagatgcattcaagaacctctccgcagttttcaaggacctgtacgacaaaacctctgcccacagccaaagagcattatacagttggatgacagggatcttgcaaacgagctcaaatgcaacagatgactcagctagctgggtgagtgctgaacacttgtgggtcttaggtcgctatatggtgcacctttcatttgaggagattacaaagataagtcccatcgaaataggccttttcatatcctacgacaacgctacaaagcagctggacatggtgtatgacatcaccccagaattagcccaggccttcctggagaggatctcatcctccaacttcaatatgcggaatacaagtactattcataggttagggttgctagtttgtttctataatgacctagagctgctcgacgctactgtggctcaggtgctattataccagatgatcaaatgctcgcacctgcggggatttcaggcaggcgtgcagaagctcaaagctgaactgctagatattgctatggagaaccagacactgaatgagactctgggaagtttgtctgatgccgtggtgggcctaacatacagtcaactggagagccttagtcccgaggctgtgcatggcgctattagtaccctgaatcaggtgtccggatgggccaagagccaggtgatcattttgagtgccaagtacctggcacatgagaaagtcctctcattttacaacgtgagccagatgggggcattgctggctggggtgagcacacaggccttctgctccatgaagaggaaggacatctcccaggtcctgaggtccgcagtaagccaatacgtgtcagatctgagtcccgctcagcagcaaggaatcctgagtaaaatggttcaggcggaagacaccgcgcctgggatagtggaaattcagggagcgttttttaaagaggtctctctgttcgatctgagacggcagcctggatttaattccaccgtcctaaaagacaaagaattggggcgatctcaggcgctgttcctctatgagctcttgctgaaaacgacccgacgcccagaagagttgctttcggcgggtcagctagttaaaggtgttacttgctcccacatagacgccatgagtacagacttcttccttgcccacttccaggatttccaaaacaatttcgccctgctgagcccttatcaggtgaactgcctggcgtggaagtactgggaggtctcccggcttagtatgccacctttcctgctcgccgctcttcccgctagatacttggcctccgtgcctgctagccagtgcgttccgtttctgatctcattgggtaaatcatggctagatagtctcgttcttgatagccacaaaaagacttccgtgttaaggaaggtgcaacagtgcctggatgactcaatcgccgacgaatacacagtagatatcatgggaaatctactgtgtcatctccccgctgctatcatcgatcggggtatatctcctcgggcatgggctactgcattgcacggcctgcgggactgcccagatctgaacccagagcagaaggcagcagtgcgcttaaagctcctgggacaatacggattgccacagcattggacagccgagacgactaaggaccttggcccattcctcgtactgttctccggcgatgaacttagctccatcgccaccaagttccctgagatccttcttcaagcagcgtcaaaaatggctagaactctcccaacaaaggagttcctgtgggccgtttttcagagtgtgaggaattctagcgataagatcccctcttatgatcccatgcccggatgccacggggtggtggcgccttcatccgacgacatctttaaactggcagaagctaatgcttgctgggcactcgaggatcttcggtgcatggaggaggacaccttcatccggaccgtggagctcttgggagcagtccaggggttctcccgaccgcagctaatgactctcaaggagaaagctatccaggtctgggatatgccgagctactggcgcgaacatcacatcgtctcattagggaggatagccctagccctaaacgaatcagagctagagcagctggacctcagttcaattgataccgtggcaagtctgtcctggcagacagaatggacacccggtcaggccgagagtatcctacagggctacctggatgatagcggctacagtatccaggacctgaagtcctttcatctggttggcctgggcgcaactctgtgtgccatcaacataacagagattcccctcatcaaaattagcgagttccgggtggtagtggcgagaatcgggacgcttctgtgcagtacgcacgtccttgcagagttcaaacgtaaggcggaggtcgtgttcggggaccccactgagtggacttcttccgtactccaggaattgggaactatagctgccggactaacaaaggccgaactcaggatgctcgacaaggatctgatgccatacttccagccttccgctattaagtgtttgcctgatgaaatctttaaggagctttctgccgaacagatcgcctctctcggcccagagaacgccgcagccgtaactcacgcccagcgcagaaggctgtcccctttgcagctccagtctttgcaacaggccctcgatggagctaagactcattcttggcaagatgccccagcctcagcagggcctacaagaacgtcctctagcaggagccctgcaggcgctctgcagtcttggggcctttggcttgggtgccctctgctggtgttgatggccaagctactgtggtag

SEQ ID NO: 343235 - DNA, 3462 bp, Artificial Sequence
  derived and/or modified sequence
atgagccaggagcccaccacctacagcctgttcctgttcctgttcctgagccacggcgtgagcagctacaccgtgcccaacagcagacaggacctgcaccccctgctgcagaacatggccgaggagatcatcgacggcagctacctgaacgccctgctggacctgatccagttccagagcagccacgtgtggaccgacgacctgagccacagagtgctggcctacctgaacagcagaaacgtggccttcaccatccccagcctgcaggccgccgtggagaaccacctggagcagagactgcaccagccccagaagctgctggaggacctgagaaagaccgacgcccagcagttcagaaccgccatgaagtgcctgctggaggacaagaaggacggcctggacctgaaggacatcatcatcgacctgggcgagatcagagagagagccctgcagagccccggcgtgaacagaagcctgttcctgatcaccctggagagatgcttccagatgctgaacagcctggagtgcgtggagatcctgggcaaggtgctgagaggcagcagcggcagcttcctgcagcccgacatcaccgagagactgcccagagacctgagagaggacgccttcaagaacctgagcgccgtgttcaaggacctgtacgacaagaccagcgcccacagccagagagccctgtacagctggatgaccggcatcctgcagaccagcagcaacgccaccgacgacagcgccagctgggtgagcgccgagcacctgtgggtgctgggcagatacatggtgcacctgagcttcgaggagatcaccaagatcagccccatcgagatcggcctgttcatcagctacgacaacgccaccaagcagctggacatggtgtacgacatcacccccgagctggcccaggccttcctggagagaatcagcagcagcaacttcaacatgagaaacaccagcaccatccacagacaggcccacgagctgtgggccctggagcccttccccaagatgctgggcctgctggtgtgcttctacaacgacctggagctgctggacgccaccgtggcccaggtgctgctgtaccagatgatcaagtgcagccacctgagaggcttccaggccggcgtgcagaagctgaaggccgagctgctggacatcgccatggagaaccagaccctgaacgagaccctgggcagcctgagcgacgccgtggtgggcctgacctacagccagctggagagcctgagccccgaggccgtgcacggcgccatcagcaccctgaaccaggtgagcggctgggccaagagccaggtgatcatcctgagcgccaagtacctggcccacgagaaggtgctgagcttctacaacgtgagccagatgggcgccctgctggccggcgtgagcacccaggccttctgcagcatgaagagaaaggacatcagccaggtgctgagaagcgccgtgagccagtacgtgagcgacctgagccccgcccagcagcagggcatcctgagcaagatggtgcaggccgaggacaccgcccccggcatcgtggagatccagggcgccttcttcaaggaggtgagcctgttcgacctgagaagacagcccggcttcaacagcaccgtgctgaaggacaaggagctgggcagaagccaggccctgttcctgtacgagctgctgctgaagaccaccagaagacccgaggagctgctgagcgccggccagctggtgaagggcgtgacctgcagccacatcgacgccatgagcaccgacttcttcctggcccacttccaggacttccagaacaacttcgccctgctgagcccctaccaggtgaactgcctggcctggaagtactgggaggtgagcagactgagcatgccccccttcctgctggccgccctgcccgccagatacctggccagcgtgcccgccagccagtgcgtgcccttcctgatcagcctgggcaagagctggctggacagcctggtgctggacagccacaagaagaccagcgtgctgagaaaggtgcagcagtgcctggacgacagcatcgccgacgagtacaccgtggacatcatgggcaacctgctgtgccacctgcccgccgccatcatcgacagaggcatcagccccagagcctgggccaccgccctgcacggcctgagagactgccccgacctgaaccccgagcagaaggccgccgtgagactgaagctgctgggccagtacggcctgccccagcactggaccgccgagaccaccaaggacctgggccccttcctggtgctgttcagcggcgacgagctgagcagcatcgccaccaagttccccgagatcctgctgcaggccgccagcaagatggccagaaccctgcccaccaaggagttcctgtgggccgtgttccagagcgtgagaaacagcagcgacaagatccccagctacgaccccatgcccggctgccacggcgtggtggcccccagcagcgacgacatcttcaagctggccgaggccaacgcctgctgggccctggaggacctgagatgcatggaggaggacaccttcatcagaaccgtggagctgctgggcgccgtgcagggcttcagcagaccccagctgatgaccctgaaggagaaggccatccaggtgtgggacatgcccagctactggagagagcaccacatcgtgagcctgggcagaatcgccctggccctgaacgagagcgagctggagcagctggacctgagcagcatcgacaccgtggccagcctgagctggcagaccgagtggacccccggccaggccgagagcatcctgcagggctacctggacgacagcggctacagcatccaggacctgaagagcttccacctggtgggcctgggcgccaccctgtgcgccatcaacatcaccgagatccccctgatcaagatcagcgagttcagagtggtggtggccagaatcggcaccctgctgtgcagcacccacgtgctggccgagttcaagagaaaggccgaggtggtgttcggcgaccccaccgagtggaccagcagcgtgctgcaggagctgggcaccatcgccgccggcctgaccaaggccgagctgagaatgctggacaaggacctgatgccctacttccagcccagcgccatcaagtgcctgcccgacgagatcttcaaggagctgagcgccgagcagatcgccagcctgggccccgagaacgccgccgccgtgacccacgcccagagaagaagactgagccccctgcagctgcagagcctgcagcaggccctggacggcgccaagacccacagctggcaggacgcccccgccagcgccggccccaccagaaccagcagcagcagaagccccgccggcgccctgcagagctggggcctgtggctgggctgccccctgctggtgctgatggccaagctgctgtggtag

SEQ ID NO: 343236 - DNA, 3420 bp, Artificial Sequence
  derived and/or modified sequence
atgagccaggagcccaccacctacagcctgttcctgttcctgttcctgagccacggcgtgagcagctacaccgtgcccaacagcagacaggacctgcaccccctgctgcagaacatggccgaggagatcatcgacggcagctacctgaacgccctgctggacctgatccagttccagagcagccacgtgtggaccgacgacctgagccacagagtgctggcctacctgaacagcagaaacgtggccttcaccatccccagcctgcaggccgccgtggagaaccacctggagcagagactgcaccagccccagaagctgctggaggacctgagaaagaccgacgcccagcagttcagaaccgccatgaagtgcctgctggaggacaagaaggacggcctggacctgaaggacatcatcatcgacctgggcgagatcagagagagagccctgcagagccccggcgtgaacagaagcctgttcctgatcaccctggagagatgcttccagatgctgaacagcctggagtgcgtggagatcctgggcaaggtgctgagaggcagcagcggcagcttcctgcagcccgacatcaccgagagactgcccagagacctgagagaggacgccttcaagaacctgagcgccgtgttcaaggacctgtacgacaagaccagcgcccacagccagagagccctgtacagctggatgaccggcatcctgcagaccagcagcaacgccaccgacgacagcgccagctgggtgagcgccgagcacctgtgggtgctgggcagatacatggtgcacctgagcttcgaggagatcaccaagatcagccccatcgagatcggcctgttcatcagctacgacaacgccaccaagcagctggacatggtgtacgacatcacccccgagctggcccaggccttcctggagagaatcagcagcagcaacttcaacatgagaaacaccagcaccatccacagactgggcctgctggtgtgcttctacaacgacctggagctgctggacgccaccgtggcccaggtgctgctgtaccagatgatcaagtgcagccacctgagaggcttccaggccggcgtgcagaagctgaaggccgagctgctggacatcgccatggagaaccagaccctgaacgagaccctgggcagcctgagcgacgccgtggtgggcctgacctacagccagctggagagcctgagccccgaggccgtgcacggcgccatcagcaccctgaaccaggtgagcggctgggccaagagccaggtgatcatcctgagcgccaagtacctggcccacgagaaggtgctgagcttctacaacgtgagccagatgggcgccctgctggccggcgtgagcacccaggccttctgcagcatgaagagaaaggacatcagccaggtgctgagaagcgccgtgagccagtacgtgagcgacctgagccccgcccagcagcagggcatcctgagcaagatggtgcaggccgaggacaccgcccccggcatcgtggagatccagggcgccttcttcaaggaggtgagcctgttcgacctgagaagacagcccggcttcaacagcaccgtgctgaaggacaaggagctgggcagaagccaggccctgttcctgtacgagctgctgctgaagaccaccagaagacccgaggagctgctgagcgccggccagctggtgaagggcgtgacctgcagccacatcgacgccatgagcaccgacttcttcctggcccacttccaggacttccagaacaacttcgccctgctgagcccctaccaggtgaactgcctggcctggaagtactgggaggtgagcagactgagcatgccccccttcctgctggccgccctgcccgccagatacctggccagcgtgcccgccagccagtgcgtgcccttcctgatcagcctgggcaagagctggctggacagcctggtgctggacagccacaagaagaccagcgtgctgagaaaggtgcagcagtgcctggacgacagcatcgccgacgagtacaccgtggacatcatgggcaacctgctgtgccacctgcccgccgccatcatcgacagaggcatcagccccagagcctgggccaccgccctgcacggcctgagagactgccccgacctgaaccccgagcagaaggccgccgtgagactgaagctgctgggccagtacggcctgccccagcactggaccgccgagaccaccaaggacctgggccccttcctggtgctgttcagcggcgacgagctgagcagcatcgccaccaagttccccgagatcctgctgcaggccgccagcaagatggccagaaccctgcccaccaaggagttcctgtgggccgtgttccagagcgtgagaaacagcagcgacaagatccccagctacgaccccatgcccggctgccacggcgtggtggcccccagcagcgacgacatcttcaagctggccgaggccaacgcctgctgggccctggaggacctgagatgcatggaggaggacaccttcatcagaaccgtggagctgctgggcgccgtgcagggcttcagcagaccccagctgatgaccctgaaggagaaggccatccaggtgtgggacatgcccagctactggagagagcaccacatcgtgagcctgggcagaatcgccctggccctgaacgagagcgagctggagcagctggacctgagcagcatcgacaccgtggccagcctgagctggcagaccgagtggacccccggccaggccgagagcatcctgcagggctacctggacgacagcggctacagcatccaggacctgaagagcttccacctggtgggcctgggcgccaccctgtgcgccatcaacatcaccgagatccccctgatcaagatcagcgagttcagagtggtggtggccagaatcggcaccctgctgtgcagcacccacgtgctggccgagttcaagagaaaggccgaggtggtgttcggcgaccccaccgagtggaccagcagcgtgctgcaggagctgggcaccatcgccgccggcctgaccaaggccgagctgagaatgctggacaaggacctgatgccctacttccagcccagcgccatcaagtgcctgcccgacgagatcttcaaggagctgagcgccgagcagatcgccagcctgggccccgagaacgccgccgccgtgacccacgcccagagaagaagactgagccccctgcagctgcagagcctgcagcaggccctggacggcgccaagacccacagctggcaggacgcccccgccagcgccggccccaccagaaccagcagcagcagaagccccgccggcgccctgcagagctggggcctgtggctgggctgccccctgctggtgctgatggccaagctgctgtggtag

SEQ ID NO: 343237 - DNA, 1647 bp, Artificial Sequence
  derived and/or modified sequence
ccccgagcggtgtgggtggaggcacgagggggcgcccagcaccccacaatgagaagaaccgctcctctacataggggtacttggtctaagatgtctatcattctcagagcccggtatctggcgagtgtgcccgcttctcaatgtgtcccctttttaatcagccttggcaaatcttggttggacagtttagtgttggatagtcataaaaaaacctctgtgctccgaaaggtgcagcagtgtctggatgattctattgccgacgagtacaccgtcgatatcatggggaacctgctttgtcatctacctgcagctattatcgatcgaggtatatccccaagggcttgggcaacagccctgcatggactgagggactgtccagatcttaatcctgaacaaaaagccgctgtgagattgaaactgctgggtcagtacggtctcccccagcactggaccgccgaaacgacaaaagaccttggtcccttcctggtcttatttagcggcgatgaactttcatctatagctacaaagttcccggaaatcctgctgcaggctgcttctaagatggcaaggacattaccaacgaaggaatttctctgggctgtgttccagtccgtgcgtaactcctcagacaaaatcccgagctacgaccccatgcccggttgtcacggcgtggtggcgcccagtagcgatgatatcttcaagttagcagaagctaatgcatgttgggctctggaggacctcagatgtatggaggaggacacctttatcagaacagtggagttgctgggcgcggtgcagggctttagtcgacctcagctcatgacacttaaagagaaggccatccaggtttgggacatgccatcctattggcgggaacatcatatcgtatcattgggtcgaatcgctttggcgctgaacgaatctgagttagaacagctagacctgagtagcattgacacagtagcctctttgagttggcagactgagtggacccccggacaagctgagtctattctgcagggctatctagatgatagcggctatagcatccaggacctcaaatcattccaccttgtaggactgggcgcgactctgtgtgcaataaatattaccgagattcctcttattaagattagcgaattccgtgttgtggtggcaagaatcggcaccctcctgtgttccacccatgtgctggcggaattcaagaggaaggccgaagtggtctttggtgaccccacggagtggacctcaagcgtgctccaggagctgggaacaatagctgcagggttgacgaaagcagagctgcggatgctggacaaggatttgatgccttacttccaaccgtcggccattaaatgcctaccagatgaaatctttaaggaactgagcgcagaacagatagcatccctgggccccgaaaacgcggccgcagtcacacacgcccaaaggagacgattaagtcctctccagttgcagtccctacagcaagctcttgatggcgcaaagacccacagttggcaggatgcccccgcttcagccggtccaacccgtacatcatcttctcgcagccctgccggcgcgctgcaaagttggggcctgtggctgggatgtcccctgttggtccttatggcaaaactgctttggtag

SEQ ID NO: 343238 - DNA, 1647 bp, Artificial Sequence
  derived and/or modified sequence
cccagggctgtgtgggtggaggcccggggcggggcccagcaccccaccatgagaagaacagcccccctgcaccggggcacctggagcaagatgagcatcatcctgcgggcccgctacctggcctctgtgcctgccagccagtgtgtgcccttcctgatcagcctgggcaagtcctggctggacagcctggtgctggacagccacaagaagacctctgtgctgaggaaggtgcagcagtgcctggatgacagcattgctgatgagtacacagtggacatcatgggcaacctgctgtgccacctgcctgctgccatcatcgaccggggcatcagcccccgggcctgggccacagccctgcacggcctgcgggactgcccagacctgaaccctgagcagaaggctgctgtgcggctgaagctgctgggccagtatggcctgccccagcactggacagctgagaccaccaaggacctgggccccttcctggtgctcttctctggagatgagctgagcagcatcgccaccaagtttcctgagatcctgctgcaggccgccagcaagatggcccggaccctgcccaccaaggagttcctgtgggccgtgttccagagcgtgaggaacagcagtgacaagatccccagctatgaccccatgcctggctgccacggcgtggtggcccccagcagtgatgacatcttcaagctggccgaggccaatgcctgctgggccctggaggacctgcgctgcatggaggaggacaccttcatcagaacagtggagctgctgggcgctgtgcagggcttcagccggccccagctgatgaccctgaaggagaaggccatccaggtgtgggacatgcccagctactggagggagcaccacatcgtgtccctgggcagaattgccctggccctgaatgaaagtgagctggagcagctggacctgagcagcattgacacagtggccagcctgtcctggcagacagagtggaccccaggccaggccgagagcatcctgcagggctacctggatgacagcggctacagcatccaggacctgaagagcttccacctggtgggcctgggcgccaccctgtgtgccatcaacatcacagagatccccctcatcaagatcagcgagttccgggtggtggtggcccgcatcggcaccctgctgtgcagcacccacgtgctggccgagttcaagaggaaggccgaggtggtgtttggagaccccacagagtggaccagctctgtgctgcaggagctgggcaccatcgccgccggcctgaccaaggccgagctgaggatgctggacaaggacctgatgccctacttccagcccagcgccatcaagtgcctgcctgatgagatcttcaaggagctgtctgctgagcagatcgccagcctgggcccagaaaatgctgctgctgtgacccacgcccagaggcggcggctgagccccctgcagctgcagagcctgcagcaggccctggatggagccaagacccacagctggcaggatgccccagccagcgctggccccaccaggaccagcagcagccgcagccctgctggggccctgcagagctggggcctgtggctgggctgccccctgctggtgctgatggccaagctgctgtggtag

SEQ ID NO: 343239 - DNA, 1647 bp, Artificial Sequence
  derived and/or modified sequence
ccccgggccgtgtgggtggaggcccggggcggcgcccagcaccccacaatgagacgaactgctccactgcaccgaggcacctggtctaaaatgtccatcatactcagagccaggtacttagcatccgtgccggccagccagtgtgtcccctttctgatctccctcggcaagagttggctggacagtctggtgctggatagccacaagaagacctccgtactgcgcaaggtacagcagtgcttagatgacagcatagctgacgaatacactgttgatatcatgggcaatctgctgtgccatcttcccgcagcaatcattgataggggaattagtcctagagcatgggccaccgcactacatggcctgagagactgcccagatctgaacccagagcagaaagcggcagtgcgtcttaaactcctcggccagtacggtctcccacagcactggaccgctgagaccacaaaagaccttggtccttttctcgtactcttcagcggagatgagctgagctctatcgctaccaagttcccggagattctgttgcaggctgcctctaaaatggcccggacattgcccactaaggagttcctgtgggcggtgtttcagtccgtccgaaacagcagtgacaagattccgtcctatgatcccatgccgggctgccacggggtcgtcgccccctcttcagatgatatcttcaaactggccgaagctaacgcctgctgggccctggaggatctccggtgtatggaggaggatacattcattcgaacagtcgagctgcttggcgccgtgcaggggttttcacgcccacagctgatgacgctgaaggaaaaggctatacaagtgtgggacatgccttcatattggagggagcatcatatcgtctctttgggccgcatcgcgctggcccttaatgaatccgaactggaacagttagatctctccagcatcgatacagtggccagcctaagttggcagaccgaatggactccagggcaggcagaatcaatcctgcagggttacctggacgacagcggctatagcattcaggaccttaagagctttcacctggttggcctcggggccactctgtgcgcaatcaatatcaccgaaatccctcttattaaaatttctgaattccgcgttgtagtggccaggattgggaccctcctgtgtagtacccacgtcctggccgaatttaaacggaaggccgaggtcgtgttcggcgatcccacagaatggacctcatcagtccttcaagaacttggtaccatagccgccgggctcacaaaggcagagctccgaatgcttgacaaggatctgatgccttactttcagcctagtgctatcaaatgtctgccagatgagatttttaaggagctgagcgcagagcagatcgctagtttaggtcccgaaaacgctgcggcagtgacccatgcccagaggcgaagacttagcccactccaattgcagtccctccaacaggccctggatggagccaaaacacattcctggcaggacgcccccgcctcagcgggacctacccggacctcaagttcgcggtctcccgcaggggccctccagagctgggggctctggctggggtgtccgcttctggttttgatggcaaaactcctttggtag

SEQ ID NO: 343240 - DNA, 1835 bp, Artificial Sequence
  derived and/or modified sequence
cccagagcagtttgggtagaggccaggggtggagctcaacatcctacaatgcgtaggacagcaccactacacagaggtacctggtcgaaaatgtcaataatactgagggcccgctacctggcttctgtcccagcctcccagtgtgtgccctttctgatcagcctggggaagagctggttggactccttggttttagattcccacaaaaagacttcagtcctcaggaaagtgcagcagtgcctggacgactccattgctgatgagtacactgtggacatcatggggaacctgctgtgtcacttgccggcagccatcatcgacagggggatctcccccagggcttgggcgactgctctacacggcctcagagactgcccagacctcaaccctgagcaaaaggctgcagtgaggctcaagctcctgggacagtatggactccctcagcactggacagccgagaccacgaaggacttgggaccctttctagtacttttctcaggagatgaattaagctctatagccacaaagtttcctgagatccttctgcaagcagcttccaagatggccaggaccctgcccactaaagaattcctctgggctgtctttcagtctgttcggaacagcagtgataagatccccagctatgaccctatgcctggttgccatggagtcgtggccccctcttctgatgacatcttcaagttggccgaagccaacgcctgctgggccctggaggacctgcggtgcatggaggaagacacattcatcaggaccgtggaactgctgggagctgtccagggtttcagccggcctcagctgatgaccctgaaggagaaagcaatacaggtttgggacatgccatcttactggagagaacaccatatcgtctccctggggcgcattgctctggctcttaatgagagtgagctggagcagctggacctcagctccatagacactgtggcttccctaagctggcaaacagaatggaccccgggacaggctgaatccattttgcaagggtacctggatgattcaggatacagtatccaggacctgaagagctttcatttggtaggacttggtgcaaccctgtgtgctataaacatcactgaaatcccacttataaagatctcagaattcagggtggtagtggccagaattgggaccctgctctgcagcacacatgtcttagccgagtttaagaggaaggctgaagttgtgtttggggatcccactgagtggaccagttctgtcttgcaggagcttgggaccattgcagctggattaactaaggcagagctccggatgcttgacaaggatttgatgccatatttccagccatcagcaataaaatgccttcctgatgagatattcaaagagctgtccgcggagcagatcgcctccctgggtccggagaacgccgcggcggtgacccacgcccagcgccggcggctcagtccactgcagctgcagagcctccagcaggcgctagatggcgccaagactcactcctggcaggacgcgcccgctagcgccggtcccactagaacctcatcctcgcgttctcccgcaggagctctccagtcgtggggtctttggcttggttgtcccctgctggttctaatggccaagctcctgtggtgagtggcctgagcgcatcgtcctgtgttgccccaagcagctggccaacatgtgtagagacaggatgctccagatggtgggacacccttccctggatccagaccctcatctagggcagggaaaccctggggccttgatggtgaaaatgcaccccaaatgaaaaataattattaaaaatgatcttgcaaatt

SEQ ID NO: 343241 - DNA, 1647 bp, Artificial Sequence
  derived and/or modified sequence
cctcgggctgtgtgggtggaggcacggggtggagcccagcaccccacgatgcgccgaacagctccactgcaccggggtacatggtcaaaaatgtcgatcattttgagggctcggtacctcgcaagcgtgccagcctcccaatgcgtaccattcctgatatccctggggaagagttggttggattctctggttctggactctcataagaagacgtcagtcttacggaaggtgcagcagtgtctcgatgactcaatcgccgacgagtacacagtcgacatcatggggaatctgctgtgccacctgccagctgccatcatcgatcgcggtattagccccagggcgtgggctacggccctgcacggcttgcgggactgtccggatctgaatccagaacagaaggccgctgtgaggctgaagctgctcggacaatacggtctgccacagcactggaccgccgaaaccactaaggatctaggcccattccttgtgctctttagcggagatgaactgagtagcatcgccaccaagtttcccgagattctactgcaggccgcatccaagatggccagaacccttccaacaaaagaatttctttgggcagtgtttcagagtgttcgcaattcaagtgataagatcccatcctacgaccccatgccaggttgtcatggggtcgtggctccaagctcagacgatatcttcaaactcgctgaggccaatgcgtgctgggctctggaagacctacgctgtatggaagaagatacttttatccgaactgttgaacttctcggtgctgtccagggattctctcgtcctcagttgatgacactcaaagagaaagcaatccaagtgtgggatatgccaagctactggcgtgaacaccacatcgtgagtctgggacggattgcactcgccctgaatgaaagcgaattagaacagctggacctctcgagcattgacaccgttgccagcttaagttggcagaccgagtggacaccgggacaggcagagagcatccttcagggatatctcgacgactctggatactcaatccaggatttaaaatccttccacctggtggggctgggtgctactctctgcgcaattaacatcaccgaaattccacttatcaaaatttcagagtttagggtcgtggttgccagaatcgggacccttctatgctcgacgcatgttctcgccgagttcaaaagaaaggctgaagtggtctttggcgaccctaccgagtggaccagcagtgtgctgcaagagctcggaacaattgccgctgggttgaccaaagccgagttacgaatgttggataaagacttgatgccgtattttcagccctccgcaataaaatgtctgccagatgaaatctttaaagagctgagcgcagagcagatcgccagtctcggcccagagaacgcagctgccgtgacccacgctcagcggaggcggctttccccgctccaacttcagagtctccagcaggcactcgatggagctaaaacgcattcttggcaagatgctcctgcctctgcaggaccaacccggacctccagctctcgaagtccagccggagcccttcagagctggggactctggctgggttgccccctcttggtgctgatggcaaagctgctgtggtag

SEQ ID NO: 343242 - DNA, 1647 bp, Artificial Sequence
  derived and/or modified sequence
cccagagccgtgtgggtggaggccagaggcggcgcccagcaccccaccatgagaagaaccgcccccctgcacagaggcacctggagcaagatgagcatcatcctgagagccagatacctggccagcgtgcccgccagccagtgcgtgcccttcctgatcagcctgggcaagagctggctggacagcctggtgctggacagccacaagaagaccagcgtgctgagaaaggtgcagcagtgcctggacgacagcatcgccgacgagtacaccgtggacatcatgggcaacctgctgtgccacctgcccgccgccatcatcgacagaggcatcagccccagagcctgggccaccgccctgcacggcctgagagactgccccgacctgaaccccgagcagaaggccgccgtgagactgaagctgctgggccagtacggcctgccccagcactggaccgccgagaccaccaaggacctgggccccttcctggtgctgttcagcggcgacgagctgagcagcatcgccaccaagttccccgagatcctgctgcaggccgccagcaagatggccagaaccctgcccaccaaggagttcctgtgggccgtgttccagagcgtgagaaacagcagcgacaagatccccagctacgaccccatgcccggctgccacggcgtggtggcccccagcagcgacgacatcttcaagctggccgaggccaacgcctgctgggccctggaggacctgagatgcatggaggaggacaccttcatcagaaccgtggagctgctgggcgccgtgcagggcttcagcagaccccagctgatgaccctgaaggagaaggccatccaggtgtgggacatgcccagctactggagagagcaccacatcgtgagcctgggcagaatcgccctggccctgaacgagagcgagctggagcagctggacctgagcagcatcgacaccgtggccagcctgagctggcagaccgagtggacccccggccaggccgagagcatcctgcagggctacctggacgacagcggctacagcatccaggacctgaagagcttccacctggtgggcctgggcgccaccctgtgcgccatcaacatcaccgagatccccctgatcaagatcagcgagttcagagtggtggtggccagaatcggcaccctgctgtgcagcacccacgtgctggccgagttcaagagaaaggccgaggtggtgttcggcgaccccaccgagtggaccagcagcgtgctgcaggagctgggcaccatcgccgccggcctgaccaaggccgagctgagaatgctggacaaggacctgatgccctacttccagcccagcgccatcaagtgcctgcccgacgagatcttcaaggagctgagcgccgagcagatcgccagcctgggccccgagaacgccgccgccgtgacccacgcccagagaagaagactgagccccctgcagctgcagagcctgcagcaggccctggacggcgccaagacccacagctggcaggacgcccccgccagcgccggccccaccagaaccagcagcagcagaagccccgccggcgccctgcagagctggggcctgtggctgggctgccccctgctggtgctgatggccaagctgctgtggtag

SEQ ID NO: 343243 - protein, 194 aa, Artificial Sequence
  derived and/or modified sequence
MCLELFHSSNVIDGLKLNAFAAVFTVLSGLLGMVAHMMYTQVFQVTVSLGPEDWRPHSWDYGWSFCLAWGSFTCCMAASVTTLNSYTKTVIEFRHKRKVFEQGYREEPTFIDPEAIKYFRERWQIEAQRGRATCPRSHSWMEKRDGSEEDFHLDCRHERYPARHQPHMADSWPRSSAQEAPELNRQCWVLGHWV

SEQ ID NO: 343244 - DNA, 585 bp, Artificial Sequence
  derived and/or modified sequence
atgtgcctggagctgttccacagcagcaacgtgatcgacggcctgaagctgaacgccttcgccgccgtgttcaccgtgctgagcggcctgctgggcatggtggcccacatgatgtacacccaggtgttccaggtgaccgtgagcctgggccccgaggactggagaccccacagctgggactacggctggagcttctgcctggcctggggcagcttcacctgctgcatggccgccagcgtgaccaccctgaacagctacaccaagaccgtgatcgagttcagacacaagagaaaggtgttcgagcagggctacagagaggagcccaccttcatcgaccccgaggccatcaagtacttcagagagagatggcagatcgaggcccagagaggcagagccacctgccccagaagccacagctggatggagaagagagacggcagcgaggaggacttccacctggactgcagacacgagagataccccgccagacaccagccccacatggccgacagctggcccagaagcagcgcccaggaggcccccgagctgaacagacagtgctgggtgctgggccactgggtgtag

SEQ ID NO: 343245 - DNA, 585 bp, Artificial Sequence
  derived and/or modified sequence
atgtgtctcgaactgtttcattcctccaacgtgattgatgggttgaagctaaatgctttcgccgccgttttcactgtcttaagtggactgctgggcatggtagcccatatgatgtatacacaagtatttcaggttactgtgtcccttggccctgaggattggaggccacactcctgggattatggatggtccttctgcttggcttggggaagcttcacatgctgcatggccgccagcgtcacgactctgaattcatatacaaaaaccgtcattgagtttcggcataagcgcaaggtgtttgaacaaggataccgagaggaaccgacctttattgatccagaagccattaaatacttcagggagaggtggcagattgaggcccagagaggacgggctacttgtccacggagccattcctggatggagaagcgagacggatcagaggaggatttccatctggactgccgacacgaacggtacccagccaggcatcagcctcacatggcagactcatggccccgcagtagcgctcaggaggctccggagctgaaccgccagtgttgggtactgggccattgggtgtag

SEQ ID NO: 343246 - DNA, 4976 bp, Artificial Sequence
  derived and/or modified sequence
gcggccgctgacgcggggcgccagctgccaacttcgcgcgcggagctccccggcggtgcagtcccgtcccggcggcgcgggcggcatgaagactagccgccgcggccgagcgctcctggccgtggccctgaacctgctggcgctgctgttcgccaccaccgctttcctcaccacgcactggtgccagggcacgcagcgggtccccaagccgggctgcggccagggcgggcgcgccaactgccccaactcgggcgccaacgccacggccaacggcaccgccgcccccgccgccgccgccgccgccgccaccgcctcggggaacggcccccctggcggcgcgctctacagctgggagaccggcgacgaccgcttcctcttcaggaatttccacaccggcatctggtactcgtgcgaggaggagctcagcgggcttggtgaaaaatgtcgcagcttcattgacctggccccggcatcggagaaaggggtcctgtggctgtctgtggtctccgaggtgctgtacattctgctgctggtggttggcttcagcctcatgtgtctcgagctcttccactccagcaatgtcatcgacgggctcaagctcaatgccttcgcggctgtcttcacggtgctctcaggcctcctgggaatggtcgcccacatgatgtacacgcaggtgttccaggtcaccgtgagcctcggtcctgaggactggagaccccattcctgggactacgggtggtccttctgcctggcgtggggctcctttacctgctgcatggcagcctctgtcaccacgctcaactcctacaccaagacggtcattgagttccggcacaagcgcaaggtctttgagcagggctaccgggaagagccgaccttcatagaccctgaggccatcaagtacttccgggagaggtggcaaatcgaggcacagagagggagggcgacttgccccaggtcacacagctggatggagaagagggacgggagcgaggaggactttcacttagactgccgccacgagagataccctgcccgacaccagccacacatggcggattcctggccccggagctccgcacaggaagcaccagagctgaaccgacagtgctgggtcttggggcactgggtgtgaccaagacctcaacctggcccgcggacctcaggccatcgctggcaccagcccctgctgcaagaccaccagagtggtgcccccagaaccctggcctgtgtgccgtgaactcagtcagcctgcgtgggagatgccaggcctgtcctgcccatcgctgcctgggtcccatggccttggaaatggggccagggcaggcccaagggaatgcacagggctgcacagagtgactttgggacagcagccccggactcttgccatcatcacatgagccctgctgggcacagctgcgatgccaggagacacatggccactggccactgaatggctggcacccacaagccagtcaggtgcccagaggggcagagccctttggggggcagagagtggcttcctgaaggagggggcagtggcgcaggcactgcaggggtgtcacacagcaggcacacagcaggggctcaataaatgcttgttgaacttgttttcttgcggtgtatggaggccagttgctctgtgggctgtggctgccctgtcattgccccaccccattactcctcaaggaggctgaaggtgacagcagagactgtgcagaggccagggccagacactgcagggtggcagggagggagcacagagcccaggctggacacaggctggcagggctgccttgtattccagagagtgggcaaggcaggggccaggcaagcaagagatgtggggcgagcaagaagtgggcccccaaacccaagccctaagcagggagggtgaagaagccacatttctcttcagagctcagcaacatcacaccaccctgaccctgaggaggctttaccctgtgcctagcaccacctttacagaaaatcccagggcttagatgcctggagaaacagattcttattataaagaggaggaaaattagggtcacagagatgaatgaagtaacttgcctgtgattacagagctagcaaatggcagagatggggtttgaatcaggactcctgactccaagttcagtcatttcccaagaggccttattccttcccagaagaatttctagagcttttccccacgtagaatatattcttctcctttatccttccatccttccatccatcatccatcactcatccagccattatccattatccatccatccattcatcattcgtccatctattatccacccattcatcatctattatccatccatcattcatcatccatccatcattcataattcatctttccactcatccatccatcattcattcattcatccatccttccatccatccatcatctatccattcatccatccatttgccatccatccactcattcatcagctatccatcatctatccatccatccatccatccagcatctatcactcatccagctattgtccattgtccattcatccatttttcattcatccctccatcatcattaatccattatccacccactcatcatctattatccatctatagtccatcaaccatccatccttcatcatccatccatccatccttcatccatccatccacccatccatccatccatcatctgtccatccattatctatccattcatccatccattcatcatccacccacctattcatcagctatctatccatcatccatccatccatcatccatccatccatccatccatccatcatctatccattcattgtctatgctttcatccatccattcatcatccatccacccattcgttagctatttatccattatccattcctccatctatccatcatccattcatcccttatccattcaaccattatgcatttcttcatttatccattatttatccttccatccatcatccatcatctttccatccactatctatccattcatccatctatccatcatccatccatcctttatccatcattcatcagccatcatccctccatctatccattatccatcatccactcatccattcatccctccatctgcccattatccatcaaccatccatccatccattatccgtcatccacacatccattcatccctccatctgcccattatccatcaaccatccatccatccattatccatttctgcattatccatttattctttatccatttcttcatctattcatcatctatccatccattatccttacacctatctatcatccatccattccttcatctatccatcatccatcaattatccatccattcatccatccatctatccatcttctattgattgcttgtcatccttccttgtatcagacttccatccatcctccttccatgtgtcacacatcctcattactcaaccatccagctgtgcatccatctattcactgatatagttcactgtgcccctactatgtgccaagcactgtggtaggcacttgaggtgggatgctggagcatccagagagggcatctattgtcgtgagcctgggttcagattccaccttctccacttgtgaccttgggcgagttacttgacctttctgtgcctgtttcctcatccattaaatccggataatcattatacctacctcttcaagctgttgtgcaaattaaatgagctaacatatttgaagtgtctagaacagagcctggcacaagtaaacactttgtgggtgtttactaacaggacaacaaggggaaatcggggctgtgggagctgtagtctagggaggctcctttgagaaaatgatgtctaagccaagacatgaagattgtctgggcatcagccaggcaagagtatagcagggaaagaaagtacattagaggactttaaaatagtcccaatggcaggtgtggagagcagggaggtcaggaggcagttgtgggaaattaggcatcagagggcagtggagccaggccaggaggaactggaaaccttcttagggagcttagagtttaccctggggcaatggggagtgggcagtgagatgcttttagcagactgggatgcgcctgggtgtacatttgaggaagatcaccgcaactatgggcacagaatagttgtgggagatgcttctcccttcctcatccctcttacactcaagaaagagaagaaagtgggctggcttaggaaagttgccctggggaggggaccatgcgggcagattcaggaaccaattaggagggaatagactgagtgggagaagaggaaagttggtgacgactctcaggttacagggtcagcttgggggatagggaagacggagacttcgtggttcagatgtcttgagtctcaggggctcaggggacagccagctggaggtttgtgctcattcattcacgcattgattcatcaagcgaacaatttgttaattcactttccattcattcagtaaatattaatgacctactaggtggggcttaaggcggggctggaaatgggcctgggagagcaattatggtccagctctactgaggccttgaatgtcagaacaaggaatttgggctttggcctcatgcaagagagggcggctgccatatatgggcctgggcagggacagatctgacagggatctagccctggccaccaggcatctaggagctcttgttctcacccagggtccttctgaagttggcgagtggaccgcaggaggtccaggagatgattgtagttgacacatggggaaaattttaatctattttaatagttgtgtttatgtaaatgtgtattagaaaaaaatgtacagtgggcacatcagtgctatgacttcacagacgttactgcttaggatgaaaccaaaataggcatttaagtaaaagaaaaaaagagttggcttaaagaaaaatattaaataaataatcgtgcaagtg

SEQ ID NO: 343247 - DNA, 585 bp, Artificial Sequence
  derived and/or modified sequence
atgtgcctggagctgttccacagcagcaatgtgattgatggcctgaagctgaatgcctttgctgctgtgttcaccgtgctgagcggcctgctgggcatggtggcccacatgatgtacacccaggtgttccaggtgacagtgtccctgggccctgaggactggaggccccacagctgggactatggctggagcttctgcctggcctggggcagcttcacctgctgcatggccgcctctgtgaccaccctgaacagctacaccaagacagtgattgagttccgccacaagaggaaggtgtttgagcagggctaccgggaggagcccaccttcattgatcctgaggccatcaagtacttccgggagcgctggcagatcgaggcccagaggggccgggccacctgccccaggagccacagctggatggagaagagagatggcagcgaggaggacttccacctggactgcagacatgagcgctacccagcccggcaccagccccacatggctgacagctggcccaggagcagcgcccaggaggcccctgagctgaaccggcagtgctgggtgctgggccactgggtgtag

SEQ ID NO: 343248 - DNA, 585 bp, Artificial Sequence
  derived and/or modified sequence
atgtgcctggagctgttccacagcagcaacgtgatcgacggcctgaagttaaacgcttttgctgcggtgtttactgttctgtccggactgttgggcatggttgctcatatgatgtatacacaggtgtttcaagtgaccgtatctctcggcccagaagactggaggccgcatagctgggattacggctggtctttttgtctggcttggggatcttttacttgctgcatggcggcttctgtgaccacactgaacagctacaccaaaacagtgattgagtttcgacataaaaggaaagttttcgaacaaggatatagggaagaacctacgtttatagatcctgaggccataaaatactttagagagaggtggcaaattgaagcccagcggggcagagccacttgccccaggtcgcatagttggatggaaaagcgggacggttccgaagaagatttccatcttgattgtcgccacgagcgttaccctgcgcggcaccaaccccacatggctgacagctggcctcgctcttcagctcaagaagcacccgagctaaaccgacaatgctgggtactgggccactgggtctag

SEQ ID NO: 343249 - DNA, 585 bp, Artificial Sequence
  derived and/or modified sequence
atgtgcttggaactatttcatagtagtaatgtgatcgatggactgaaactgaatgccttcgctgcggtgttcactgtgctgagcggtctgctgggaatggtcgcccacatgatgtatacgcaggtcttccaggtcacagtgtccctcggcccagaagattggagacctcactcatgggattatggatggagtttctgtctagcatggggctcttttacatgttgcatggccgcatcggttacaactctgaactcttacactaaaacagtaatcgagttccggcataagagaaaagtgtttgagcaaggctatagggaagaacccacttttattgaccctgaagccatcaaatatttccgcgaacgctggcaaatcgaagcgcagagggggagagctacttgccccaggtcccactcttggatggaaaagcgagacgggtccgaagaggacttccacctggactgccgccacgagagataccctgctcgccaccagccccacatggctgattcctggcctcgaagctccgctcaggaggccccagagctgaatagacaatgctgggtgctgggccattgggtgtag

SEQ ID NO: 343250 - DNA, 343 bp, Artificial Sequence
  derived and/or modified sequence
aatgtatgcaatgtctttatttcatcctcattcttaaaggatattttcatcagcaacaccacaccctcctgatcaccatagctttatggtaagacacccctactctgtccagacccaactgtcaacagaagccaaagccatctggaggagcatgcaacaacaagaaacaaatttattagctaacctaaccactaatgacgcaagagacaattctaaggactttcaaaacagcaaagtaggagcagctgctacctctagggatgagggatgcaattgtccaattattggtgaaattgtcatttcatgctattggctatttgaaattcctcctctaatatctagg

SEQ ID NO: 343251 - protein, 152 aa, Artificial Sequence
  derived and/or modified sequence
MGPPSLHSPTPSLGPLGALVLSSQHTSPDSCKSPWTLKAVRAARQAADFTLKVEVECSSLQEAVQAAEAGADLVLLDNFKPEELHPTATVLKAQFPSVAVEASGGITLDNLPQFCGPHIDVISMGMLTQAAPALDFSLKLFAKEVAPVPKIH

SEQ ID NO: 343252 - DNA, 459 bp, Artificial Sequence
  derived and/or modified sequence
atggggccgccctcactgcactctcctaccccctccctggggcccctgggggcgctggtcctgtctagtcagcatacttccccggatagctgcaaatcaccatggacactgaaggccgtccgggctgctagacaggccgcggattttactctcaaagtggaagtggaatgctctagcttacaggaagcggtgcaggcagccgaggcgggggctgacctggtgctgttggacaactttaagccagaagagttgcatccaacggccaccgtgctgaaggctcaatttccctccgtggctgtcgaggcctccggaggaataacgttagataatctcccacagttttgcggccctcatatagatgtgatctcaatgggcatgttaacacaggcagcgccagctctggatttttctctaaaacttttcgcgaaggaggtggcccctgtgcccaaaatccactag

SEQ ID NO: 343253 - DNA, 459 bp, Artificial Sequence
  derived and/or modified sequence
atgggcccccccagcctgcacagccccacccccagcctgggccccctgggcgccctggtgctgagcagccagcacaccagcccagacagctgcaagagcccctggaccctgaaggctgtgcgggccgcccggcaggccgctgacttcaccctgaaggtggaggtggagtgcagcagcctgcaggaggccgtgcaggccgctgaggccggggctgacctggtgctgctggacaacttcaagccagaggagctgcaccccacagccaccgtgctgaaggcccagttccccagcgtggccgtggaggccagcggcggcatcaccctggacaacctgccccagttctgtggcccccacattgatgtgatctccatgggcatgctgacccaggccgccccagccctggacttcagcctgaagctgtttgccaaggaggtggcccctgtgcccaagatccactag

SEQ ID NO: 343254 - DNA, 459 bp, Artificial Sequence
  derived and/or modified sequence
atgggcccccccagcctgcacagccccacccccagcctgggccccctgggcgctctagtgctaagtagtcagcacactagccccgacagctgcaagtccccttggactttgaaggctgttagggctgcccgccaggctgcagactttacactaaaagttgaggttgagtgtagtagcctgcaggaagccgttcaggcggccgaagctggcgcggatctggtactgctggacaattttaagcccgaagaattacatcctactgccaccgtacttaaagcgcagtttccgagcgtggcagttgaggccagcgggggaatcactctcgataatctgcctcaattctgtggacctcatatcgacgttattagcatgggcatgctaacacaggctgcccctgctctcgatttctctcttaaacttttcgcaaaggaggtggcccctgtgcccaagatacactag

SEQ ID NO: 343255 - DNA, 459 bp, Artificial Sequence
  derived and/or modified sequence
atggggcctccttctctgcattcacccacgccgtcactggggcctctgggggcattagtgctgagcagccagcatactagccccgatagctgtaaatctccctggacgctgaaagccgttcgcgcagcgaggcaggccgctgacttcaccctcaaagtggaggtggagtgcagctccctccaggaggcagtccaggcggctgaggcaggggctgacttagttcttctagacaatttcaagcccgaggaacttcaccctactgcgacggtcctcaaagcacagtttcccagcgttgccgtggaagctagtggtggcattaccctggacaacctgccccaattctgcgggccacacattgacgtaatttccatgggcatgcttacacaagcagccccagctctggacttttccttgaaactgtttgccaaggaagtagcccctgttccaaagattcactag

SEQ ID NO: 343256 - DNA, 913 bp, Artificial Sequence
  derived and/or modified sequence
gactttcagggcctgctgaggaatctgcaggcctggcagaggacaggagggaggcttggggagcctgggaagggccggctgacagcttgatgggccctccctccctccacagtcccacccccagcctggggcctctgggagccttggtcctgagcagccaacacaccagcccagacagctgcaagtcaccatggacgctgaaggcggtgcgggcggccagacaggcggctgacttcactctgaaggtggaagtggaatgcagcagcctgcaggaggccgtgcaggcagctgaggctggtgccgaccttgtcctgctggacaacttcaagccagaggagctgcaccccacggccaccgtgctgaaggcccagttcccgagtgtggctgtggaagccagtgggggcatcaccctggacaacctcccccagttctgcgggccgcacatagacgtcatctccatggggatgctgacccaggcggccccagcccttgatttctccctcaagctgtttgccaaagaggtggctccagtgcccaaaatccactagtcctaaaccggaagaggatgacaccggccatgggttaacgtggctcctcaggaccctctgggtcacacatctttagggtcagtggccaatggggcacatttggcactagcttgagcccaactctggctctgccacctgctgctcctgtgacctgtcagggctgacttcacctctgctcatctcagtttcctaatctgtaaaatgggtctaataaaggatcaaccacatggggttctgcggtgataatgagcacatagtgaggggtcagcaaatgtcagaagttacctgggacagccgggcacgatggctcacacctgtaatcccagcactttgggaggctgaggcgggaagatcacttgagttca

SEQ ID NO: 343257 - DNA, 459 bp, Artificial Sequence
  derived and/or modified sequence
atgggcccccccagcctgcacagccccacccccagcctgggccccctgggcgccctggtgctgagcagccagcacaccagccccgacagctgcaagagcccctggaccctgaaggccgtgagagccgccagacaggccgccgacttcaccctgaaggtggaggtggagtgcagcagcctgcaggaggccgtgcaggccgccgaggccggcgccgacctggtgctgctggacaacttcaagcccgaggagctgcaccccaccgccaccgtgctgaaggcccagttccccagcgtggccgtggaggccagcggcggcatcaccctggacaacctgccccagttctgcggcccccacatcgacgtgatcagcatgggcatgctgacccaggccgcccccgccctggacttcagcctgaagctgttcgccaaggaggtggcccccgtgcccaagatccactag

SEQ ID NO: 343258 - protein, 151 aa, Artificial Sequence
  derived and/or modified sequence
MNPEVVEVAVEAEVAWAEVTVVASINLVALGTKDHVMTPTNKKTGQPMINLYTDRETGKLKGEATVSFDDPPSAKAAIDWFDGKEFSGNPIKVSFATRRADFNRGGGNGRGGRGRGGPMGRGGYGGGGSGGGGRGGFPSGGGGGGGQQRAG

SEQ ID NO: 343259 - protein, 429 aa, Artificial Sequence
  derived and/or modified sequence
MASNDYTQQATQSYGAYPTQPGQGYSQQSSQPYGQQSYSGYSQSTDTSGYGQSSYSSYGQSQNTGYGTQSTPQGYGSTGGYGSSQSSQSSYGQQSSYPGYGQQPAPSSTSGSYGSSSQSSSYGQPQSGSYSQQPSYGGQQQSYGQQQSYNPPQGYGQQNQYNSSSGGYEPRGRGGGRGGRGGMGGSDRGGFNKFGGPRDQGSRHDSEQDNSDNNTIFVQGLGENVTIESVADYFKQIGIIKTNKKTGQPMINLYTDRETGKLKGEATVSFDDPPSAKAAIDWFDGKEFSGNPIKVSFATRRADFNRGGGNGRGGRGRGGPMGRGGYGGGGSGGGGRGGFPSGGGGGGGQQRAGDWKCPNPTCENMNFSWRNECNQCKAPKPDGPGGGPGGSHMGGNYGDDRRGGDRGGFGPGKMDSRGEHRQDRRERPY

SEQ ID NO: 343260 - DNA, 1717 bp, Artificial Sequence
  derived and/or modified sequence
gctcagtcctccaggcgtcggtactcagcggtgttggaacttcgttgcttgcttgcctgtgcgcgcgtgcgcggacatggcctcaaacgattatacccaacaagcaacccaaagctatggggcctaccccacccagcccgggcagggctattcccagcagagcagtcagccctacggacagcagagttacagtggttatagccagtccacggacacttcaggctatggccagagcagctattcttcttatggccagagccagaacacaggctatggaactcagtcaactccccagggatatggctcgactggcggctatggcagtagccagagctcccaatcgtcttacgggcagcagtcctcctaccctggctatggccagcagccagctcccagcagcacctcgggaagttacggtagcagttctcagagcagcagctatgggcagccccagagtgggagctacagccagcagcctagctatggtggacagcagcaaagctatggacagcagcaaagctataatccccctcagggctatggacagcagaaccagtacaacagcagcagtggtggtggaggtggaggtggaggtggaggtaactatggccaagatcaatcctccatgagtagtggtggtggcagtggtggcggttatggcaatcaagaccagagtggtggaggtggcagcggtggctatggacagcaggaccgtggaggccgcggcaggggtggcagtggtggcggcggcggcggcggcggtggtggttacaaccgcagcagtggtggctatgaacccagaggtcgtggaggtggccgtggaggcagaggtggcatgggcggaagtgaccgtggtggcttcaataaatttggtggccctcgggaccaaggatcacgtcatgactccgacaaacaagaaaacgggacagcccatgattaatttgtacacagacagggaaactggcaagctgaagggagaggcaacggtctcttttgatgacccaccttcagctaaagcagctattgactggtttgatggtaaagaattctccggaaatcctatcaaggtctcatttgctactcgccgggcagactttaatcggggtggtggcaatggtcgtggaggccgagggcgaggaggacccatgggccgtggaggctatggaggtggtggcagtggtggtggtggccgaggaggatttcccagtggaggtggtggcggtggaggacagcagcgagctggtgactggaagtgtcctaatcccacctgtgagaatatgaacttctcttggaggaatgaatgcaaccagtgtaaggcccctaaaccagatggcccaggagggggaccaggtggctctcacatggggggtaactacggggatgatcgtcgtggtggcagaggaggctatgatcgaggcggctaccggggccgcggcggggaccgtggaggcttccgagggggccggggtggtggggacagaggtggctttggccctggcaagatggattccaggggtgagcacagacaggatcgcagggagaggccgtattaattagcctggctccccaggttctggaacagctttttgtcctgtacccagtgttaccctcgttattttgtaaccttccaattcctgatcacccaagggtttttttgtgtcggactatgtaattgtaactatacctctggttcccattaaaagtgaccattttagtt

SEQ ID NO: 343261 - DNA, 456 bp, Artificial Sequence
  derived and/or modified sequence
atgaacccggaggttgtcgaggtggccgtggaggctgaggtggcctgggcggaagtgacggtggtggcatctattaatttggtagccctcgggactaaagaccacgtaatgactcctaccaacaagaagactgggcagccaatgatcaatctgtatacagaccgcgagaccggaaaactgaagggcgaagcaaccgtgtcatttgacgacccacccagcgccaaggcagctatcgattggttcgacgggaaagagttctctgggaaccctattaaggtctcattcgctacacgccgcgccgactttaaccggggcggcggcaacggccggggtgggagggggcgggggggacccatggggagaggaggctatggcggaggtggatccggcggggggggtcgtggcggcttcccctccggtggagggggcggaggcggtcagcagcgcgccgggtag

SEQ ID NO: 343262 - DNA, 456 bp, Artificial Sequence
  derived and/or modified sequence
atgaaccctgaggtggtggaggtggccgtggaggccgaggtggcctgggccgaggtgacagtggtggccagcatcaacctggtggccctgggcaccaaggaccacgtgatgacccccaccaacaagaagacaggccagcccatgatcaacctgtacacagaccgggagaccgggaagctgaagggggaggccaccgtgtcctttgatgatcctccttctgccaaggccgccatcgactggtttgatggcaaggagttcagcggcaaccccatcaaggtgtcctttgccacccggcgggctgacttcaacagaggaggcggcaatggccggggcggccggggccggggcggccccatgggccggggcggctacggcggcggcggcagcggcggcggcggccggggcggcttccccagcggcggcggcggcggcggcggccagcagagagctggatag

SEQ ID NO: 343263 - DNA, 456 bp, Artificial Sequence
  derived and/or modified sequence
atgaaccccgaggtggtggaggtggccgtggaggccgaggtggcctgggccgaagtcactgttgtagcgtccatcaatcttgttgccttaggaactaaagaccatgtgatgacacctaccaacaaaaagacgggtcagcctatgattaacctttacacagatagggaaactggaaaacttaagggagaggccaccgtgagcttcgatgatcccccctcagcgaaagctgctatagactggttcgatggcaaagagttctcaggaaaccccattaaagttagctttgccacacgccgcgcagatttcaatcggggaggaggcaacgggagggggggaagaggacgaggaggccccatgggccgaggcggctacggcgggggggggagcggaggtggaggacgcggcggatttccttcaggggggggaggcggaggaggccagcagagagcaggctag

SEQ ID NO: 343264 - DNA, 456 bp, Artificial Sequence
  derived and/or modified sequence
atgaaccctgaagtggtggaggtggctgtcgaggcagaggttgcttgggcagaagtgaccgtggttgcctccattaacctcgtagccttaggcactaaggatcatgtcatgacacctacaaataagaagactggacagccaatgattaatctgtacaccgaccgcgagacgggaaaactgaagggggaagccacagtttcatttgatgacccccctagtgccaaggcagccattgattggtttgacggcaaggaattctcgggaaaccctataaaagtgtcctttgccacaaggagagctgactttaacaggggtggaggcaatggcagaggtggacggggacgtggtgggcctatggggcgaggcggatacggcggaggagggtctggtggcggaggccgaggcggttttccctccggcggtggaggcggtgggggtcagcagcgggcaggctag

SEQ ID NO: 343265 - DNA, 456 bp, Artificial Sequence
  derived and/or modified sequence
atgaaccccgaggtggtggaggtggccgtggaggccgaggtggcctgggccgaggtgaccgtggtggccagcatcaacctggtggccctgggcaccaaggaccacgtgatgacccccaccaacaagaagaccggccagcccatgatcaacctgtacaccgacagagagaccggcaagctgaagggcgaggccaccgtgagcttcgacgacccccccagcgccaaggccgccatcgactggttcgacggcaaggagttcagcggcaaccccatcaaggtgagcttcgccaccagaagagccgacttcaacagaggcggcggcaacggcagaggcggcagaggcagaggcggccccatgggcagaggcggctacggcggcggcggcagcggcggcggcggcagaggcggcttccccagcggcggcggcggcggcggcggccagcagagagccggctag

SEQ ID NO: 343266 - protein, 440 aa, Artificial Sequence
  derived and/or modified sequence
MDMNSIKEPQSRLRKWTTVDSISVNTSLDQNSSKHGAISSGFRLEESPFVPYDFMNSSTSPASPPGSIGDGWPRAKSPNGSSSVNWPPEFRPGEPWKGYPNIDPETDPYVTPGSVINNLSINTVREVDHLRDRNSGSSSSLNTTLPSTSAWSSIRASNYNVPLSSTAQSTSARNSDSKLTWSPGSVTNTSLAHELWKVPLPPKNITAPSRPPPGLTGQKPPLSTWDNSPLRIGGGWGNSDARYTPGSSWGESSSGRITNWLVLKNLTPQIDGSTLRTLCMQHGPLITFHLNLPHGNALVRYSSKEEVVKAQKSLHMCVLGNTTILAEFASEEEISRFFAQSQSLTPSPGWQSLGSSQSRLGSLDCSHSFSSRTDLNHWNGAGLSGTNCGDLHGTSLWGTPHYSTSLWGPPSSSDPRGISSPSPINAFLSVDHLGGGGESM

SEQ ID NO: 343267 - protein, 390 aa, Artificial Sequence
  derived and/or modified sequence
MPHLMERMVGSGLLWLALVSCILTQASAVQRVPRDPSTVEDKCEKACRPEEECLALNSTWGCFCRQDLNSSDVHSLQPQLDCGPREIKVKVDKCLLGGLGLGEEVIAYLRDPNCSSILQTEERNWVSVTSPVQASACRNILERNQTHAIYKNTLSLVNDFIIRDTILNINFQCAYPLDMKVSLQAALQPIVSSLNVSVDGNGEFIVRMALFQDQNYTNPYEGDAVELSVESVLYVGAILEQGDTSRFNLVLRNCYATPTEDKADLVKYFIIRNSCSNQRDSTIHVEENGQSSESRFSVQMFMFAGHYDLVFLHCEIHLCDSLNEQCQPSCSRSQVRSEVPAIDLARVLDLGPITRRGAQSPGVMNGTPSTAGFLVAWPMVLLTVLLAWLF

SEQ ID NO: 343268 - protein, 515 aa, Artificial Sequence
  derived and/or modified sequence
MKIKCEKSRTQSSAQHVQHSAHSTIVCRKHSHNAETAGRVDIVRGGPFFHHPLRKWLISPPLNKPSVWPRTPIIPVHQLRRDTWVGNCNKKTAHSRLHSHGWPEEERFVFSSELHGKSAYSKVTCMPHLMERMVGSGLLWLALVSCILTQASAVQRDHLDPSTVEDKCEKACRPEEECLALNSTWGCFCRQDLNSSDVHSLQPQLDCGPREIKVKVDKCLLGGLGLGEEVIAYLRDPNCSSILQTEERNWVSVTSPVQASACRNILERNQTHAIYKNTLSLVNDFIIRDTILNINFQCAYPLDMKVSLQAALQPIVSSLNVSVDGNGEFIVRMALFQDQNYTNPYEGDAVELSVESVLYVGAILEQGDTSRFNLVLRNCYATPTEDKADLVKYFIIRNSCSNQRDSTIHVEENGQSSESRFSVQMFMFAGHYDLVFLHCEIHLCDSLNEQCQPSCSRSQVRSEVPAIDLARVLDLGPITRRGAQSPGVMNGTPSTAGFLVAWPMVLLTVLLAWLF

SEQ ID NO: 343269 - DNA, 1548 bp, Artificial Sequence
  derived and/or modified sequence
atgaagataaagtgcgagaagagccggacacagtcatcagcacagcatgttcagcactctgcccactcgacaattgtatgccgcaaacatagccacaatgccgaaacagctggccgtgtggatattgtcagaggcggccccttttttcatcatccactgcggaagtggctgatctctccacccttgaacaaaccctccgtgtggcctcggactccaatcatacccgtccaccagctgaggagagatacctgggtcggcaattgcaacaagaagactgcccatagcaggctccattcccacggatggccagaggaagagcggtttgtgttttcctccgagctgcacggtaaaagcgcatattcaaaggtgacatgtatgccccatctcatggagcggatggtaggttcaggcctcctgtggcttgcgctcgtctcttgcatccttactcaggccagcgctgtgcagagagaccatctggacccctccaccgtcgaagataagtgtgagaaagcttgcaggccagaagaggagtgccttgctctgaacagtacatggggttgtttttgccgtcaagacctgaactcctctgacgtacattcactacagccccagctcgattgcggtcctagagaaattaaagttaaggtggacaagtgtctgcttggcggcctgggtctcggagaagaggtgatcgcctacctgcgggatcccaattgctccagcattttacaaaccgaggagaggaattgggtgtcagtgacatctcccgtgcaggcctccgcatgccgaaacattttggagcgaaatcaaacccacgctatctataagaacactctcagtctagttaacgacttcatcatccgagacacaatcttaaacatcaatttccagtgtgcctaccccctggacatgaaggtgagtctccaggctgcccttcagccaatcgtgtccagcttgaatgtcagtgtagatggaaacggtgagtttattgtgcgcatggccctctttcaggatcaaaattatacgaacccatacgaaggcgatgcagttgagctgtctgtcgagtccgtgctttatgtcggagcaattctggagcagggcgacaccagcaggtttaacctggtactgagaaattgctatgccacccccactgaagataaggccgacctggtgaagtacttcatcattaggaatagctgtagcaatcaacgggattctaccattcatgtggaggagaacggccagtcctctgaaagtagattttccgtacaaatgttcatgttcgccggacattacgatctcgtttttctccactgtgagattcacttatgtgacagcctcaatgagcagtgccaaccatcatgctcgcgttcgcaggttcgtagtgaagtgcctgcaattgacctggcccgcgtacttgatctcggccccattacaagaagaggtgcgcagtcccccggcgtgatgaacgggaccccttcaaccgctggattcctggtcgcttggcctatggtactcctgacagtgctgctggcgtggctgttttag

SEQ ID NO: 343270 - DNA, 1980 bp, Artificial Sequence
  derived and/or modified sequence
attcccatggctggccagaggaggaacgctttgtgttctcatcggagctgcatgggaagtctgcatacagcaaagtgacctgcatgcctcaccttatggaaaggatggtgggctctggcctcctgtggctggccttggtctcctgcattctgacccaggcatctgcagtgcagcgagacccatccactgtggaggacaagtgtgagaaggcctgccgccccgaggaggagtgccttgccctcaacagcacctggggctgtttctgcagacaggacctcaatagttctgatgtccacagtttgcagcctcagctagactgtgggcccagggagatcaaggtgaaggtggacaaatgtttgctgggaggcctgggtttgggggaggaggtcattgcctacctgcgagacccaaactgcagcagcatcttgcagacagaggagaggaactgggtatctgtgaccagccccgtccaggctagtgcctgcaggaacattctggagagaaatcaaacccatgccatctacaaaaacaccctctccttggtcaatgatttcatcatcagagacaccatcctcaacatcaacttccaatgtgcctacccactggacatgaaagtcagcctccaagctgccttgcagcccattgtaagttccctgaacgtcagtgtggacgggaatggagagttcattgtcaggatggccctcttccaagaccagaactacacgaatccttacgaaggggatgcagttgaactgtctgttgagtccgtgctgtatgtgggtgccatcttggaacaaggggacacctcccggtttaacctggtgttgaggaactgctatgccacccccactgaagacaaggctgaccttgtgaagtatttcatcatcagaaacagctgctcaaatcaacgtgattccaccatccacgtggaggagaatgggcagtcctcggaaagccggttctcagttcagatgttcatgtttgctggacattatgacctagttttcctgcattgtgagattcatctctgtgattctcttaatgaacagtgccagccttcttgctcaagaagtcaagtccgcagtgaagtaccggccatcgacctagcccgggttctagatttggggcccatcactcggagaggtgcacagtctcccggtgtcatgaatggaacccctagcactgcagggttcctggtggcctggcctatggtcctcctgactgtcctcctggcttggctgttctgagagctccgctgagcatctggccttgaagtttgtgttcttccctctggcaatggctcccttcagcacttctgctttccactccaattcacacaggcttggtattaatagaatcaaggccaagctaggttaggaaaagggaagagctttcaccttctttaaaactctcggctgggcgcagtggctcatgcctgtaatcccagcattttgggaggctgaggcaggtggatcacctgaggtcagcagttcaaaatcagcctggccaaaatgctgaaactccgtctctactaaaaatacaaaaattagccaggcatggtggcaggcgcctgtaatcccagctactcgggaggccaaggcaggagaattgctcgaactcagggggtggaggttgcagtgagttgagattgtgccattgcactccagcctgggcaacagagcaagactctgtctcaggaaaaaaaaaaaaaaaaaagaaaagcaacatagtggggtttctgtcaatctgtcctcggctgcccttctcatttgttgatgggaccttgaaagcaagcttgctaggtgccctctgtggctccagcctttaccggaagtgtggtgcatgtttttaacttcagggaagcggtatcctgtcactggggtatgggatgagcatggagaagaggcaccagccacgattccttcctaagcatctcctgttctgactgctcatgaattgaagaaactgacccttgtgttc

SEQ ID NO: 343271 - DNA, 1989 bp, Artificial Sequence
  derived and/or modified sequence
attcccatggctggccagaggaggaacgctttgtgttctcatcggagctgcatgggaagtctgcatacagcaaagtgacctgcatgcctcaccttatggaaaggatggtgggctctggcctcctgtggctggccttggtctcctgcattctgacccaggcatctgcagtgcagcgagttccacgagacccatccactgtggaggacaagtgtgagaaggcctgccgccccgaggaggagtgccttgccctcaacagcacctggggctgtttctgcagacaggacctcaatagttctgatgtccacagtttgcagcctcagctagactgtgggcccagggagatcaaggtgaaggtggacaaatgtttgctgggaggcctgggtttgggggaggaggtcattgcctacctgcgagacccaaactgcagcagcatcttgcagacagaggagaggaactgggtatctgtgaccagccccgtccaggctagtgcctgcaggaacattctggagagaaatcaaacccatgccatctacaaaaacaccctctccttggtcaatgatttcatcatcagagacaccatcctcaacatcaacttccaatgtgcctacccactggacatgaaagtcagcctccaagctgccttgcagcccattgtaagttccctgaacgtcagtgtggacgggaatggagagttcattgtcaggatggccctcttccaagaccagaactacacgaatccttacgaaggggatgcagttgaactgtctgttgagtccgtgctgtatgtgggtgccatcttggaacaaggggacacctcccggtttaacctggtgttgaggaactgctatgccacccccactgaagacaaggctgaccttgtgaagtatttcatcatcagaaacagctgctcaaatcaacgtgattccaccatccacgtggaggagaatgggcagtcctcggaaagccggttctcagttcagatgttcatgtttgctggacattatgacctagttttcctgcattgtgagattcatctctgtgattctcttaatgaacagtgccagccttcttgctcaagaagtcaagtccgcagtgaagtaccggccatcgacctagcccgggttctagatttggggcccatcactcggagaggtgcacagtctcccggtgtcatgaatggaacccctagcactgcagggttcctggtggcctggcctatggtcctcctgactgtcctcctggcttggctgttctgagagctccgctgagcatctggccttgaagtttgtgttcttccctctggcaatggctcccttcagcacttctgctttccactccaattcacacaggcttggtattaatagaatcaaggccaagctaggttaggaaaagggaagagctttcaccttctttaaaactctcggctgggcgcagtggctcatgcctgtaatcccagcattttgggaggctgaggcaggtggatcacctgaggtcagcagttcaaaatcagcctggccaaaatgctgaaactccgtctctactaaaaatacaaaaattagccaggcatggtggcaggcgcctgtaatcccagctactcgggaggccaaggcaggagaattgctcgaactcagggggtggaggttgcagtgagttgagattgtgccattgcactccagcctgggcaacagagcaagactctgtctcaggaaaaaaaaaaaaaaaaaagaaaagcaacatagtggggtttctgtcaatctgtcctcggctgcccttctcatttgttgatgggaccttgaaagcaagcttgctaggtgccctctgtggctccagcctttaccggaagtgtggtgcatgtttttaacttcagggaagcggtatcctgtcactggggtatgggatgagcatggagaagaggcaccagccacgattccttcctaagcatctcctgttctgactgctcatgaattgaagaaactgacccttgtgttc

SEQ ID NO: 343272 - DNA, 1925 bp, Artificial Sequence
  derived and/or modified sequence
attatgaagattaaatgtgagaagtcaagaacgcaaagcagtgcccagcatgttcagcattcagcacacagcactattgtttgtaggaagcattcgcacaatgctgagacagctggaagggttgacattgtgaggggagggcccttctttcaccatcctttgcgtaaatggcttatctcacctccactcaacaagcccagtgtatggcctagaactcccatcatacctgtgcaccaattgaggagagacacatgggtgggaaattgcaataaaaagacggcccacagcaggctgcattcccatggctggccagaggaggaacgctttgtgttctcatcggagctgcatgggaagtctgcatacagcaaagtgacctgcatgcctcaccttatggaaaggatggtgggctctggcctcctgtggctggccttggtctcctgcattctgacccaggcatctgcagtgcagcgagatcacctagacccatccactgtggaggacaagtgtgagaaggcctgccgccccgaggaggagtgccttgccctcaacagcacctggggctgtttctgcagacaggacctcaatagttctgatgtccacagtttgcagcctcagctagactgtgggcccagggagatcaaggtgaaggtggacaaatgtttgctgggaggcctgggtttgggggaggaggtcattgcctacctgcgagacccaaactgcagcagcatcttgcagacagaggagaggaactgggtatctgtgaccagccccgtccaggctagtgcctgcaggaacattctggagagaaatcaaacccatgccatctacaaaaacaccctctccttggtcaatgatttcatcatcagagacaccatcctcaacatcaacttccaatgtgcctacccactggacatgaaagtcagcctccaagctgccttgcagcccattgtaagttccctgaacgtcagtgtggacgggaatggagagttcattgtcaggatggccctcttccaagaccagaactacacgaatccttacgaaggggatgcagttgaactgtctgttgagtccgtgctgtatgtgggtgccatcttggaacaaggggacacctcccggtttaacctggtgttgaggaactgctatgccacccccactgaagacaaggctgaccttgtgaagtatttcatcatcagaaacagctgctcaaatcaacgtgattccaccatccacgtggaggagaatgggcagtcctcggaaagccggttctcagttcagatgttcatgtttgctggacattatgacctagttttcctgcattgtgagattcatctctgtgattctcttaatgaacagtgccagccttcttgctcaagaagtcaagtccgcagtgaagtaccggccatcgacctagcccgggttctagatttggggcccatcactcggagaggtgcacagtctcccggtgtcatgaatggaacccctagcactgcagggttcctggtggcctggcctatggtcctcctgactgtcctcctggcttggctgttctgagagctccgctgagcatctggccttgaagtttgtgttcttccctctggcaatggctcccttcagcacttctgctttccactccaattcacacaggcttggtattaatagaatcaaggccaagctaggttaggaaaagggaagagctttcaccttctttaaaactctcggctgggcgcagtggctcatgcctgtaatcccagcattttgggaggctgaggcaggtggatcacctgaggtcagcagttcaaaatcagcctggccaaaatgctgaaactccgtctctactaaaaatacaaaaattagccaggcatggtggcaggcgcctgtaatcccagctactcgggaggccaaggcaggagaattgctcgaactca

SEQ ID NO: 343273 - DNA, 1548 bp, Artificial Sequence
  derived and/or modified sequence
atgaagatcaagtgtgagaagagcaggacccagagcagcgcccagcacgtgcagcacagcgcccacagcaccatcgtgtgcaggaagcacagccacaatgctgagacagctggccgggtggacatcgtgcggggcggccccttcttccaccaccccctgaggaagtggctgatcagcccccccctgaacaagcccagcgtgtggcccaggacccccatcatccctgtgcaccagctgcggcgggacacctgggtgggcaactgcaacaagaagacagcccacagccggctgcacagccacggctggccagaggaggagagatttgtgttcagcagcgagctgcacggcaagagcgcctacagcaaggtgacctgcatgccccacctgatggagaggatggtgggcagcggcctgctgtggctggccctggtgtcctgcatcctgacccaggccagcgctgtgcagagggaccacctggaccccagcacagtggaggacaagtgtgagaaggcctgcaggcctgaggaggagtgcctggccctgaacagcacctggggctgcttctgccggcaggacctgaacagcagtgatgtgcacagcctgcagccccagctggactgtggcccccgggagatcaaggtgaaggtggacaagtgcctgctgggcggcctgggcctgggggaggaggtgattgcctacctgcgggaccccaactgcagcagcatcctgcagacagaggagaggaactgggtgtctgtgaccagccctgtgcaggccagcgcctgcaggaacatcctggagaggaaccagacccacgccatctacaagaacaccctgagcctggtgaatgacttcatcatccgggacaccatcctgaacatcaacttccagtgtgcctaccccctggacatgaaggtgtccctgcaggccgccctgcagcccatcgtgagcagcctgaatgtgtctgtggatggaaatggagagttcatcgtgaggatggccctcttccaggaccagaactacaccaacccctatgaaggagatgctgtggagctgtctgtggagagcgtgctgtatgtgggcgccatcctggagcagggcgacaccagccgcttcaacctggtgctgaggaactgctacgccacccccacagaggacaaggctgacctggtgaagtacttcatcatccggaacagctgcagcaaccagagggacagcaccatccacgtggaggagaatggccagagcagcgagagccgcttctctgtgcagatgttcatgtttgctggccactatgacctggtgttcctgcactgtgagatccacctgtgtgacagcctgaatgagcagtgccagcccagctgcagccgcagccaggtgcgctctgaggtgcctgccatcgacctggcccgggtgctggacctgggccccatcacccggcggggggcccagagccctggggtgatgaatggcacccccagcacagctggcttcctggtggcctggcccatggtgctgctgactgtgctgctggcctggctgttctag

SEQ ID NO: 343274 - DNA, 1548 bp, Artificial Sequence
  derived and/or modified sequence
atgaagatcaagtgcgagaagagccggacccagagcagcgcccagcacgttcagcatagcgcccattcgaccatcgtttgccgcaagcactcacacaacgccgaaacagctggaagggtagatatcgtgcgtggaggccctttctttcaccaccccctccgcaagtggctcatttcaccccctctgaacaagccgagcgtatggcccagaacccctatcatccccgtacatcaactccgccgggatacctgggtaggaaattgcaataagaagacagctcactcccgtcttcactcgcatggctggcccgaggaagaacggtttgtattcagttccgagctgcacggcaagtctgcctattctaaggtgacatgtatgcctcacctcatggagcgcatggttggaagtgggctcctgtggctcgccctggtgagctgtatcctgacccaggcatctgctgttcagagggaccaccttgatcctagtactgtggaggataaatgcgaaaaggcctgtcgtcctgaagaggagtgcctggctctgaactccacatgggggtgcttttgccggcaggatctaaatagttcggacgtccattctttacaaccgcaactcgactgtgggccaagggagataaaggtgaaagtagataaatgtttgctggggggtctggggctgggcgaggaagttattgcttacctgagagacccaaattgcagttccattctccaaacggaagagaggaactgggtttcagtgactagtcctgtacaggctagtgcctgtagaaacatactggagcgcaaccaaactcacgcaatctacaaaaatacactgagcctggtgaacgattttatcatacgagacaccattctcaatattaactttcagtgcgcatacccactggacatgaaggtctccctgcaggccgccctccagcccattgtaagtagcttgaacgtttcagtcgacggtaatggggagtttatcgtgcggatggccttattccaagatcagaattatacgaatccgtacgagggtgacgctgttgaactgtccgtggagagcgtcctgtatgtgggcgcaatcctggagcagggcgacacatctcggttcaatctagtgttgcgcaactgttacgccacacctaccgaggacaaggctgacctggtgaaatacttcataattcgcaacagctgcagtaatcaaagagattcaacaattcacgtggaagaaaacggtcagtctagcgaatctcgttttagcgttcaaatgtttatgttcgctgggcactatgatcttgtcttcttacactgtgagatccacttatgcgacagcctgaatgagcagtgtcaaccctcgtgctccagatcccaggtcaggagcgaagtgccagccattgacctggcgcgagtcttggacttggggcccattacgagaagaggggcccagagccctggggtgatgaacggtactccttctaccgctgggtttctggtggcatggcctatggtgcttttgaccgttttgctggcctggcttttttag

SEQ ID NO: 343275 - DNA, 1548 bp, Artificial Sequence
  derived and/or modified sequence
atgaagataaagtgtgagaagtcgcgaacacagagttcagctcaacatgtccagcacagcgcccattctaccatcgtgtgcagaaagcacagccataacgccgagaccgccggaagggtggatattgttaggggcggacctttctttcaccatcctctgcggaagtggctcatctccccacccctgaataagcccagcgtctggcctagaactcctattatcccagttcaccagctgcgacgggacacctgggtcgggaactgtaacaaaaagacagcacactcaaggctgcatagccacggctggcccgaggaagagcgcttcgttttctcctccgagctgcacggaaagtcagcttactccaaggtgacgtgtatgccccacctcatggaacgcatggtgggcagcggcctactttggctagcactcgtgtcatgcatcctcactcaagcaagcgccgtgcagagggatcacctcgacccttccaccgtcgaggacaaatgtgaaaaagcctgcaggcccgaagaagagtgtctcgcattgaactcaacatggggatgcttttgcagacaggaccttaactcttccgacgtccattctctgcagccgcagctggattgcggcccacgcgaaatcaaagtgaaggtcgataagtgcctgttaggtggtttgggattaggcgaggaagttattgcctatctgagggacccaaattgctctagcattcttcagacagaagaacgcaattgggtgtccgtgacatcacccgttcaagcatctgcttgtcgcaacatcttggaacgtaatcagacccacgcgatttacaaaaacactctttccctagtaaacgacttcatcattcgcgacacaatccttaacatcaacttccagtgcgcctatcccctggatatgaaggttagtctccaggccgctctgcagcccatagttagctctctgaatgtatccgtcgatggtaacggcgaattcatcgtcagaatggccttatttcaggaccaaaattataccaatccctacgaaggggacgccgtggagttgtctgtcgagtctgtgctgtatgttggtgcgattctggagcagggcgacacgagccgctttaatctagtcttgaggaactgctacgcgacccctacggaagacaaggcagacctggtgaaatatttcataatccgaaacagctgctccaatcagcgggattctactatacacgtggaagaaaacggccaatcctctgaatcgaggtttagtgttcagatgttcatgttcgctggccactacgacctggtttttctgcactgcgagatccacctgtgtgactcactaaatgaacagtgccaaccttcatgttcccgcagccaagtccgcagtgaggtgccggcaattgatctggctcgggtcctggacctgggaccaataacacgtcgtggagcccagtcgcctggagtcatgaacggcactccctctacagcgggattcttggttgcatggccgatggtactgctaactgtgctgcttgcatggctattctag

SEQ ID NO: 343276 - DNA, 1548 bp, Artificial Sequence
  derived and/or modified sequence
atgaagatcaagtgcgagaagagcagaacccagagcagcgcccagcacgtgcagcacagcgcccacagcaccatcgtgtgcagaaagcacagccacaacgccgagaccgccggcagagtggacatcgtgagaggcggccccttcttccaccaccccctgagaaagtggctgatcagcccccccctgaacaagcccagcgtgtggcccagaacccccatcatccccgtgcaccagctgagaagagacacctgggtgggcaactgcaacaagaagaccgcccacagcagactgcacagccacggctggcccgaggaggagagattcgtgttcagcagcgagctgcacggcaagagcgcctacagcaaggtgacctgcatgccccacctgatggagagaatggtgggcagcggcctgctgtggctggccctggtgagctgcatcctgacccaggccagcgccgtgcagagagaccacctggaccccagcaccgtggaggacaagtgcgagaaggcctgcagacccgaggaggagtgcctggccctgaacagcacctggggctgcttctgcagacaggacctgaacagcagcgacgtgcacagcctgcagccccagctggactgcggccccagagagatcaaggtgaaggtggacaagtgcctgctgggcggcctgggcctgggcgaggaggtgatcgcctacctgagagaccccaactgcagcagcatcctgcagaccgaggagagaaactgggtgagcgtgaccagccccgtgcaggccagcgcctgcagaaacatcctggagagaaaccagacccacgccatctacaagaacaccctgagcctggtgaacgacttcatcatcagagacaccatcctgaacatcaacttccagtgcgcctaccccctggacatgaaggtgagcctgcaggccgccctgcagcccatcgtgagcagcctgaacgtgagcgtggacggcaacggcgagttcatcgtgagaatggccctgttccaggaccagaactacaccaacccctacgagggcgacgccgtggagctgagcgtggagagcgtgctgtacgtgggcgccatcctggagcagggcgacaccagcagattcaacctggtgctgagaaactgctacgccacccccaccgaggacaaggccgacctggtgaagtacttcatcatcagaaacagctgcagcaaccagagagacagcaccatccacgtggaggagaacggccagagcagcgagagcagattcagcgtgcagatgttcatgttcgccggccactacgacctggtgttcctgcactgcgagatccacctgtgcgacagcctgaacgagcagtgccagcccagctgcagcagaagccaggtgagaagcgaggtgcccgccatcgacctggccagagtgctggacctgggccccatcaccagaagaggcgcccagagccccggcgtgatgaacggcacccccagcaccgccggcttcctggtggcctggcccatggtgctgctgaccgtgctgctggcctggctgttctag

SEQ ID NO: 343277 - DNA, 303 bp, Artificial Sequence
  derived and/or modified sequence
atggggacttcatccattttcctctgcgttttgttcctgtgcggtgctctgggtttgacgatgagccctgcccggggaagactgcggtgttacatatgcggtttcactaagccatgtcacccagtccctactgagtgccgtgatgatgaggcttgcggtatctccataggaacttcaggcagaactctggtccagtggccattttcccgccggctaccaacttccatccaccccgcattccctgtggcaccagcctcggcctgtctgttccatccaacagaccagagcgaaattacagagtag

SEQ ID NO: 343278 - protein, 825 aa, Artificial Sequence
  derived and/or modified sequence
MGWLCSGLLFPVSCLVLLQVASSGNMKVLQEPTCVSDYMSISTCEWKMNGPTNCSTELRLLYQLVFLLSEAHTCIPENNGGAGCVCHLLMDDVVSADNYTLDLWAGQQLLWKGSFKPSEHVKPRAPGNLTVHTNVSDTLLLTWSNPYPPDNYLYNHLTYAVNIWSENDPADFRIYNVTYLEPSLRIAASTLKSGISYRARVRAWAQCYNTTWSEWSPSTKWHNSYREPFEQHLLLGVSVSCIVILAVCLLCYVSITKIKKEWWDQIPNPARSRLVAIIIQDAQGSQWEKRSRGQEPAKCPHWKNCLTKLLPCFLEHNMKRDEDPHKAAKEMPFQGSGKSAWCPVEISKTVLWPESISVVRCVELFEAPVECEEEEEVEEEKGSFCASPESSRDDFQEGREGIVARLTESLFLDLLGEENGGFCQQDMGESCLLPPSGSTSAHMPWDEFPSAGPKEAPPWGKEQPLHLEPSPPASPTQSPDNLTCTETPLVIAGNPAYRSFSNSLSQSPCPRELGPDPLLARHLEEVEPEMPCVPQLSEPTTVPQPEPETWEQILRRNVLQHGAAAAPVSAPTSGYQEFVHAVEQGGTQASAVVGLGPPGEAGYKAFSSLLASSAVSPEKCGFGASSGEEGYKPFQDLIPGCPGDPAPVPVPLFTFGLDREPPRSPQSSHLPSSSPEHLGLEPGEKVEDMPKPPLPQEQATDPLVDSLGSGIVYSALTCHLCGHLKQCHGQEDGGQTPVMASPCCGCCCGDRSSPPTTPLRAPDPSPGGVPLEASLCPASLAPSGISEKSKSSSSFHPAPGNAQSSSQTPKIVNFVSVGPTYMRVS

SEQ ID NO: 343279 - protein, 227 aa, Artificial Sequence
  derived and/or modified sequence
MGWLCSGLLFPVSCLVLLQVASSGNMKVLQEPTCVSDYMSISTCEWKMNGPTNCSTELRLLYQLVFLLSEAHTCIPENNGGAGCVCHLLMDDVVSADNYTLDLWAGQQLLWKGSFKPSEHVKPRAPGNLTVHTNVSDTLLLTWSNPYPPDNYLYNHLTYAVNIWSENDPADFRIYNVTYLEPSLRIAASTLKSGISYRARVRAWAQCYNTTWSEWSPSTKWHNFSVC

SEQ ID NO: 343280 - protein, 227 aa, Artificial Sequence
  derived and/or modified sequence
MGWLCSGLLFPVSCLVLLQVASSGNMKVLQEPTCVSDYMSISTCEWKMNGPTNCSTELRLLYQLVFLLSEAHTCIPENNGGAGCVCHLLMDDVVSADNYTLDLWAGQQLLWKGSFKPSEHVKPRAPGNLTVHTNVSDTLLLTWSNPYPPDNYLYNHLTYAVNIWSENDPADFRIYNVTYLEPSLRIAASTLKSGISYRARVRAWAQCYNTTWSEWSPSTKWHNSNIC

SEQ ID NO: 343281 - DNA, 2478 bp, Artificial Sequence
  derived and/or modified sequence
atgggctggctgtgctctgggctgctttttccagtttcatgcttggtcttactccaagtggctagctctggcaatatgaaagtgttacaggaaccgacttgcgttagcgactacatgtctatctccacgtgcgagtggaagatgaatggcccaacaaactgtagcaccgagttgaggctgttataccagcttgtctttttgttgagcgaagcacacacatgcatacctgaaaataacggtggcgctggttgcgtttgtcacctcctgatggacgatgttgtgtccgctgacaactacacactggacctgtgggcaggccagcagctgctgtggaaggggagttttaaaccaagcgagcatgttaagccgcgtgctcctggcaatttaacagttcatacaaatgtttctgatacactgcttttgacctggagcaacccttatcctccagacaattatttatataaccatctgacatacgccgtcaatatctggtctgagaatgatcctgctgacttccggatttacaacgtgacctatttggagcccagcctgcgaatcgctgcatccacgctgaagtctggaatcagctatcgagcacgagtaagggcttgggcccagtgctacaacaccacatggagcgaatggagccctagtaccaaatggcacaacagctatagggaacccttcgagcagcatctgctgcttggagtgagcgtttcttgcatcgtcatcttggctgtgtgcctgctatgctacgtttccatcacaaaaattaaaaaagaatggtgggatcaaatccccaacccggcgcgatctaggctcgtggcgatcatcatacaggacgctcagggatcacagtgggaaaagcggtctcgcggtcaggaaccggccaaatgtccccactggaagaattgtcttacaaagttactcccctgctttctggagcataacatgaaacgcgacgaggaccctcacaaggctgccaaggagatgccttttcagggctccgggaagtccgcctggtgcccagttgagatctctaaaacagttttgtggcctgaaagcatatcggttgtgagatgcgttgaactattcgaagcccccgtggaatgtgaggaggaagaagaggtcgaagaggagaagggaagtttctgcgctagtcctgagagtagccgggacgacttccaggaaggtagggagggaatcgtcgcaagattgacagaatcactcttcctggatctgctgggtgaggaaaatggtgggttctgtcaacaggacatgggtgagtcttgcctgctacctccctcgggctctacctctgcccatatgccatgggatgagttcccttcagccggccctaaggaagcacctccttggggtaaggagcagcccttgcacctcgaaccctcaccaccagcgagcccaacccagtcacccgataatctcacatgcactgaaacgccgctggtcatagcaggtaaccctgcatatcgctccttcagcaacagcttgtctcagtcgccatgcccccgggagcttggcccagaccccctcctggcccgccacctagaagaggttgaaccagagatgccctgtgtcccccagctctccgagcccacgaccgtgcctcaacctgaaccagagacctgggaacagatcctgagacggaatgtccttcagcacggtgcggccgctgctcctgtttcagctcccacgtccggctatcaggagttcgtccacgccgtggagcagggaggcactcaggcttctgcagttgtgggtttgggcccccccggcgaagccgggtataaagccttcagctcactcctggccagctccgcggtgtctcctgagaagtgtggattcggcgcaagctcaggagaggaaggatacaaacctttccaggacctgatcccagggtgtcctggagacccagccccagtgcccgtgccgctgtttaccttcgggctggatagggagccgccacgttccccccagagttcccacctaccttccagttctcccgaacatctgggattagaaccaggtgaaaaagtcgaggatatgcctaagccccccctgcctcaagagcaggctactgatcctctcgtggatagcctaggaagtgggatagtgtattccgcactgacttgccacctctgtggacacttgaagcagtgccacggccaagaagatggagggcagacccctgtgatggcaagcccttgttgcggctgctgttgtggcgatcgcagtagtccgccaactactccactgagagctcctgatccttccccaggcggggtcccgctggaagcaagcctgtgtcccgcctccctggccccatccggtatttcagagaaatcaaaatcctctagcagcttccatcctgcgcctggcaatgcccagtcatcctctcaaactccgaagattgttaattttgtgtcagttgggcccacctacatgagggtttcatag

SEQ ID NO: 343282 - DNA, 684 bp, Artificial Sequence
  derived and/or modified sequence
atgggttggctgtgttctgggctgctgtttccagtatcttgcctcgtgctgctacaggtagctagttcagggaatatgaaggttctgcaggagccaacttgcgtgtccgactatatgtcaatctccacgtgtgaatggaaaatgaatgggccaaccaactgctcaaccgagctgagattattgtaccagctcgtatttctactgagcgaggcacacacttgcataccggaaaataacgggggagccggctgtgtgtgtcaccttctcatggacgacgtggtttcagccgataattatacactggatctgtgggcgggccagcagctgctttggaagggatcctttaagcccagcgagcatgtcaaaccacgggcacccgggaatctgactgtccacaccaatgtgtccgatactttgttgcttacttggtcgaacccatacccccccgacaattatctgtataatcatcttacatatgccgtgaatatttggtcggaaaatgaccctgcagacttccgcatttataatgtcacttatctcgagccgagcctgcgcatagcagcttctacacttaaaagcggaatcagttaccgggctagggtgagggcctgggctcaatgctacaacacaacttggtctgagtggtccccaagtacaaagtggcacaacttctctgtgtgctag

SEQ ID NO: 343283 - DNA, 2478 bp, Artificial Sequence
  derived and/or modified sequence
atgggttggctctgttccggcttgctgtttcctgtgtcatgtctggtcttgctacaggtagcctctagcggaaacatgaaggtattgcaggaacctacatgtgtcagcgactacatgagcatcagcacctgcgagtggaaaatgaatgggccaaccaactgcagcacagaactccgcttgctgtaccaactcgtcttcttgctttcagaggctcacacctgtattcctgagaataacggcggggccgggtgtgtttgccacttactgatggacgatgtggtgagtgccgacaactataccctcgacttatgggccggtcagcagttactttggaaaggctccttcaagccatccgagcacgtcaagccaagagcacctggaaaccttactgtacacaccaatgtctcagatacactccttctcacatggtcaaacccatacccacccgataattacttgtacaaccacttaacctatgcggtgaatatctggagcgagaatgatcctgccgacttcagaatctataatgtgacctatctggagccctctctgagaatagcggcctccactctgaaaagcgggattagctatagggcacgagtccgtgcctgggcacagtgctataatacgacttggtcagaatggtccccttccaccaagtggcataactcttacagagagcccttcgaacaacacctactgctgggagtctccgtgtcctgtatcgtgattctggccgtctgtctcctctgttacgtgtctatcaccaaaatcaaaaaagaatggtgggaccagattcctaaccccgcaagatcacggttagtcgctatcatcatacaagatgctcagggctctcagtgggagaaacgctcacgagggcaagaacccgccaaatgtccccactggaagaattgcttgactaagctgctaccctgcttcctggaacacaacatgaagcgagacgaggatcctcataaggcagcaaaagaaatgccgttccaggggtcaggaaaaagcgcctggtgcccagttgaaatttcaaagacagtcttgtggcccgagtcaatcagtgtggtgcgctgcgtggagcttttcgaagccccggtggagtgtgaggaagaagaagaggttgaagaagaaaagggctctttctgcgctagccctgagagcagccgagacgattttcaggaaggccgggagggcatcgtggcacgtttaaccgagtccctgtttcttgatttattgggggaagagaatggtgggttttgccaacaagacatgggcgagagttgtctgcttcccccttccggctcaacctccgctcatatgccttgggacgagttcccaagtgccggccctaaagaggcccccccttgggggaaagagcagcctctgcatctggaacccagtccgccggcttcaccaactcagagcccagacaacctgacatgtactgagacccccctggttatcgcaggaaatcctgcatacaggagcttctccaactcactctcccagtccccctgccctagagagctgggcccagacccattactggccagacacctggaggaagttgagcccgagatgccatgcgtgcctcaactatcggagcccacaacagtgcctcagccagaaccagaaacgtgggaacagatcctgcgtcgaaatgtgctccagcatggcgctgctgctgcccctgtttctgctcccacttcaggatatcaagaattcgtgcatgcggtggaacagggaggaacccaggcatctgctgtagtcgggctaggaccaccgggagaggccggctataaggcattctcgagcctactggcgtcatccgctgtgtccccggaaaaatgtggcttcggtgcgagctccggagaagaaggatacaaacctttccaagatttgatcccaggatgccccggcgacccagcccccgtcccagtgccgctgtttacattcggccttgatagagagccaccccggagtcctcagagctcccatctcccgtcatccagtccagagcacttagggttggaacccggggaaaaagtggaggatatgcctaagccacccttaccccaggagcaggcaacggatcccttagtagatagccttggctctggcatcgtctatagcgctttgacctgccacctgtgcggtcaccttaaacagtgtcatggacaagaagatggcggccagacaccagtcatggccagcccttgttgtggatgttgctgtggcgatcggtcttccccacccactaccccactgcgcgcacccgatccctccccgggaggcgtgccactagaagcgtcattgtgtcctgccagtctggctccgagcggaatatccgaaaagagtaaaagcagcagtagttttcacccagctcctgggaatgcccagtcctcgtcccagacgccaaaaattgtgaatttcgtgtccgtggggccaacgtacatgagagtgagctag

SEQ ID NO: 343284 - DNA, 684 bp, Artificial Sequence
  derived and/or modified sequence
atgggttggctctgtagcggcctgctctttcccgtgagttgcctggtcctcctgcaggttgcaagcagtggaaacatgaaagtcctgcaggaacctacatgtgtgtctgactatatgtccatctcgacgtgtgaatggaagatgaacggtccaacgaattgtagcacagagctgcggcttctatatcagctcgtgtttctattgtccgaagcccacacctgtatcccagaaaataatggcggtgccggctgtgtatgccacctgttaatggacgacgtggtctccgctgataattatactttggatctgtgggcaggacagcagctgttatggaaagggtcgttcaagccctccgaacatgtcaaaccacgcgctccaggaaatctcaccgtccataccaacgtgtctgacactctgcttttgacgtggtccaatccatacccccctgacaattacctgtacaatcatctcacctatgctgtgaatatatggtcggaaaacgaccccgcagattttcgcatttacaatgtgacttacctggaaccttcactcagaatcgccgcttccactctgaaatcaggaataagctatcgggcccgcgtgagagcatgggcccagtgctataatacaacctggtctgagtggagtccgagcaccaagtggcacaactccaacatatgctag

SEQ ID NO: 343285 - DNA, 2478 bp, Artificial Sequence
  derived and/or modified sequence
atggggtggctgtgttcgggacttctttttcctgtgtcatgtcttgttctgctccaggtggcttcctctgggaatatgaaagtgctgcaagagcccacctgcgtttccgattatatgagcatctccacatgcgaatggaaaatgaatggtccaaccaactgttccacagagttacgtctgctgtatcagctagtgttcttgttatccgaagcccacacttgcatccctgagaacaatggaggcgcaggctgtgtgtgtcacctcttgatggacgatgtggtgtcagccgataattacacactggacttgtgggcgggacagcagctcttgtggaaggggtcgtttaaaccctcagagcacgtgaagccacgcgcccccgggaacttaaccgtgcatactaacgtctccgacactctgctcttgacctggtcaaacccataccccccagacaattacctatacaaccacctgacgtacgcagttaacatttggagtgagaacgaccccgcagactttcgaatatataatgttacttatttggaacccagcttacgcatagctgcttctacactgaagtcaggtatatcctatcgcgctcgggtccgggcctgggcccaatgctataacactacttggtctgaatggtcgccctcaaccaaatggcacaacagctaccgggaacccttcgaacaacatctgttgctgggcgtgtcagtatcatgcatagtgattctggctgtgtgcctgctgtgttatgtcagcataacgaaaatcaagaaggagtggtgggaccaaatcccaaaccctgctaggagcaggctggttgctattattatccaggacgcacagggctcacagtgggaaaagagaagccgtggccaggaaccagctaagtgtccccattggaaaaattgcctgaccaaactcctaccctgcttccttgagcacaatatgaagcgagacgaagaccctcacaaggctgccaaggaaatgccctttcaggggtctggcaaatccgcatggtgtccggtagaaatctccaagaccgtcttatggcctgagtctattagcgtggttaggtgtgtggagttgtttgaggcccccgtcgagtgcgaggaagaagaggaggtcgaagaggagaaaggctcattctgcgctagtcccgagtcttcaagggacgattttcaagagggccgggaggggatcgttgctaggctgaccgagtcgctgtttttagacctgctcggggaggaaaacggaggtttctgtcagcaggatatgggcgagtcttgtctgctgccaccctccggatccacaagcgcacacatgccttgggatgaatttcccagcgccgggcctaaggaggctcccccttggggaaaggagcaacccttgcacctggagccctctcctcccgctagtccaacacaatcaccagacaacctcacatgcaccgagaccccccttgttatagccgggaaccctgcctaccgaagtttctctaactcccttagccagagtccctgccctcgcgagctgggacccgacccgctcctcgcccgtcacctcgaggaggtagaacccgaaatgccttgcgtcccacagctgtcagaaccaacaaccgtcccccaaccagagccagagacgtgggaacagatattaaggaggaacgtgctgcaacacggagccgcggccgccccggtcagtgcacctacctctggatatcaagaatttgtgcatgcagttgagcagggcggtacgcaagcctccgccgtggtcggactgggccccccaggcgaggctggctacaaggcgttcagctctttattagctagttccgctgtgagcccagagaagtgtggctttggcgcatcgtcaggggaagaaggctataagccgttccaggaccttatccccggatgtccaggcgacccagcgccagtgcctgttccccttttcacctttggcctggatagagagccccctcgaagcccacagtcgtcacacctgcccagttctagccctgaacatctgggccttgaacccggcgagaaagttgaggacatgcctaagccgcccttgccacaggagcaggcaactgatccactcgtggatagtcttgggagcggtatagtgtactcagctctcacttgccatctctgcgggcacctgaaacagtgtcacggccaagaggacggcggacagaccccagtaatggccagcccttgttgtggctgctgctgcggagacaggtcatctcccccaacaactcctctaagagctcccgacccttcccctggaggcgtgccattggaagcgagcctgtgtcccgcctcattagctccatcaggcatctccgaaaaatcgaaatccagttcttcattccacccagcaccaggaaacgcccagagctcatctcagactccgaaaatcgtgaattttgttagcgttggtcctacttatatgagagtcagctag

SEQ ID NO: 343286 - DNA, 3446 bp, Artificial Sequence
  derived and/or modified sequence
caggtgccttggcatctcccaatggggtggctttgctctgggctcctgttccctgtgagctgcctggtcctgctgcaggtggcaagctctgggaacatgaaggtcttgcaggagcccacctgcgtctccgactacatgagcatctctacttgcgagtggaagatgaatggtcccaccaattgcagcaccgagctccgcctgttgtaccagctggtttttctgctctccgaagcccacacgtgtatccctgagaacaacggaggcgcggggtgcgtgtgccacctgctcatggatgacgtggtcagtgcggataactatacactggacctgtgggctgggcagcagctgctgtggaagggctccttcaagcccagcgagcatgtgaaacccagggccccaggaaacctgacagttcacaccaatgtctccgacactctgctgctgacctggagcaacccgtatccccctgacaattacctgtataatcatctcacctatgcagtcaacatttggagtgaaaacgacccggcagatttcagaatctataacgtgacctacctagaaccctccctccgcatcgcagccagcaccctgaagtctgggatttcctacagggcacgggtgagggcctgggctcagtgctataacaccacctggagtgagtggagccccagcaccaagtggcacaactcctacagggagcccttcgagcagcacctcctgctgggcgtcagcgtttcctgcattgtcatcctggccgtctgcctgttgtgctatgtcagcatcaccaagattaagaaagaatggtgggatcagattcccaacccagcccgcagccgcctcgtggctataataatccaggatgctcaggggtcacagtgggagaagcggtcccgaggccaggaaccagccaagtgcccacactggaagaattgtcttaccaagctcttgccctgttttctggagcacaacatgaaaagggatgaagatcctcacaaggctgccaaagagatgcctttccagggctctggaaaatcagcatggtgcccagtggagatcagcaagacagtcctctggccagagagcatcagcgtggtgcgatgtgtggagttgtttgaggccccggtggagtgtgaggaggaggaggaggtagaggaagaaaaagggagcttctgtgcatcgcctgagagcagcagggatgacttccaggagggaagggagggcattgtggcccggctaacagagagcctgttcctggacctgctcggagaggagaatgggggcttttgccagcaggacatgggggagtcatgccttcttccaccttcgggaagtacgagtgctcacatgccctgggatgagttcccaagtgcagggcccaaggaggcacctccctggggcaaggagcagcctctccacctggagccaagtcctcctgccagcccgacccagagtccagacaacctgacttgcacagagacgcccctcgtcatcgcaggcaaccctgcttaccgcagcttcagcaactccctgagccagtcaccgtgtcccagagagctgggtccagacccactgctggccagacacctggaggaagtagaacccgagatgccctgtgtcccccagctctctgagccaaccactgtgccccaacctgagccagaaacctgggagcagatcctccgccgaaatgtcctccagcatggggcagctgcagcccccgtctcggcccccaccagtggctatcaggagtttgtacatgcggtggagcagggtggcacccaggccagtgcggtggtgggcttgggtcccccaggagaggctggttacaaggccttctcaagcctgcttgccagcagtgctgtgtccccagagaaatgtgggtttggggctagcagtggggaagaggggtataagcctttccaagacctcattcctggctgccctggggaccctgccccagtccctgtccccttgttcacctttggactggacagggagccacctcgcagtccgcagagctcacatctcccaagcagctccccagagcacctgggtctggagccgggggaaaaggtagaggacatgccaaagcccccacttccccaggagcaggccacagacccccttgtggacagcctgggcagtggcattgtctactcagcccttacctgccacctgtgcggccacctgaaacagtgtcatggccaggaggatggtggccagacccctgtcatggccagtccttgctgtggctgctgctgtggagacaggtcctcgccccctacaacccccctgagggccccagacccctctccaggtggggttccactggaggccagtctgtgtccggcctccctggcaccctcgggcatctcagagaagagtaaatcctcatcatccttccatcctgcccctggcaatgctcagagctcaagccagacccccaaaatcgtgaactttgtctccgtgggacccacatacatgagggtctcttaggtgcatgtcctcttgttgctgagtctgcagatgaggactagggcttatccatgcctgggaaatgccacctcctggaaggcagccaggctggcagatttccaaaagacttgaagaaccatggtatgaaggtgattggccccactgacgttggcctaacactgggctgcagagactggaccccgcccagcattgggctgggctcgccacatcccatgagagtagagggcactgggtcgccgtgccccacggcaggcccctgcaggaaaactgaggcccttgggcacctcgacttgtgaacgagttgttggctgctccctccacagcttctgcagcagactgtccctgttgtaactgcccaaggcatgttttgcccaccagatcatggcccacgtggaggcccacctgcctctgtctcactgaactagaagccgagcctagaaactaacacagccatcaagggaatgacttgggcggccttgggaaatcgatgagaaattgaacttcagggagggtggtcattgcctagaggtgctcattcatttaacagagcttccttaggttgatgctggaggcagaatcccggctgtcaaggggtgttcagttaaggggagcaacagaggacatgaaaaattgctatgactaaagcagggacaatttgctgccaaacacccatgcccagctgtatggctgggggctcctcgtatgcatggaacccccagaataaatatgctcagccaccctgtgggccgggcaatccagacagcaggcataaggcaccagttaccctgcatgttggcccagacctcaggtgctagggaaggcgggaaccttgggttgagtaatgctcgtctgtgtgttttagtttcatcacctgttatctgtgtttgctgaggagagtggaacagaaggggtggagttttgtataaataaagtttctttgtctcttt

SEQ ID NO: 343287 - DNA, 794 bp, Artificial Sequence
  derived and/or modified sequence
aaagccccgcgcggcgcgggccagggaagggccacccaggggtcccccacttcccgcttgggcgcccggacggcgaatggagcaggggcgcgcaggtgccttggcatctcccaatggggtggctttgctctgggctcctgttccctgtgagctgcctggtcctgctgcaggtggcaagctctgggaacatgaaggtcttgcaggagcccacctgcgtctccgactacatgagcatctctacttgcgagtggaagatgaatggtcccaccaattgcagcaccgagctccgcctgttgtaccagctggtttttctgctctccgaagcccacacgtgtatccctgagaacaacggaggcgcggggtgcgtgtgccacctgctcatggatgacgtggtcagtgcggataactatacactggacctgtgggctgggcagcagctgctgtggaagggctccttcaagcccagcgagcatgtgaaacccagggccccaggaaacctgacagttcacaccaatgtctccgacactctgctgctgacctggagcaacccgtatccccctgacaattacctgtataatcatctcacctatgcagtcaacatttggagtgaaaacgacccggcagatttcagaatctataacgtgacctacctagaaccctccctccgcatcgcagccagcaccctgaagtctgggatttcctacagggcacgggtgagggcctgggctcagtgctataacaccacctggagtgagtggagccccagcaccaagtggcacaactttagtgtttgc

SEQ ID NO: 343288 - DNA, 3667 bp, Artificial Sequence
  derived and/or modified sequence
cccgcgcggcgcgggccagggaagggccacccaggggtcccccacttcccgcttgggcgcccggacggcgaatggagcaggggcgcgcagataattaaagatttacacacagctggaagaaatcatagagaagccgggcgtggtggctcatgcctataatcccagcacttttggaggctgaggcgggcagatcacttgagatcaggagttcgagaccagcctggtgccttggcatctcccaatggggtggctttgctctgggctcctgttccctgtgagctgcctggtcctgctgcaggtggcaagctctgggaacatgaaggtcttgcaggagcccacctgcgtctccgactacatgagcatctctacttgcgagtggaagatgaatggtcccaccaattgcagcaccgagctccgcctgttgtaccagctggtttttctgctctccgaagcccacacgtgtatccctgagaacaacggaggcgcggggtgcgtgtgccacctgctcatggatgacgtggtcagtgcggataactatacactggacctgtgggctgggcagcagctgctgtggaagggctccttcaagcccagcgagcatgtgaaacccagggccccaggaaacctgacagttcacaccaatgtctccgacactctgctgctgacctggagcaacccgtatccccctgacaattacctgtataatcatctcacctatgcagtcaacatttggagtgaaaacgacccggcagatttcagaatctataacgtgacctacctagaaccctccctccgcatcgcagccagcaccctgaagtctgggatttcctacagggcacgggtgagggcctgggctcagtgctataacaccacctggagtgagtggagccccagcaccaagtggcacaactcctacagggagcccttcgagcagcacctcctgctgggcgtcagcgtttcctgcattgtcatcctggccgtctgcctgttgtgctatgtcagcatcaccaagattaagaaagaatggtgggatcagattcccaacccagcccgcagccgcctcgtggctataataatccaggatgctcaggggtcacagtgggagaagcggtcccgaggccaggaaccagccaagtgcccacactggaagaattgtcttaccaagctcttgccctgttttctggagcacaacatgaaaagggatgaagatcctcacaaggctgccaaagagatgcctttccagggctctggaaaatcagcatggtgcccagtggagatcagcaagacagtcctctggccagagagcatcagcgtggtgcgatgtgtggagttgtttgaggccccggtggagtgtgaggaggaggaggaggtagaggaagaaaaagggagcttctgtgcatcgcctgagagcagcagggatgacttccaggagggaagggagggcattgtggcccggctaacagagagcctgttcctggacctgctcggagaggagaatgggggcttttgccagcaggacatgggggagtcatgccttcttccaccttcgggaagtacgagtgctcacatgccctgggatgagttcccaagtgcagggcccaaggaggcacctccctggggcaaggagcagcctctccacctggagccaagtcctcctgccagcccgacccagagtccagacaacctgacttgcacagagacgcccctcgtcatcgcaggcaaccctgcttaccgcagcttcagcaactccctgagccagtcaccgtgtcccagagagctgggtccagacccactgctggccagacacctggaggaagtagaacccgagatgccctgtgtcccccagctctctgagccaaccactgtgccccaacctgagccagaaacctgggagcagatcctccgccgaaatgtcctccagcatggggcagctgcagcccccgtctcggcccccaccagtggctatcaggagtttgtacatgcggtggagcagggtggcacccaggccagtgcggtggtgggcttgggtcccccaggagaggctggttacaaggccttctcaagcctgcttgccagcagtgctgtgtccccagagaaatgtgggtttggggctagcagtggggaagaggggtataagcctttccaagacctcattcctggctgccctggggaccctgccccagtccctgtccccttgttcacctttggactggacagggagccacctcgcagtccgcagagctcacatctcccaagcagctccccagagcacctgggtctggagccgggggaaaaggtagaggacatgccaaagcccccacttccccaggagcaggccacagacccccttgtggacagcctgggcagtggcattgtctactcagcccttacctgccacctgtgcggccacctgaaacagtgtcatggccaggaggatggtggccagacccctgtcatggccagtccttgctgtggctgctgctgtggagacaggtcctcgccccctacaacccccctgagggccccagacccctctccaggtggggttccactggaggccagtctgtgtccggcctccctggcaccctcgggcatctcagagaagagtaaatcctcatcatccttccatcctgcccctggcaatgctcagagctcaagccagacccccaaaatcgtgaactttgtctccgtgggacccacatacatgagggtctcttaggtgcatgtcctcttgttgctgagtctgcagatgaggactagggcttatccatgcctgggaaatgccacctcctggaaggcagccaggctggcagatttccaaaagacttgaagaaccatggtatgaaggtgattggccccactgacgttggcctaacactgggctgcagagactggaccccgcccagcattgggctgggctcgccacatcccatgagagtagagggcactgggtcgccgtgccccacggcaggcccctgcaggaaaactgaggcccttgggcacctcgacttgtgaacgagttgttggctgctccctccacagcttctgcagcagactgtccctgttgtaactgcccaaggcatgttttgcccaccagatcatggcccacgtggaggcccacctgcctctgtctcactgaactagaagccgagcctagaaactaacacagccatcaagggaatgacttgggcggccttgggaaatcgatgagaaattgaacttcagggagggtggtcattgcctagaggtgctcattcatttaacagagcttccttaggttgatgctggaggcagaatcccggctgtcaaggggtgttcagttaaggggagcaacagaggacatgaaaaattgctatgactaaagcagggacaatttgctgccaaacacccatgcccagctgtatggctgggggctcctcgtatgcatggaacccccagaataaatatgctcagccaccctgtgggccgggcaatccagacagcaggcataaggcaccagttaccctgcatgttggcccagacctcaggtgctagggaaggcgggaaccttgggttgagtaatgctcgtctgtgtgttttagtttcatcacctgttatctgtgtttgctgaggagagtggaacagaaggggtggagttttgtataaataaagtttctttgtctcttta

SEQ ID NO: 343289 - DNA, 1106 bp, Artificial Sequence
  derived and/or modified sequence
ccccgcgcggcgcgggccagggaagggccacccaggggtcccccacttcccgcttgggcgcccggacggcgaatggagcaggggcgcgcagataattaaagatttacacacagctggaagaaatcatagagaagccgggcgtggtggctcatgcctataatcccagcacttttggaggctgaggcgggcagatcacttgagatcaggagttcgagaccagcctggtgccttggcatctcccaatggggtggctttgctctgggctcctgttccctgtgagctgcctggtcctgctgcaggtggcaagctctgggaacatgaaggtcttgcaggagcccacctgcgtctccgactacatgagcatctctacttgcgagtggaagatgaatggtcccaccaattgcagcaccgagctccgcctgttgtaccagctggtttttctgctctccgaagcccacacgtgtatccctgagaacaacggaggcgcggggtgcgtgtgccacctgctcatggatgacgtggtcagtgcggataactatacactggacctgtgggctgggcagcagctgctgtggaagggctccttcaagcccagcgagcatgtgaaacccagggccccaggaaacctgacagttcacaccaatgtctccgacactctgctgctgacctggagcaacccgtatccccctgacaattacctgtataatcatctcacctatgcagtcaacatttggagtgaaaacgacccggcagatttcagaatctataacgtgacctacctagaaccctccctccgcatcgcagccagcaccctgaagtctgggatttcctacagggcacgggtgagggcctgggctcagtgctataacaccacctggagtgagtggagccccagcaccaagtggcacaactcaaatatttgctgagttcctcctacatggctagccctgtgctagacactggggaatcggcgatgaacaaagcagatagaaatccccactcttgtggagctgacattctggagggagagacaaaaagcaaacatataaagaaagaaagaaatcacatggatctggatgacagtgagtgctgggaagaaaataaaa

SEQ ID NO: 343290 - DNA, 2656 bp, Artificial Sequence
  derived and/or modified sequence
gcgcggcgcgggccagggaagggccacccaggggtcccccacttcccgcttgggcgcccggacggcgaatggagcaggggcgcgcaggtgccttggcatctcccaatggggtggctttgctctgggctcctgttccctgtgagctgcctggtcctgctgcaggtggcaagctctgggaacatgaaggtcttgcaggagcccacctgcgtctccgactacatgagcatctctacttgcgagtggaagatgaatggtcccaccaattgcagcaccgagctccgcctgttgtaccagctggtttttctgctctccgaagcccacacgtgtatccctgagaacaacggaggcgcggggtgcgtgtgccacctgctcatggatgacgtggtcagtgcggataactatacactggacctgtgggctgggcagcagctgctgtggaagggctccttcaagcccagcgagcatgtgaaacccagggccccaggaaacctgacagttcacaccaatgtctccgacactctgctgctgacctggagcaacccgtatccccctgacaattacctgtataatcatctcacctatgcagtcaacatttggagtgaaaacgacccggcagatttcagaatctataacgtgacctacctagaaccctccctccgcatcgcagccagcaccctgaagtctgggatttcctacagggcacgggtgagggcctgggctcagtgctataacaccacctggagtgagtggagccccagcaccaagtggcacaactcctacagggagcccttcgagcagcacctcctgctgggcgtcagcgtttcctgcattgtcatcctggccgtctgcctgttgtgctatgtcagcatcaccaagattaagaaagaatggtgggatcagattcccaacccagcccgcagccgcctcgtggctataataatccaggatgctcaggggtcacagtgggagaagcggtcccgaggccaggaaccagccaagtgcccacactggaagaattgtcttaccaagctcttgccctgttttctggagcacaacatgaaaagggatgaagatcctcacaaggctgccaaagagatgcctttccagggctctggaaaatcagcatggtgcccagtggagatcagcaagacagtcctctggccagagagcatcagcgtggtgcgatgtgtggagttgtttgaggccccggtggagtgtgaggaggaggaggaggtagaggaagaaaaagggagcttctgtgcatcgcctgagagcagcagggatgacttccaggagggaagggagggcattgtggcccggctaacagagagcctgttcctggacctgctcggagaggagaatgggggcttttgccagcaggacatgggggagtcatgccttcttccaccttcgggaagtacgagtgctcacatgccctgggatgagttcccaagtgcagggcccaaggaggcacctccctggggcaaggagcagcctctccacctggagccaagtcctcctgccagcccgacccagagtccagacaacctgacttgcacagagacgcccctcgtcatcgcaggcaaccctgcttaccgcagcttcagcaactccctgagccagtcaccgtgtcccagagagctgggtccagacccactgctggccagacacctggaggaagtagaacccgagatgccctgtgtcccccagctctctgagccaaccactgtgccccaacctgagccagaaacctgggagcagatcctccgccgaaatgtcctccagcatggggcagctgcagcccccgtctcggcccccaccagtggctatcaggagtttgtacatgcggtggagcagggtggcacccaggccagtgcggtggtgggcttgggtcccccaggagaggctggttacaaggccttctcaagcctgcttgccagcagtgctgtgtccccagagaaatgtgggtttggggctagcagtggggaagaggggtataagcctttccaagacctcattcctggctgccctggggaccctgccccagtccctgtccccttgttcacctttggactggacagggagccacctcgcagtccgcagagctcacatctcccaagcagctccccagagcacctgggtctggagccgggggaaaaggtagaggacatgccaaagcccccacttccccaggagcaggccacagacccccttgtggacagcctgggcagtggcattgtctactcagcccttacctgccacctgtgcggccacctgaaacagtgtcatggccaggaggatggtggccagacccctgtcatggccagtccttgctgtggctgctgctgtggagacaggtcctcgccccctacaacccccctgagggccccagacccctctccaggtggggttccactggaggccagtctgtgtccggcctccctggcaccctcgggcatctcagagaagagtaaatcctcatcatccttccatcctgcccctggcaatgctcagagctcaagccagacccccaaaatcgtgaactttgtctccgtgggacccacatacatgagggtctcttaggtgcatgtcctcttgttgctgagtctgcagatgaggactagggcttatccatgcctgggaaatgccacctcct

SEQ ID NO: 343291 - DNA, 2478 bp, Artificial Sequence
  derived and/or modified sequence
atgggctggctgtgcagcggcctgctcttccctgtgtcctgcctggtgctgctgcaggtggccagcagcggcaacatgaaggtgctgcaggagcccacctgtgtgtctgactacatgagcatcagcacctgtgagtggaagatgaatggccccaccaactgcagcacagagctgcggctgctgtaccagctggtgttcctgctgtctgaggcccacacctgcatcccagaaaataatggaggagctggctgtgtgtgccacctgctgatggatgatgtggtgtctgctgacaactacaccctggacctgtgggccggccagcagctgctgtggaagggcagcttcaagcccagcgagcacgtgaagccccgggcccctggcaacctgactgtgcacaccaacgtgtctgacaccctgctgctgacctggagcaacccctaccccccagacaactacctgtacaaccacctgacctatgctgtgaacatctggagcgaaaatgaccctgctgacttccgcatctacaacgtgacctacctggagcccagcctgagaattgctgccagcaccctgaagagcggcatctcctaccgggcccgggtgcgggcctgggcccagtgctacaacaccacctggagcgagtggagccccagcaccaagtggcacaacagctaccgggagccctttgagcagcacctgctgctgggcgtgtctgtgtcctgcatcgtcatcctggccgtgtgcctgctgtgctacgtgtccatcaccaagatcaagaaggagtggtgggaccagatccccaacccagcccggagccggctggtggccatcatcatccaggatgcccagggcagccagtgggagaagaggagccggggccaggagcccgccaagtgcccccactggaagaactgcctgaccaagctgctgccctgcttcctggagcacaacatgaagagagatgaggacccccacaaggccgccaaggagatgcccttccagggcagcggcaagagcgcctggtgccctgtggagatcagcaagacagtgctgtggccagagagcatctctgtggtgcgctgtgtggagctgtttgaggcccctgtggagtgtgaggaggaggaggaggtggaggaggagaagggcagcttctgtgccagccctgagagcagcagagatgacttccaggagggccgggagggcatcgtggcccggctgacagagagcctcttcctggacctgctgggggaggagaatggaggcttctgccagcaggacatgggagagagctgcctgctgccccccagcggcagcaccagcgcccacatgccctgggatgagttccccagcgctggccccaaggaggccccaccctggggcaaggagcagcccctgcacctggagcccagccccccagccagccccacccagagcccagacaacctgacctgcacagagacccccctggtgattgctggcaacccagcctaccgctccttcagcaacagcctgagccagagcccctgcccccgggagctgggccctgaccccctgctggcccggcacctggaggaggtggagcctgagatgccctgtgtgccccagctgtctgagcccaccaccgtgccccagcctgagcctgagacctgggagcagatcctgcggagaaatgtgctgcagcacggggctgctgctgcccctgtgtctgcccccaccagcggctaccaggagtttgtgcatgctgtggagcagggcggcacccaggccagcgctgtggtgggcctgggccccccaggagaggccggctacaaggccttcagcagcctgctggccagcagcgctgtgtccccagagaagtgtggctttggagccagcagcggggaggagggctacaagcccttccaggacctgatccctggctgccctggggaccctgcccctgtgcctgtgcccctcttcaccttcggcctggaccgggagcccccaagaagcccccagagcagccacctgcccagcagcagccctgagcacctgggcctggagcccggggagaaggtggaggacatgcccaagccacccctgccccaggagcaggccacagaccccctggtggacagcctgggcagcggcatcgtgtacagcgccctgacctgccacctgtgtggccacctgaagcagtgccacggccaggaggatggcggccagacccctgtgatggccagcccctgctgcggctgctgctgcggggacaggagcagcccccccaccacccccctgcgggccccagaccccagccctgggggcgtgcccctggaggccagcctgtgcccagccagcctggcccccagcggcatcagcgagaagagcaagagcagcagcagcttccacccagcccctggaaatgcccagagcagcagccagacccccaagatcgtgaactttgtgtctgtgggccccacctacatgagggtgtcctag

SEQ ID NO: 343292 - DNA, 684 bp, Artificial Sequence
  derived and/or modified sequence
atgggctggctgtgcagcggcctgctcttccctgtgtcctgcctggtgctgctgcaggtggccagcagcggcaacatgaaggtgctgcaggagcccacctgtgtgtctgactacatgagcatcagcacctgtgagtggaagatgaatggccccaccaactgcagcacagagctgcggctgctgtaccagctggtgttcctgctgtctgaggcccacacctgcatcccagaaaataatggaggagctggctgtgtgtgccacctgctgatggatgatgtggtgtctgctgacaactacaccctggacctgtgggccggccagcagctgctgtggaagggcagcttcaagcccagcgagcacgtgaagccccgggcccctggcaacctgactgtgcacaccaacgtgtctgacaccctgctgctgacctggagcaacccctaccccccagacaactacctgtacaaccacctgacctatgctgtgaacatctggagcgaaaatgaccctgctgacttccgcatctacaacgtgacctacctggagcccagcctgagaattgctgccagcaccctgaagagcggcatctcctaccgggcccgggtgcgggcctgggcccagtgctacaacaccacctggagcgagtggagccccagcaccaagtggcacaacttctctgtgtgctag

SEQ ID NO: 343293 - DNA, 684 bp, Artificial Sequence
  derived and/or modified sequence
atgggctggctgtgcagcggcctgctcttccctgtgtcctgcctggtgctgctgcaggtggccagcagcggcaacatgaaggtgctgcaggagcccacctgtgtgtctgactacatgagcatcagcacctgtgagtggaagatgaatggccccaccaactgcagcacagagctgcggctgctgtaccagctggtgttcctgctgtctgaggcccacacctgcatcccagaaaataatggaggagctggctgtgtgtgccacctgctgatggatgatgtggtgtctgctgacaactacaccctggacctgtgggccggccagcagctgctgtggaagggcagcttcaagcccagcgagcacgtgaagccccgggcccctggcaacctgactgtgcacaccaacgtgtctgacaccctgctgctgacctggagcaacccctaccccccagacaactacctgtacaaccacctgacctatgctgtgaacatctggagcgaaaatgaccctgctgacttccgcatctacaacgtgacctacctggagcccagcctgagaattgctgccagcaccctgaagagcggcatctcctaccgggcccgggtgcgggcctgggcccagtgctacaacaccacctggagcgagtggagccccagcaccaagtggcacaacagcaacatctgctag

SEQ ID NO: 343294 - DNA, 2478 bp, Artificial Sequence
  derived and/or modified sequence
atgggctggctgtgcagcggcctgctgttccccgtgagctgcctggttttactgcaggtggcatcgagcggaaatatgaaggtgcttcaggagcctacatgcgtcagcgattatatgtccataagtacctgcgaatggaagatgaatgggcctacaaattgtagtacagaattgagactgctgtaccagctggttttcctcctctccgaggcccacacctgtattccagagaataatggcggagccggctgcgtttgtcatctcttaatggatgatgttgtgtccgccgataactatacccttgacctctgggcaggccagcaactgttgtggaaaggttcatttaagccatcagagcacgtcaagcccagggccccagggaacctgactgttcatacaaatgtgtcagataccctcctgctcacctggtccaatccttatccgcctgataactacttgtataatcacctcacctatgcagttaacatttggtcagaaaatgatcccgctgacttcaggatctacaatgtcacctatctcgagccgtctctcaggatcgccgccagcacactaaagagcggcatctcatatagggctagagtgcgcgcttgggctcagtgctacaacaccacatggtctgagtggtcaccctctacgaaatggcacaacagctaccgagagcccttcgagcagcacttgttgttgggcgtcagtgtgtcctgcatcgtgattctagccgtttgcctcctgtgctacgtatctatcacaaaaatcaaaaaggaatggtgggatcagatcccaaaccctgcccgtagccggctggttgctatcatcattcaagatgctcaaggctctcagtgggaaaaaaggagccggggccaggaaccagctaaatgcccgcattggaaaaattgcctgactaagctacttccttgctttcttgaacacaatatgaaacgagacgaggacccacataaagccgctaaggagatgcccttccaggggtctggcaaatccgcttggtgccccgtggagattagcaagacagtcctgtggccagaatcaatttccgtcgtgcgctgcgtggaactgttcgaggctccagtggagtgcgaagaggaagaagaggtagaggaggagaaggggtcattctgcgcttctcctgagagctcccgtgacgatttccaggagggtcgagaagggatagtcgctagattaaccgagagtctgtttctcgacttgctcggtgaggagaacgggggcttctgccagcaagacatgggtgagagctgcttgttgccaccaagcgggtccacatcagctcatatgccctgggacgaatttcccagcgccggaccaaaggaagcacccccatggggaaaagagcagcccctacacctcgagccaagtccaccggcctctcctacccagtcgcccgataacctgacatgcaccgagacaccgttggtaatagccggcaatccagcttatcggagcttctcgaactctctatcacagtcaccctgccctagagagttgggacccgatccactccttgctcgtcaccttgaggaggtcgaacccgaaatgccttgcgtgcctcagttgtctgagcccaccacagtgcctcagcccgagcccgaaacctgggagcagattctgagacgtaatgttctgcagcatggggcagctgctgctcccgtcagcgctccaaccagtggctatcaggaattcgtgcatgccgtggaacaggggggtacccaggcaagtgctgtggtgggcttaggtccccccggagaagccggatacaaagcattctccagtcttctggccagttccgctgtatccccagagaagtgtggattcggtgcctcaagcggggaggaagggtacaagccgttccaggatctgatcccaggttgtcccggcgatcccgcccctgtgccggtacccctatttacattcggcttggacagggagccacctcgctctcctcagtctagccacctgccttcgtcttcccctgaacatctggggctggaacccggcgagaaagttgaagacatgcccaagcccccacttccccaggaacaggccactgatccattggtcgattctcttggctctggtatcgtgtattccgccttaacatgtcacctctgtggtcacctaaaacagtgtcacggccaggaggatggcggccaaacccccgttatggccagtccatgttgtgggtgctgctgcggggatcggtcgagccctcctactactcccctgcgcgcccctgatccctcccctggcggcgtgcccttggaggcctctttgtgtcctgcatctctcgcaccttccggcatttctgaaaaatctaagtctagttcctcgtttcatcccgctcccggcaacgcccaaagttccagtcagaccccgaaaatcgtcaactttgtgtctgtgggacccacctacatgcgcgtatcctag

SEQ ID NO: 343295 - DNA, 684 bp, Artificial Sequence
  derived and/or modified sequence
atgggctggctgtgcagcggcctgctgttccccgtgagctgcctggtgttgcttcaggtggctagtagcggcaacatgaaggtgctgcaggaacccacgtgcgtttcagactatatgtctataagtacttgtgaatggaagatgaacggccccaccaactgcagcacggagcttcgacttttgtaccaattagtctttctgctctcagaggcgcacacttgtatacccgagaataacggcggtgctgggtgtgtatgccaccttttgatggatgatgtcgtgtccgcagacaattacacactggacctctgggccgggcaacaattgctgtggaaaggctcttttaagccctcggaacacgtcaaacctcgagcacctggcaatctgactgttcacaccaatgtctccgatacccttttactgacgtggtccaacccttaccctcccgacaactacctatataatcacctgacctacgcagtgaatatctggtccgaaaatgatcccgccgacttccgaatatataatgtgacctatctggaaccgtcgctgcggattgcagcctctactctaaagagtggtattagctaccgtgcgcgggttagggcctgggcacagtgctacaacaccacatggtccgagtggagcccatcaaccaaatggcataatttctccgtgtgctag

SEQ ID NO: 343296 - DNA, 2478 bp, Artificial Sequence
  derived and/or modified sequence
atgggctggctgtgcagcggcctgctgttccccgtgagctgcctggtgctgctccaggttgccagttccgggaatatgaaagtgctgcaggaaccaacgtgcgtcagcgactacatgtcaatttcaacttgcgagtggaagatgaacggtcccacaaactgctctacggagctgcgacttttataccagctggtgtttctcctctctgaagcacatacgtgcattcctgagaataatggcggagccggctgcgtttgtcacctgctgatggacgacgtggtctcagctgataactacacgctggacctgtgggccgggcagcagctcctgtggaagggctcctttaaaccttccgagcatgtgaagcctagagcccccgggaatctcaccgtgcacaccaatgttagtgataccctcctccttacctggagtaatccatatccccctgataactatttgtacaatcatctcacttacgctgttaatatctggagcgaaaatgaccctgctgattttagaatttacaacgtcacatatctggagcccagccttcgcatcgcggcttccaccctcaagtctggtatttcatatcgtgcaagggtgcgagcatgggctcaatgctataataccacctggtctgagtggagcccctcaactaagtggcacaatagctaccgcgagccttttgaacagcacttattgctaggcgtgtctgtaagttgtatcgtgattcttgcagtctgtctgctgtgctacgtatcaatcacaaaaatcaagaaagaatggtgggaccaaatcccaaatccagccagaagtagactcgtagcgataattatccaggatgcccaaggttcacaatgggagaagagatccagaggccaagagcctgctaagtgcccccattggaagaactgtctgacaaaactcttgccatgctttctcgagcataatatgaagagggacgaagatcctcacaaggccgcaaaggagatgccttttcaaggcagcggaaagagtgcttggtgcccagtggagatctctaaaactgttctttggcctgaaagcatttccgtcgtgcggtgtgttgagctgtttgaggccccagtcgaatgcgaagaggaagaggaggttgaagaggaaaaaggctccttctgcgctagccctgagagcagcagggacgactttcaggaggggagggaagggatcgttgcacggttgactgaatcactgttcctggacttgcttggagaagaaaacggaggattctgccagcaggatatgggggaaagttgtctccttccacccagtggatccacaagtgcccacatgccctgggatgagttcccttctgccgggcctaaagaggcaccaccatggggcaaagagcagcccctgcatctggagcctagccctcctgcctctcccacccagtccccagacaacctgacctgtactgaaacgccactcgtgattgctggaaatcccgcttaccgaagcttttccaactcactgtctcagtcaccatgtcctagagaactgggtcccgacccattgctcgctcggcacttggaggaagtggagcccgagatgccgtgtgtgcctcagttgtcagagccaactacagtgccccagcccgaacctgaaacctgggagcagatcctaagaaggaacgtgcttcagcatggcgcggccgcagcaccggtgagcgcccctacctctggctaccaagagttcgtacacgcagtggagcagggtggaacccaggcctccgccgtggtgggactcgggcctccaggagaggccggatacaaggctttctcaagtttactcgcctcctcagctgtgtcaccagagaagtgcggatttggggctagctcaggcgaggaaggatacaaaccttttcaagacctgatccccgggtgccccggcgatccagctccagttcctgtccccctgttcacttttgggctagaccgtgaacccccgcgctcgcctcagtcatcccatctaccctcctcatctcccgaacatctcggactagaacccggggagaaggtggaagacatgccaaagcctccactgccacaagaacaggccaccgatcctctggtggattccttagggtccggaattgtctacagtgctctgacatgtcacctgtgtggtcacctcaaacagtgtcacggccaggaggacggtggacagaccccggtgatggctagtccctgttgcggttgctgttgcggggacaggagcagcccaccgaccacaccactgagggctcccgatccctcaccaggaggggttcccctcgaggcatccttgtgtccggcctctctcgcaccttcaggaatttcggaaaagtcaaagtcatcatctagctttcatcccgctccgggtaacgcccagagctcgtcgcagactccaaaaatagtcaacttcgtgtctgtgggtccaacttacatgagggtgagttag

SEQ ID NO: 343297 - DNA, 684 bp, Artificial Sequence
  derived and/or modified sequence
atgggctggctgtgcagcggcctgctgttccccgtgagctgcctggtactattgcaagtggcctcgtcaggcaatatgaaggtcctgcaagaacccacctgcgtttctgattacatgtctatctcaacttgcgagtggaaaatgaatggcccgacaaattgtagcacagagttaaggctgctctatcagctggtctttctgttgtctgaagctcacacctgtatccctgaaaacaatggcggagccggctgcgtctgtcacctcttgatggacgatgtggtcagcgctgataactacacactcgatctctgggctggacagcagctactgtggaagggttcattcaagccctccgaacacgtcaaacctcgggcacccggcaacctcacggtgcatacaaatgtgtcagacacacttttgctcacatggtcgaacccctacccgccggacaactatttgtataatcatctcacctatgctgtaaacatatggtcggagaacgatccagctgacttccgtatctataacgttacatatctggagccttcactgcgtatagctgcttccaccctgaagagtggaatttcatatagagccagggttcgagcttgggctcaatgctacaataccacatggtcagaatggagccccagtaccaaatggcataattctaatatttgctag

SEQ ID NO: 343298 - DNA, 2478 bp, Artificial Sequence
  derived and/or modified sequence
atgggctggctgtgcagcggcctgctgttccccgtgagctgcctggtgcttctgcaggttgccagttcgggtaatatgaaagtgctccaggaacctacgtgcgtgagcgactacatgtcaataagcacctgtgaatggaagatgaatggtcctaccaactgctccactgaactcagactcctgtaccagctggtgtttctcttatccgaggcccatacatgtattccggaaaacaatgggggcgctgggtgcgtgtgccacctattaatggatgacgttgtcagcgccgacaactatactctggacctgtgggctggacagcaattgctgtggaagggcagttttaaaccgagcgagcatgtgaaacctcgggctccaggcaacctgacagtgcacacaaacgtgtcagatactctgctcctcacctggtcaaatccctatccccccgacaattacttgtacaatcaccttacctatgcggtgaatatctggtctgagaacgatccagcagacttccgtatttataatgtgacatatctggagccttctctcagaattgccgcaagcacactgaaatccggaatctcttatcgggctcgtgtgcgcgcctgggctcaatgctacaatacgacgtggagcgaatggtccccgtccactaaatggcacaattcgtatcgggagccatttgagcagcacctcttgctgggtgtgtcagtttcctgtatcgttatcttagcggtttgtctgctatgctatgtgtccataactaagattaagaaagagtggtgggatcagatacccaaccctgcgaggtccaggctggtggccattatcattcaggacgcccagggctcgcagtgggaaaagcgaagtaggggacaggaacctgctaaatgcccgcactggaaaaactgtctgaccaagttactgccttgtttcttagagcacaacatgaagcgagacgaggatccccataaggcagcaaaggagatgccttttcaggggtcgggaaaatctgcctggtgcccggtggaaattagcaaaacagtcctatggccagagagcatttctgtagttaggtgcgtcgaactgtttgaggcgccagtggagtgcgaggaagaagaagaagtagaggaagagaaagggagcttctgcgcaagccccgaatccagcagggatgactttcaggaaggccgggagggcatagttgcacggctcacagagtcactattcctggatctcctcggcgaggagaacggtgggttctgccagcaagacatgggagaaagctgtctgctcccaccaagtgggagtaccagcgcacacatgccttgggatgaattcccaagtgctggccccaaagaggcccctccatgggggaaggagcagccacttcacctggagccgtctccacctgctagccctactcaatcgcctgacaatctcacttgcactgaaacaccgcttgtgatcgccggcaatcccgcttacagatccttttcaaactccttatcacagtccccttgtccgcgcgagttgggccccgaccctctgctcgcgcgacacctggaggaagtcgagcctgaaatgccttgcgtgcctcaactttccgaaccaaccactgtgcctcagcccgagcctgagacctgggagcagattctgcggcggaatgtgctgcaacacggagcggcagccgccccagtgagcgctccaacttccgggtaccaagagtttgtgcatgcggtagaacagggaggaacacaggcttccgccgtagtagggcttggaccccccggagaagccggctataaggctttcagttctctcctcgcctcttctgccgtgtcccccgagaaatgcggctttggcgccagtagcggcgaggaagggtacaagcctttccaggacctcatccctggctgccctggcgatcccgccccggttcccgttcccttatttacattcggtctcgacagggaaccacctcggtctcctcaatcatcacatctcccttctagttcgcctgaacatcttgggttagaacccggagagaaagtagaagatatgccaaaacctccccttcctcaggaacaagcaaccgatcctctggtcgactcactgggaagcggcattgtgtactccgctttgacttgtcacttgtgtggccaccttaaacagtgccacgggcaggaagatgggggccagacacctgtgatggcctctccatgttgcgggtgctgctgtggcgaccgaagttcccctcccacgactcctctccgcgctcctgaccctagtccaggcggggtgcccctggaagcaagtctctgtcctgcaagcctcgccccatcggggatatcagaaaagtccaaatcttcatccagttttcatcccgcgcctggcaacgctcagagctcctcccagacccctaagattgtcaactttgtgagcgttggaccaacgtacatgcgagtatcttag

SEQ ID NO: 343299 - DNA, 2478 bp, Artificial Sequence
  derived and/or modified sequence
atgggatggctgtgctctggactgctcttccctgtgtcctgcctcgtactcctccaggttgcatccagcggcaatatgaaggtcctacaggagcccacgtgtgtctccgactacatgtcaatcagcacgtgcgagtggaaaatgaacggacccacaaactgctccacagaacttcggttactgtatcagctggtatttttgctctcagaagcccacacctgcatccccgaaaataacggaggagcaggatgcgtgtgtcacctccttatggatgacgtggtatctgctgacaattacactctggacctgtgggccggacagcagctgctctggaagggatctttcaagccttcagaacacgtcaagcccagagccccaggcaatctcacggtgcatacaaatgtttccgacactctgcttctgacttggagcaacccttatcctcccgataattacttgtacaatcacttgacatacgctgtaaacatttggtctgaaaacgaccccgcagacttccgaatttataatgttacttacctggagccgtcactgaggatcgccgcttccactctgaagagcgggatttcctatcgcgctcgggtaagggcctgggcacaatgttataatactacttggagtgagtggagtccttccacgaaatggcataattcctaccgagaaccctttgagcagcatctgttgttaggagtgtcagtaagctgtatcgttattttggccgtgtgtctcttgtgctatgtttctatcaccaagattaaaaaagagtggtgggaccagatacccaatcctgccaggtcccgcctggtcgccattattatacaggacgcacaggggtcccagtgggaaaagaggagccgtggacaggaacctgccaaatgcccacattggaagaactgcctcaccaagttgctgccttgttttcttgagcacaacatgaagcgcgatgaagacccacataaagctgccaaagaaatgccattccagggctccggtaagagcgcctggtgcccagtggagattagcaaaaccgtcctctggcccgagagcatttccgtcgtacgatgtgtggaattgttcgaggcacccgtggaatgtgaggaggaagaggaggtggaagaggaaaaggggagtttctgcgcatctccggaatcaagcagggatgatttccaggagggtcgggaagggatcgtggctcgcctaaccgagtcattgtttctagatctcctgggtgaggagaacggcggtttctgccagcaggacatgggggaatcctgtttactccctccctccgggtctacatcagcccacatgccttgggatgagtttccaagcgcgggacctaaagaggcgcctccatggggcaaagaacagcccctccacctcgaaccctctccgcctgctagccctacacaatccccagacaatctgacgtgcacggagacacccctggtgatcgcgggaaaccccgcttatagaagcttcagtaactctctctcacaaagcccctgtcccagggagctgggcccagaccccctccttgctcggcatctggaagaggtcgagcccgagatgccctgtgttccacaactgtcggagcctaccaccgtccctcaaccagagccggaaacatgggagcagatcctgaggcgcaatgtcctccagcacggggcagccgcagcccctgtgagcgctcctacatcggggtaccaggaattcgtgcatgccgttgaacagggaggaacgcaggcatctgcagtggtaggtcttggccctcccggagaagctgggtataaggccttctcatccctcctggctagcagcgccgtcagccctgaaaagtgtggattcggagcgagttcaggtgaagaaggctacaaacccttccaggacctgattccagggtgtcccggtgaccctgcgccagtaccagtgccattatttacattcggtctcgacagagaaccaccacgtagcccacaatcaagccatctaccctctagcagcccagagcatcttggtctggaacctggagaaaaggtagaggatatgcccaagccccctctgccccaagaacaagccaccgaccctctagtggattcccttgggagcgggatagtttactccgcccttacctgccatctgtgcgggcacttgaagcagtgtcatggccaggaagacgggggacagactccagttatggcctcaccctgctgtggatgctgttgtggcgaccggtcctcaccacccacgacacccctccgtgcacccgacccatctcctggcggagttccactcgaagctagcctgtgcccggcatccttggccccaagtggaattagtgaaaagtcaaagtcgtcatccagctttcatccagcccctggcaacgcgcagtccagtagccaaacaccaaagatagtgaattttgtgagcgtgggtcctacttacatgcgggtgtcttag

SEQ ID NO: 343300 - DNA, 684 bp, Artificial Sequence
  derived and/or modified sequence
atgggatggctttgctctggcctactgttcccagttagttgtctggtgctgttacaggtcgcgtccagcggcaatatgaaggtgctgcaggagccaacctgcgtgagtgactacatgtcaatctccacttgcgagtggaagatgaatggtccgactaattgttcaacagagctgaggcttttgtatcagttagtattcttgttgagtgaagctcatacctgcatcccagagaataacgggggtgcagggtgcgtgtgtcatctcctaatggacgacgtcgtcagtgccgacaactataccctggatctctgggccggtcagcagttgttgtggaaaggctccttcaagccaagcgaacacgttaaacccagagccccaggtaatctgacggtgcatactaatgtgtccgataccctcctgctgacctggtccaacccatacccacccgataattatctctacaatcacttaacatacgctgttaatatatggagcgaaaatgaccccgctgattttaggatctacaatgttacttacttggaaccatctttgagaattgctgctagcactctgaaatccgggatttcatatcgcgcacgtgtaagggcttgggcgcagtgctataatactacttggagtgagtggtctccttctacgaagtggcacaatttttctgtatgctag

SEQ ID NO: 343301 - DNA, 2478 bp, Artificial Sequence
  derived and/or modified sequence
atgggctggctgtgcagcgggttgctctttccagtgtcatgcctcgtcctgctccaggtagcttccagcggaaatatgaaagtccttcaggagcccacctgtgtaagcgactatatgtccatcagtacttgcgaatggaagatgaacggccctaccaattgttccactgagcttaggctcctgtaccagctcgtgttccttctttctgaggcccacacttgcattccagagaataacggtggagcgggatgcgtgtgccacctacttatggacgacgtggtgtcagcagataactacacactggacctgtgggctggccagcagctgttgtggaagggatccttcaaaccaagcgaacacgttaaaccccgagcgccaggcaacttgaccgttcacacgaatgtaagcgataccctgctcctcacatggtctaatccctacccccctgataactacttgtacaatcatttgacgtatgccgtgaatatctggagtgagaatgaccccgcagactttaggatctataacgtgacctacctcgagccatccctgcgcattgctgcatccacactcaagagcggtatttcatacagagcccgtgttagagcctgggctcaatgttacaatactacctggtccgaatggtctccatccacgaaatggcataacagttacagggaacccttcgaacagcacctgctgctgggagtgagcgtgagttgcatcgtaattctagcagtgtgccttctttgttatgtgtcgatcacaaagatcaagaaagagtggtgggaccagattcctaatccggctagaagcaggctagtcgcgataatcatccaggatgcgcaggggtctcagtgggagaagcgcagccgcggacaagagcctgcgaaatgcccgcattggaaaaactgcctgacgaaactcctaccttgtttccttgaacacaacatgaagagagacgaggaccctcacaaggcagctaaggaaatgccgttccagggatccggcaaatctgcctggtgtccggtcgagatatccaagactgtgctgtggcctgaaagcattagcgtagtgcgatgcgtggaacttttcgaagctcctgtggagtgtgaagaggaggaggaagtggaagaagagaagggatctttttgtgcctcccctgaatctagcagagacgattttcaggagggaagagaaggtatcgttgctaggttgaccgagagcctgttcttagacctgctcggagaggaaaatggtggattctgccagcaggacatgggcgaatcttgcctgctgccaccatcagggagtacatccgcgcacatgccttgggacgaatttcccagtgctggacccaaggaagccccaccttggggcaaagaacagccattacatctcgaaccttctcccccagcctccccaacccagagtcctgacaatctaacttgcacggaaacccccctggttatcgcgggaaaccctgcctaccgcagctttagcaattccctgagccagtcaccgtgccccagagagttgggacccgatcctctgctcgcacggcatctggaggaggtggagcccgaaatgccttgtgtgccgcaactctctgagccaaccacagtacctcagcccgaacccgaaacatgggagcaaattctcagacgcaacgtcctgcaacacggcgcagccgcagcccctgttagcgcaccgacatcaggttaccaagaatttgtccatgccgtggaacagggcggaacccaagcctctgcagttgtaggcttaggcccacccggagaggcaggctataaggcattttccagcttacttgcctcaagcgcagtgtccccagagaaatgcgggtttggtgcatcctcgggagaagagggctataagccttttcaagacctgattccaggttgcccgggagaccccgctccagtccccgttccactgttcacttttggccttgacagagagccacctcggtctccacagagctcccacttgccgtcttcatcaccggaacacctgggactggaaccgggtgaaaaggtcgaagatatgcctaaacctcctctgccgcaggagcaggcaaccgatcccctcgtggattcactgggctctgggatcgtgtactcagccctcacttgccatctgtgcggtcacctgaaacagtgccacggtcaagaggacggcggacagacaccggtgatggctagcccttgttgtggctgttgctgtggtgataggtcatccccacccacaacccctttacgggctcccgacccctcccctggcggtgtgccactcgaagcaagcctgtgtccagcatcattagctccatctggaattagcgaaaaatcgaagagtagctctagtttccaccctgccccaggtaatgcgcaatcctcttcccagacacctaagattgtgaacttcgttagcgtgggaccaacatatatgagagtgtcctag

SEQ ID NO: 343302 - DNA, 684 bp, Artificial Sequence
  derived and/or modified sequence
atgggatggttgtgctcggggttgttgttcccagtctcctgcctggtgctcttgcaggtcgccagctccgggaacatgaaggtgctgcaggagcccacatgcgtatctgattacatgtcaatcagcacctgcgaatggaagatgaatgggcctacaaattgcagtacagagctcagactgctctaccagctggtctttctgttaagtgaggcacatacatgcatccccgagaacaatgggggtgccggatgtgtgtgccacctgctgatggacgacgtcgtgtccgccgacaattataccttggatctgtgggctggccagcagctgctttggaaagggagtttcaaaccctccgagcatgtgaagcccagggcccctggaaatctgacagtgcatacgaatgtgagcgacacactactgttgacatggtcaaacccctaccctcccgacaattacctctacaatcacttgacttatgctgtaaatatttggtctgaaaatgatcctgcagacttccgaatttacaatgtgacctacctggagccctcactgcgaatcgcagcttccactctgaaatccgggatttcttatcgggctcgcgtgcgtgcatgggcacagtgctataatactacttggagtgaatggagcccatctaccaagtggcacaactccaacatttgctag

SEQ ID NO: 343303 - DNA, 2478 bp, Artificial Sequence
  derived and/or modified sequence
atgggctggctctgctccggactgctgttccctgtgtcatgccttgttctactacaggtggccagctcgggcaacatgaaggtcctccaagagccaacgtgcgtctcagattatatgtctatttcaacgtgtgagtggaaaatgaatggcccaaccaattgcagcactgagcttaggctgctctaccagttggtgttcctcctcagtgaagcccacacttgcattcctgagaacaatggaggagccggatgcgtgtgtcaccttcttatggatgatgtggtcagtgctgacaactatacattggacctgtgggctggacaacagctcctgtggaaagggtcattcaagcctagtgagcatgtgaagccccgagctcctggtaacctgactgtgcacaccaacgtctcggacactctccttctcacatggagtaatccttatcctccagataactacctctacaaccaccttacctatgcagtgaacatatggagcgaaaatgatcctgctgactttcgcatctataacgttacatacctggagccttccttgaggattgctgccagcacacttaagtcaggtatttcgtacagggcacgggtcagagcatgggcacagtgctacaataccacatggtcggagtggtccccaagcactaagtggcacaattcctatcgggagccatttgaacagcacctgctgctaggagtatccgtgagttgcatcgtgatccttgctgtgtgtcttctttgttatgtgtccattaccaagataaagaaggaatggtgggaccagatcccaaacccggcacgttctcgcctggtggcgatcatcattcaggacgcacagggctctcaatgggagaaacgctctcgtggccaggaacccgctaagtgtccgcattggaagaactgtctgacaaaactgcttccatgcttcctggagcacaatatgaaaagggatgaggatccccacaaggcggcaaaggaaatgccttttcagggatccgggaagagtgcctggtgtccagtcgaaatttctaaaacagtgctctggccagaatctatttctgttgtacgatgcgtagaactgtttgaagctcccgttgaatgtgaggaagaagaagaagtggaagaggaaaagggcagcttttgcgcttctccggagtcctctcgcgatgactttcaggaaggcagggaaggcattgtggctaggcttacagagtcactcttccttgacttgctgggtgaggaaaatggcggtttctgccagcaggacatgggggaatcctgcctgctgcccccttccggtagcacctctgcacatatgccatgggatgaattccctagcgcgggtcctaaagaggcgcctccctggggtaaggaacagccgctacaccttgaaccaagcccacctgcgtctcccactcagtcccctgacaatttaacgtgcacggagactcccctggtcatagcaggcaaccccgcttaccgcagtttttccaactccctgagtcagtctccctgtccacgggagcttggccctgatcccctgttagcccgacacctggaggaagtggaacctgagatgccatgtgtgccgcagctttccgagcccacgaccgtcccccagccagaaccggaaacttgggagcaaattctccgtagaaatgtccttcagcacggagccgctgcagctccagtgagcgcacccacatctgggtaccaagagttcgttcacgccgtggaacaaggcggaacccaggcgagcgctgtggtcggcttagggccacccggtgaagctgggtacaaggctttttcttccctgctggcctcaagcgccgtctctcctgagaaatgcggcttcggcgctagtagcggggaggaagggtataaaccatttcaggacctcatccctgggtgccccggtgacccagctcctgtgccagtgcccctctttacctttggcctcgaccgagagccgccaaggtcgccccaatcaagccatttgccctcttctagccccgaacacctcggcttggagcctggggaaaaagtggaagatatgcctaagcctccattaccgcaagaacaagctactgacccactcgtcgatagcttaggatcaggcatagtgtactcagcgctcacgtgtcatctgtgcggacacctaaagcagtgccatggtcaggaggatgggggacaaacgcccgtgatggcaagtccctgttgcggctgctgctgtggtgaccgcagctcacctcccacgactcctctgcgcgcacccgaccctagtcccggaggcgttccccttgaggcatccctgtgtcctgccagtctggccccaagtggcataagtgaaaaatctaagagctcaagtagtttccatccagctcctggaaatgcacagtcaagcagtcagactcccaagatagtgaattttgtgtccgtaggtcccacatacatgcgagtgagctag

SEQ ID NO: 343304 - DNA, 2478 bp, Artificial Sequence
  derived and/or modified sequence
atgggctggctgtgcagcggcctgctgttccccgtgagctgcctggtgctgctgcaggtggccagcagcggcaacatgaaggtgctgcaggagcccacctgcgtgagcgactacatgagcatcagcacctgcgagtggaagatgaacggccccaccaactgcagcaccgagctgagactgctgtaccagctggtgttcctgctgagcgaggcccacacctgcatccccgagaacaacggcggcgccggctgcgtgtgccacctgctgatggacgacgtggtgagcgccgacaactacaccctggacctgtgggccggccagcagctgctgtggaagggcagcttcaagcccagcgagcacgtgaagcccagagcccccggcaacctgaccgtgcacaccaacgtgagcgacaccctgctgctgacctggagcaacccctacccccccgacaactacctgtacaaccacctgacctacgccgtgaacatctggagcgagaacgaccccgccgacttcagaatctacaacgtgacctacctggagcccagcctgagaatcgccgccagcaccctgaagagcggcatcagctacagagccagagtgagagcctgggcccagtgctacaacaccacctggagcgagtggagccccagcaccaagtggcacaacagctacagagagcccttcgagcagcacctgctgctgggcgtgagcgtgagctgcatcgtgatcctggccgtgtgcctgctgtgctacgtgagcatcaccaagatcaagaaggagtggtgggaccagatccccaaccccgccagaagcagactggtggccatcatcatccaggacgcccagggcagccagtgggagaagagaagcagaggccaggagcccgccaagtgcccccactggaagaactgcctgaccaagctgctgccctgcttcctggagcacaacatgaagagagacgaggacccccacaaggccgccaaggagatgcccttccagggcagcggcaagagcgcctggtgccccgtggagatcagcaagaccgtgctgtggcccgagagcatcagcgtggtgagatgcgtggagctgttcgaggcccccgtggagtgcgaggaggaggaggaggtggaggaggagaagggcagcttctgcgccagccccgagagcagcagagacgacttccaggagggcagagagggcatcgtggccagactgaccgagagcctgttcctggacctgctgggcgaggagaacggcggcttctgccagcaggacatgggcgagagctgcctgctgccccccagcggcagcaccagcgcccacatgccctgggacgagttccccagcgccggccccaaggaggcccccccctggggcaaggagcagcccctgcacctggagcccagcccccccgccagccccacccagagccccgacaacctgacctgcaccgagacccccctggtgatcgccggcaaccccgcctacagaagcttcagcaacagcctgagccagagcccctgccccagagagctgggccccgaccccctgctggccagacacctggaggaggtggagcccgagatgccctgcgtgccccagctgagcgagcccaccaccgtgccccagcccgagcccgagacctgggagcagatcctgagaagaaacgtgctgcagcacggcgccgccgccgcccccgtgagcgcccccaccagcggctaccaggagttcgtgcacgccgtggagcagggcggcacccaggccagcgccgtggtgggcctgggcccccccggcgaggccggctacaaggccttcagcagcctgctggccagcagcgccgtgagccccgagaagtgcggcttcggcgccagcagcggcgaggagggctacaagcccttccaggacctgatccccggctgccccggcgaccccgcccccgtgcccgtgcccctgttcaccttcggcctggacagagagccccccagaagcccccagagcagccacctgcccagcagcagccccgagcacctgggcctggagcccggcgagaaggtggaggacatgcccaagccccccctgccccaggagcaggccaccgaccccctggtggacagcctgggcagcggcatcgtgtacagcgccctgacctgccacctgtgcggccacctgaagcagtgccacggccaggaggacggcggccagacccccgtgatggccagcccctgctgcggctgctgctgcggcgacagaagcagcccccccaccacccccctgagagcccccgaccccagccccggcggcgtgcccctggaggccagcctgtgccccgccagcctggcccccagcggcatcagcgagaagagcaagagcagcagcagcttccaccccgcccccggcaacgcccagagcagcagccagacccccaagatcgtgaacttcgtgagcgtgggccccacctacatgagagtgagctag

SEQ ID NO: 343305 - DNA, 684 bp, Artificial Sequence
  derived and/or modified sequence
atgggctggctgtgcagcggcctgctgttccccgtgagctgcctggtgctgctgcaggtggccagcagcggcaacatgaaggtgctgcaggagcccacctgcgtgagcgactacatgagcatcagcacctgcgagtggaagatgaacggccccaccaactgcagcaccgagctgagactgctgtaccagctggtgttcctgctgagcgaggcccacacctgcatccccgagaacaacggcggcgccggctgcgtgtgccacctgctgatggacgacgtggtgagcgccgacaactacaccctggacctgtgggccggccagcagctgctgtggaagggcagcttcaagcccagcgagcacgtgaagcccagagcccccggcaacctgaccgtgcacaccaacgtgagcgacaccctgctgctgacctggagcaacccctacccccccgacaactacctgtacaaccacctgacctacgccgtgaacatctggagcgagaacgaccccgccgacttcagaatctacaacgtgacctacctggagcccagcctgagaatcgccgccagcaccctgaagagcggcatcagctacagagccagagtgagagcctgggcccagtgctacaacaccacctggagcgagtggagccccagcaccaagtggcacaacttcagcgtgtgctag

SEQ ID NO: 343306 - DNA, 684 bp, Artificial Sequence
  derived and/or modified sequence
atgggctggctgtgcagcggcctgctgttccccgtgagctgcctggtgctgctgcaggtggccagcagcggcaacatgaaggtgctgcaggagcccacctgcgtgagcgactacatgagcatcagcacctgcgagtggaagatgaacggccccaccaactgcagcaccgagctgagactgctgtaccagctggtgttcctgctgagcgaggcccacacctgcatccccgagaacaacggcggcgccggctgcgtgtgccacctgctgatggacgacgtggtgagcgccgacaactacaccctggacctgtgggccggccagcagctgctgtggaagggcagcttcaagcccagcgagcacgtgaagcccagagcccccggcaacctgaccgtgcacaccaacgtgagcgacaccctgctgctgacctggagcaacccctacccccccgacaactacctgtacaaccacctgacctacgccgtgaacatctggagcgagaacgaccccgccgacttcagaatctacaacgtgacctacctggagcccagcctgagaatcgccgccagcaccctgaagagcggcatcagctacagagccagagtgagagcctgggcccagtgctacaacaccacctggagcgagtggagccccagcaccaagtggcacaacagcaacatctgctag

SEQ ID NO: 343307 - DNA, 1892 bp, Artificial Sequence
  derived and/or modified sequence
attattttaactaccccctgggagggtgagcaccttctgtgctctgtccccaaccttccacttcccctcaacgcgctgctcagggatgaccttcggcactgtgcttcttctgagtgtcctggcttcttatcatggattcaacctggatgtggaggagcctacgatcttccaggaggatgcaggcggctttgggcagagcgtggtgcagttcggtggatctcgactcgtggtgggagcacccctggaggtggtggcggccaaccagacgggacggctgtatgactgcgcagctgccaccggcatgtgccagcctccaccaacggctcccggctcctggcctgtggcccgaccctgcacagagtctgtggggagaactcatactcaaagggttcctgcctcctgctgggctcgcgctgggagatcatccagacagtccccgacgccacgccagtttgcactgatgcagtactcaaacctcctgaagatccacttcaccttcacccaattccggaccagcccgagccagcagagcctggtggatcccatcgtccaactgaaaggcctgacgttcacggccacgggcatcctgacagtggtgacacagctatttcatcataagaatggggcccgaaaaagtgccaagaagatcctcattgtcatcacagatgggcagaagtacaaagaccccctggaatacagtgatgtcatcccccaggcagagaaggctggcatcatccgctacgctatcggggtgcgcctcttcttcacccctgccccaggctcagcctgcatctccttcaggtgcagtgctgctgggctcatcctcctcggctgtctctctgctgcaggtgggacacgctttccagggacccactgccaggcaggagctgaataccatcagctcagcgcctccgcaggaccacgtgttcaaggtggacaactttgcagcccttggcagcatccagaagcagctgcaggagaagatctatgcagttgagggaacccagtccagggcaagcagctccttccagcacgagatgtcccaagaaggcttcagcacagccctcacaatggtgggtagagcctgccctcaatccatagctcttggataccaactctgcacccaccctgggctgggggctgggagccagacataaacaagagcagaccccatcctcaatcgccagggagaggcccccacgcgtgtgttaggggccaggagcacagcagggaggagggtagcctgggttcctgctctcaaggatcatgtattctagtggaggagacagtaagcaagagcctctcagatagcactaagcatcagggtagagagagagatagccagaggagcctcagtaatggaaaaggccagccctggacaaatcaggggagactgttctgggcacaggacaaagcaagtgccaaggtcctgaggcaggacccaggtcctcggcgggagagatccgggcttgccagagcccagggagcccaggcagcctggaaggagagggctggaggctgagaaggaccaggtgggatcaaagatgtggtttggaagtgcgtgtgtgttcaaaggatccagatggggccggtcactgtggctcatgcctgtaatcccagcactttgggaggctgagacgggcggatcacttgaggtcaggagtttgagaccaactggccaacatggcgaaaccccacctctactaaaaatacaaaaaaattagccaggtgtggtggctcatgcctgtaatcctagctacttgggaggccaaggcaggagaattgcttgaacccaggaggcagaggttgcactgagccgagattgtgccactgcacttcagcctaggtgacagaacgagtctctgtctcaaaacaacaacaacaacaaaaac

SEQ ID NO: 343308 - protein, 231 aa, Artificial Sequence [sequence omitted]

SEQ ID NO: 343309 - DNA, 696 bp, Artificial Sequence
  derived and/or modified sequence
atgtgtcaaccgccaccaacagcacctggtagctggccagttgcaaggccctgtactgagtctgtaggacgtactcatacccaaagggtacctgccagttgctgggccagagccggtcgcagttcgagacagtcccccaccccccgccagttcgctctgatgcagtattccaacctgttgaagatccattttacctttacacagttccggacaagcccgagtcagcagtctctagtggatcctatagtgcagctgaaaggtctcacgttcaccgctactggcatcctgactgtggtcacacagctgttccaccataaaaatggggccagaaaaagtgcaaagaagatcctcatagtgatcacagatgggcagaagtataaagacccattggaatacagcgacgtgatccctcaggcggagaaggcagggatcattcgatatgccatcggagtgcgcctgttttttactcctgctccgggcagcgcctgcatctcttttaggtgttctgctgcagggctgatcctccttggctgtctctctgcggctggtggcactcggtttccaggaactcattgccaggctggtgcggagtaccatcagctgagcgctagcgcggggcctagagtacagggtggacagctttgttcaccgtggcagcaccccgaagctgccgccggcgaggatctgtgctcatag

SEQ ID NO: 343310 - DNA, 696 bp, Artificial Sequence
  derived and/or modified sequence
atgtgccagcccccacccacagcccctggctcctggcctgtggcccggccctgcacagaatctgtgggccgcacccacacccagagggtgcctgccagctgctgggcccgggccggccgcagcagccggcagagccccaccccccggcagtttgccctgatgcagtacagcaacctgctgaagatccacttcaccttcacccagttccgcaccagccccagccagcagagcctggtggaccccatcgtgcagctgaagggcctgaccttcaccgccaccggcatcctgactgtggtgacccagctgttccaccacaagaatggagccaggaagagcgccaagaagatcctgattgtcatcacagatggccagaagtacaaggaccccctggagtacagtgatgtgatcccccaggccgagaaggccggcatcatccgctatgccatcggcgtgcggctcttcttcaccccagcccctggcagcgcctgcatctccttccgctgcagcgctgctggcctcatcctgctgggctgcctgtctgctgctgggggcacccgcttccctggcacccactgccaggccggggctgagtaccaccagctgagcgccagcgctggcccccgggtgcagggcggccagctgtgcagcccctggcagcaccctgaggccgctgctggggaggacctgtgcagctag

SEQ ID NO: 343311 - DNA, 696 bp, Artificial Sequence
  derived and/or modified sequence
atgtgccagcccccccccaccgcccccggcagctggcccgtggcccgcccttgtacagaatccgtcgggcgcacccacactcagcgcgtgcctgcaagctgctgggcccgggccggacgatcatctcgccaatcccccacccctcgacagtttgctctgatgcagtacagtaacctgctgaaaatccatttcacattcacacagtttcgaacttctcctagccaacagtctttggtggaccctattgtccagctgaagggcttaacctttactgctaccggtattttaacagtggtgactcagctcttccatcacaagaatggggccagaaagagtgccaagaagatattaattgtcatcaccgatggccaaaagtacaaagatccacttgagtacagtgacgtgatcccccaggcggagaaggccggaatcattcggtatgctattggggtcaggctcttctttacccctgccccgggaagcgcttgtatatcctttagatgctctgccgcgggattgatcctgttagggtgtctgtccgcagctggggggacacgcttccccggtacacactgccaggctggcgccgagtatcatcagctatccgctagtgccggcccacgggtgcaaggagggcagttgtgcagcccttggcagcatcccgaagcagccgcaggagaggacttgtgcagttag

SEQ ID NO: 343312 - DNA, 696 bp, Artificial Sequence
  derived and/or modified sequence
atgtgccagccccctccaacagcaccaggatcctggcccgttgcccgaccatgtaccgaatccgtggggagaactcatacacagcgagtccctgctagctgctgggctcgagcaggtcgtagctctcgccagtcaccaacacctagacaattcgccctcatgcagtacagcaacttgctcaagattcatttcacatttacgcagttcaggaccagccccagccaacagagcctggtcgacccaatcgtgcagctgaaaggcctcacattcaccgctaccggcattctgaccgtcgtcactcaactatttcatcataagaacggagcgaggaagagcgccaaaaagatactcatcgtgatcacagacggtcagaaatataaggatcccctcgagtattctgacgtgatccctcaggcagagaaggcgggaattatacggtatgccatcggcgtacgattatttttcactcctgccccaggaagcgcctgtatctccttcaggtgctccgcggctgggctcattcttttgggctgcctttctgcagccggaggcaccaggtttcccggaacacactgtcaggcaggagccgaataccaccagctgtctgcatccgcagggcctcgtgtgcagggcggtcagctctgctcaccgtggcagcatccagaggccgcagcgggagaggacctttgcagctag

SEQ ID NO: 343313 - DNA, 696 bp, Artificial Sequence
  derived and/or modified sequence
atgtgccagcccccccccaccgcccccggcagctggcccgtggccagaccctgcaccgagagcgtgggcagaacccacacccagagagtgcccgccagctgctgggccagagccggcagaagcagcagacagagccccacccccagacagttcgccctgatgcagtacagcaacctgctgaagatccacttcaccttcacccagttcagaaccagccccagccagcagagcctggtggaccccatcgtgcagctgaagggcctgaccttcaccgccaccggcatcctgaccgtggtgacccagctgttccaccacaagaacggcgccagaaagagcgccaagaagatcctgatcgtgatcaccgacggccagaagtacaaggaccccctggagtacagcgacgtgatcccccaggccgagaaggccggcatcatcagatacgccatcggcgtgagactgttcttcacccccgcccccggcagcgcctgcatcagcttcagatgcagcgccgccggcctgatcctgctgggctgcctgagcgccgccggcggcaccagattccccggcacccactgccaggccggcgccgagtaccaccagctgagcgccagcgccggccccagagtgcagggcggccagctgtgcagcccctggcagcaccccgaggccgccgccggcgaggacctgtgcagctag

SEQ ID NO: 343314 - DNA, 1215 bp, Artificial Sequence
  derived and/or modified sequence
atgaaggactcatgtattacagtgatggccatggccctgttgtcaggtttcttttttttcgctcccgccagcagctacaatctggatgtgaggggcgcccggtctttctccccaccaagggcgggaaggcacttcggatatcgtgtcctccagataaaatccctgattccacagtttcagggtcgcctcgtagcaaatctcacgtacacactccaacttgacgggcaccgtacaagacgtagaggcctgttcccaggcggaagacacgaattgcggcgcaatattgccgtcacaacctcaatgtcatgtacagacttctcatttcacttccctatgatgtttaacactctcgtgaattctagttggggcgattccgtagaactccacgccaacgtgacgtgtaataacgaagactccgaccttttagaggacaatagcgcaacaacaattatccctatcttgtaccccatcaatatcctgatacaggaccaagaggatagcacgctgtacgtgagctttacccccaagggcccgaaaatccaccaggtcaaacatatgtaccaggttagaattcaaccttccatccacgatcacaacatccccacactggaagcagttgtgggcgttcctcaacccccaagcgaaggccccatcacccaccagtggagtgtacagatggagcctcccgtcccatgtcactatgaggacctggaaaggctgcccgacgccgcagaaccctgtctgcccggcgcactgtttcgttgtccggtcgtgttcagacaggaaatacttgtgcaggtgatcgggactctggagctggtcggggaaatagaggctagtagcatgttcagcctttgctcaagtctatccataagttttaatagtagcaagcatttccacctgtacggttcgaacgcgtctctggcacaggtagtgatgaaggtagacgtggtgtatgagaagcagatgttgtatctgtatgtcctgtctggtatcgggggcctgcttctgctgcttctaatcttcattgtgttgtataaggtcggatttttcaaacggaacctgaaggaaaagatggaggctggaaggggagtgcccaatggcattcctgccgaagattcagaacagttggcctccggccaagaggcgggagaccccggctgtctgaagcccttgcacgagaaggacagcgaaagtggaggtggcaaagactag

SEQ ID NO: 343315 - DNA, 1416 bp, Artificial Sequence
  derived and/or modified sequence
ctctttcaccctgtctaggttgccagcaaatcccacgggcctcctgacgctgcccctggggccacaggtccctcgagtgctggaaggatgaaggattcctgcatcactgtgatggccatggcgctgctgtctgggttctttttcttcgcgccggcctcgagctacaacctggacgtgcggggcgcgcggagcttctccccaccgcgcgccgggaggcactttggataccgcgtcctgcagatcaagtctctcatcccccagttccaaggccgcctggttgccaatctcacttacactctgcagctggatggccaccggaccagaagacgggggttgttcccaggagggagacatgaactcagaaggaatatagctgtcaccaccagcatgtcatgcactgacttctcatttcatttcccgatgatgtttaatacactggtaaacagctcctggggggactcggttgaattgcacgccaatgtgacctgtaacaatgaggactcagacctcctggaggacaactcagccactaccatcatccccatcctgtaccccatcaacatcctcatccaggaccaagaagactccacactctatgtcagtttcacccccaaaggccccaagatccaccaagtcaagcacatgtaccaggtgaggatccagccttccatccacgaccacaacatacccaccctggaggctgtggttggggtgccacagcctcccagcgaggggcccatcacacaccagtggagcgtgcagatggagcctcccgtgccctgccactatgaggatctggagaggctcccggatgcagctgagccttgtctccccggagccctgttccgctgccctgttgtcttcaggcaggagatcctcgtccaagtgatcgggactctggagctggtgggagagatcgaggcctcttccatgttcagcctctgcagctccctctccatctccttcaacagcagcaagcatttccacctctatggcagcaacgcctccctggcccaggttgtcatgaaggttgacgtggtgtatgagaagcagatgctctacctctacgtgctgagcggcatcggggggctgctgctgctgctgctcattttcatagtgctgtacaaggttggtttcttcaaacggaacctgaaggagaagatggaggctggcagaggtgtcccgaatggaatccctgcagaagactctgagcagctggcatctgggcaagaggctggggatcccggctgcctgaagcccctccatgagaaggactctgagagtggtggtggcaaggactgagtccaggcctgtgaggtgcagagtgcccagaactggactcaggatgcccagggccactctgcctctgcctgcattctgccgtgtgccctcgggcgagtcactgcctctccctgg

SEQ ID NO: 343316 - DNA, 1215 bp, Artificial Sequence
  derived and/or modified sequence
atgaaggacagctgcatcaccgtgatggccatggccctgctgagcggcttcttcttctttgccccagccagcagctacaacctggatgtgcggggggcccgctccttcagcccccccagggctggccgccacttcggctacagagtgctgcagatcaagagcctcatcccccagttccagggccgcctggtggccaacctgacctacaccctgcagctggatggccacaggacccggcggcggggcctcttccctgggggcagacatgagctgcggagaaatattgctgtgaccacctccatgagctgcacagacttctccttccacttccccatgatgttcaacaccctggtgaacagctcctggggagacagcgtggagctgcacgccaacgtgacctgcaacaatgaagattctgacctgctggaggacaacagcgccaccaccatcatccccatcctgtaccccatcaacatcctgatccaggaccaggaggacagcaccctgtatgtgtccttcacccccaagggccccaagatccaccaggtgaagcacatgtaccaggtgcgcatccagcccagcatccatgaccacaacatccccaccctggaggccgtggtgggcgtgccccagccccccagcgagggccccatcacccaccagtggagcgtgcagatggagccccctgtgccctgccactatgaggacctggagcggctgcctgatgctgctgagccctgcctgcccggggccctcttccgctgccctgtggtgttccggcaggagatcctggtgcaggtgattggcaccctggagctggtgggggagattgaggccagctccatgttcagcctgtgcagcagcctgagcatctccttcaacagcagcaagcacttccacctgtatggcagcaatgccagcctggcccaggtggtgatgaaggtggatgtggtgtatgagaagcagatgctgtacctgtatgtgctgagcggcatcggcggcctgctgctgctgctgctgatcttcatcgtgctgtacaaggtgggcttcttcaagaggaacctgaaggagaagatggaggccggccggggcgtgcccaacggcatcccagctgaggacagcgagcagctggccagcggccaggaggccggggaccccggctgcctgaagcccctgcacgagaaggacagcgagagcggcggcggcaaggactag

SEQ ID NO: 343317 - DNA, 1215 bp, Artificial Sequence
  derived and/or modified sequence
atgaaggacagctgcatcaccgtgatggccatggccctgctgagcgggttcttcttcttcgcacctgcgtctagttacaacctggatgtgcgcggggcgaggtctttttccccccccagggcgggtcggcattttgggtacagagtactgcaaatcaagtcactgattccgcagttccaaggaaggctggtagcgaacttgacttacaccctccagctggacggtcatagaactaggcggcgtggtctgttccctggcgggcggcacgagttgagacgcaacattgccgtgacgacgtccatgagctgcaccgacttttctttccacttcccaatgatgttcaataccctggttaacagttcttggggcgactctgtggaacttcacgcaaacgtgacctgcaataatgaagactccgaccttctcgaagacaacagcgctactactatcatcccaatcctttacccaattaacattctaattcaggatcaggaggattccaccttgtacgtgtcattcacaccgaaagggcccaaaatccaccaagtgaaacatatgtatcaggtgcgcatccagccatcaattcacgaccacaatatcccaacactcgaagcagttgtcggagtgccgcagcccccctcggaggggcccatcacccatcagtggagtgtgcagatggaacctccggtcccgtgtcactatgaagatctggagagactgcccgacgctgctgagccctgccttcctggagcactgtttcgctgtcccgtggtgttccgccaggagatcctggtgcaggtgattggtacactagaactagtgggagaaatcgaggcttcttcaatgttcagtttatgttctagcctttctatctctttcaatagttcaaagcattttcacctttacggaagcaacgctagcctggcccaagtggtgatgaaggtagacgttgtgtatgaaaagcagatgctgtacttgtacgtactgtcaggcataggaggactcctcctactgttgttaatatttatcgtgctgtataaagttggattcttcaagcggaacctgaaagaaaagatggaagcagggcggggcgtgccgaatgggattccggccgaagatagtgagcagctcgcctctggacaggaggccggtgacccagggtgtctcaagccactgcatgagaaggacagcgaatccggaggcggtaaagactag

SEQ ID NO: 343318 - DNA, 1215 bp, Artificial Sequence
  derived and/or modified sequence
atgaaggacagctgcatcactgtcatggcaatggccctcctctctggtttcttcttctttgcacctgcctcctcctataatctggacgttagaggagcaagatcctttagtccaccccgagcgggtaggcattttggctaccgcgttctgcagatcaagagtctgatacctcagttccaggggcgactcgtggctaaccttacctataccctacagctggacgggcaccggacccgtcgccgtggcctgtttcctggagggagacatgaactccggagaaacattgcggtgacaacatctatgagttgcacagacttcagcttccacttcccaatgatgttcaacaccctcgtcaactcttcttggggcgattctgtagagctgcatgccaatgtgacatgtaacaatgaagactccgatctgctcgaagataatagtgctaccacaattatccctatcttgtacccaattaacatactaattcaagatcaggaggatagtaccctgtatgtgtcatttactcccaaaggaccgaagatccaccaggtgaaacacatgtatcaggttcggatacagccaagcatccacgatcataacatcccaaccctggaggctgtggttggtgtgccccagcccccatccgaagggcctattacccatcaatggtcagtgcagatggaacctcctgtgccctgtcactatgaggatcttgagcgcctgcccgacgccgcagaaccttgtctcccaggggctctgttccgctgccccgtggtgtttcggcaagaaatcctggtacaggtgattggcactctagaactggtgggggagattgaagcatcttcaatgtttagcttatgctcttctttgtcgatatccttcaattcttcgaagcacttccacctgtacggttcaaacgcctcgttggcacaggtggtgatgaaagtggacgtagtgtatgaaaaacaaatgctgtatctgtatgttctttccggcataggtggtttgcttcttctgttacttatctttattgttctgtacaaagtcgggttctttaaaagaaacttgaaagaaaagatggaagctggccgaggcgtcccaaatgggatccctgccgaagactctgagcaattggcatctggacaggaagcaggcgatccaggctgcctgaagccgttgcacgagaaggactcagagtctggcggagggaaagactag

SEQ ID NO: 343319 - DNA, 1215 bp, Artificial Sequence
  derived and/or modified sequence
atgaaggacagctgcatcaccgtgatggccatggccctgctgagcggcttcttcttcttcgcccccgccagcagctacaacctggacgtgagaggcgccagaagcttcagcccccccagagccggcagacacttcggctacagagtgctgcagatcaagagcctgatcccccagttccagggcagactggtggccaacctgacctacaccctgcagctggacggccacagaaccagaagaagaggcctgttccccggcggcagacacgagctgagaagaaacatcgccgtgaccaccagcatgagctgcaccgacttcagcttccacttccccatgatgttcaacaccctggtgaacagcagctggggcgacagcgtggagctgcacgccaacgtgacctgcaacaacgaggacagcgacctgctggaggacaacagcgccaccaccatcatccccatcctgtaccccatcaacatcctgatccaggaccaggaggacagcaccctgtacgtgagcttcacccccaagggccccaagatccaccaggtgaagcacatgtaccaggtgagaatccagcccagcatccacgaccacaacatccccaccctggaggccgtggtgggcgtgccccagccccccagcgagggccccatcacccaccagtggagcgtgcagatggagccccccgtgccctgccactacgaggacctggagagactgcccgacgccgccgagccctgcctgcccggcgccctgttcagatgccccgtggtgttcagacaggagatcctggtgcaggtgatcggcaccctggagctggtgggcgagatcgaggccagcagcatgttcagcctgtgcagcagcctgagcatcagcttcaacagcagcaagcacttccacctgtacggcagcaacgccagcctggcccaggtggtgatgaaggtggacgtggtgtacgagaagcagatgctgtacctgtacgtgctgagcggcatcggcggcctgctgctgctgctgctgatcttcatcgtgctgtacaaggtgggcttcttcaagagaaacctgaaggagaagatggaggccggcagaggcgtgcccaacggcatccccgccgaggacagcgagcagctggccagcggccaggaggccggcgaccccggctgcctgaagcccctgcacgagaaggacagcgagagcggcggcggcaaggactag

SEQ ID NO: 343320 - DNA, 1617 bp, Artificial Sequence
  derived and/or modified sequence
atgccccgagggtgggctgcacccctgctgctgcttctgttgcagggcgggtggggctgccctgacctggtgtgttatacagactatctgcaaacagtaatttgcattctggaaatgtggaatctgcatccaagtacgctcactctgacctggcaggaccagtacgaggagttgaaagatgaggctacatcttgctcacttcataggtcagcccataatgctacccatgccacgtatacctgccatatggatgtgtttcattttatggcagacgatatcttcagtgtcaacattactgaccagtccggtaattattctcaggagtgcgggtcattcctgttggcagaaagtattaagcctgcacctcccttcaatgtcacggtgactttttccggacagtataacatttcttggcgctccgattatgaggaccctgccttttatatgttgaagggcaagctgcagtatgagctacaataccggaataggggggatccctgggccgtctcgcctcgcagaaaactcatttctgttgactctcgctccgtgtccctcttgcctctggagtttcgaaaggactccagctatgaactccaagtgagagcaggtcccatgcctggtagcagttaccaaggaacttggagcgagtggtccgacccggtgatctttcagacccaaagcgaagaactcaaagaaggctggaacccccacttgctacttctcctgttgttggtaattgtctttataccagctttttggtccctgaagacccatcccctgtggagactgtggaagaagatatgggcagtgccttctcctgagagatttttcatgcccttgtataagggctgcagcggagatttcaagaagtgggtgggggcccccttcacggggagctcgttagagctaggtccgtggtcacccgaggtcccatcgacattagaggtgtatagttgccatccgcctagaagtcccgcaaagaggctccagctgaccgagttgcaggaacctgccgaattagtggaatcggatggcgtgcctaaacccagtttttggccaacagctcagaactcaggcgggtcagcttacagcgaggagcgggacagaccgtatggattggtgagcatcgacaccgtgaccgtgctcgacgcagaaggtccttgtacgtggccctgttcttgtgaggacgatggctacccagcattagacctggatgctggtctggaaccaagccccggacttgaggatccccttttggacgctggcaccacagtactctcctgtgggtgtgttagtgctggaagtcctggattaggaggacctctcggcagcctcctggatcggctcaaacccccgctggctgacggagaggattgggcgggcggactgccttggggagggcgtagccctggaggcgtttccgagtctgaagctggctcgcctctagccggcctcgacatggacacattcgactcgggatttgtgggaagtgattgcagtagcccagtagagtgtgatttcaccagccctggagacgagggcccaccgcggtcctacttgagacagtgggttgtgatacccccacctttgtcttcacctggccctcaggcatcctag

SEQ ID NO: 343321 - DNA, 1617 bp, Artificial Sequence
  derived and/or modified sequence
atgccaaggggttgggccgcccctttgctgctgttactactgcagggtgggtggggctgccctgacttagtgtgctatacggactatctccagacggtgatctgcatcctcgagatgtggaatctgcacccgtcgaccctgacgctgacctggcaagaccaatatgaggaacttaaggatgaagccacaagttgcagtcttcacaggagtgctcataacgctacacatgctacttatacttgtcatatggatgtctttcacttcatggcagacgacatcttctccgtgaacattactgaccaatcaggcaattactcccaggagtgtggctccttccttctcgctgaatcaattaaacccgcacctcctttcaatgtaactgtgactttttccggacaatataatatctcatggaggtcagactacgaagatcctgccttctacatgttaaaggggaagttacaatacgaattacagtatcgcaaccgcggagacccttgggccgttagcccgcggcggaagctgatctctgtcgattctcgaagcgtctcgttgcttccgctagagttccgcaaggattcctcctatgagttgcaggttagagccggacctatgccaggatcctcatatcaagggacttggtctgaatggagcgacccagtcatttttcaaacacaatcggaggaactgaaggaaggatggaacccccaccttctactgctgcttcttctggtcatcgtctttattcctgcattctggagtttgaaaacacaccctttgtggagactttggaagaagatttgggctgtgcccagccccgaaagattcttcatgcctctctataaaggctgctcaggggatttcaaaaaatgggtcggcgcaccatttaccggcagttcgttagaactcggcccgtggtcacccgaggtgccctctactctcgaagtatactcctgtcatcccccccggtcgcctgctaaaaggctccagctgaccgagctgcaagaacctgcagagctggtcgaaagcgatggtgtgccgaaaccaagtttttggcccaccgctcagaactcaggcggaagcgcctactcagaagagagggatcgcccatacggtctggtttcaatcgataccgtaaccgtgcttgacgcagaagggccttgcacatggccgtgttcctgtgaagatgatggttatccagctctagacctggacgctggactggaaccgtctccaggtctagaggatcccctgctagacgcaggcacgacggtcctcagctgcgggtgcgtgtccgctggcagcccaggtcttggcggtccactcggcagtctccttgacagactgaagccacctctggcagacggcgaggactgggcgggcgggttaccgtggggaggccgctcccccgggggggtgtctgagtcagaggcaggaagcccactggccggcctcgatatggacacattcgattccggttttgtaggaagcgactgtagctcgcccgttgagtgtgattttacaagtcccggggacgaaggcccacctaggtcctacctgaggcagtgggtagtgattccaccaccactcagctctccagggccacaggcttcctag

SEQ ID NO: 343322 - DNA, 1617 bp, Artificial Sequence
  derived and/or modified sequence
atgccccggggctgggcagcccctttattattactgctgcttcagggtggctgggggtgccccgacctcgtctgctatactgattacctccagaccgtcatctgtatcctggaaatgtggaatctgcatccgtcaactctgaccctaacatggcaagaccaatatgaggaattaaaggatgaagcgacgtcatgttctctgcatcggtctgcacataacgcaacccatgccacatatacctgccacatggatgtctttcatttcatggccgatgatatcttttctgttaacattaccgaccagtctggcaactatagtcaggaatgcggctccttcctgctcgctgagtctatcaaacccgcacctccatttaatgttactgtgacatttagtgggcagtacaacatttcctggcggtccgactacgaggatccagcattttacatgctcaaggggaagttgcagtatgagttgcagtaccggaataggggagatccgtgggcagttagtcctaggcgcaaactgatctctgtggatagccggtctgtctcactgttaccactggaattccggaaggacagctcttacgaactccaggttagagctggccccatgccagggtcaagctatcagggtacgtggtccgagtggtccgaccccgtcatattccagactcaaagcgaagagctcaaggaaggctggaaccctcacctgctgcttctcttgctcctcgtgattgtgttcatccccgccttctggagtttgaagacccatcccctgtggcgcctctggaagaaaatctgggcagtaccatccccagagcgcttcttcatgccgttatacaagggttgtagcggcgatttcaaaaagtgggtcggcgcaccattcacaggcagttctcttgagctgggcccctggagcccagaggtgccatcaacattagaagtgtactcttgtcacccgcctaggtctcctgcaaaacgcctgcaactgactgagctccaggaacctgccgaattagtggaatccgacggtgttcctaaaccatctttctggccgacagcccagaacagtggcggatccgcctacagcgaggaaagagaccggccatatgggttggtgagtatcgataccgttaccgtattagatgccgaagggccctgcacttggccttgttcttgtgaggatgatggatacccggcactggatctggacgcaggtctggagccctctccaggactggaggacccactattggatgcagggacaaccgtgttatcttgtgggtgtgtctcagcaggtagtccgggactcggaggccctttggggtcgttactggaccggttgaaacccccattggcagatggcgaggactgggcaggcggtctgccatggggtggccgctcccccggcggggtgagcgagtcagaggcggggagcccactggccgggttagatatggacacattcgacagtgggttcgtggggagtgattgctcttcgccagtggaatgcgactttaccagtccaggcgacgagggtccccctagatcctaccttagacagtgggtggtgatccctccgcctctgtcctccccagggccacaggcatcatag

SEQ ID NO: 343323 - DNA, 3162 bp, Artificial Sequence
  derived and/or modified sequence
ccgtctctttcctctgtctgctgctctgtgggacacctgcctggaggcccagctgcccgtcatcagagtgacaggtcttatgacagcctgattggtgactcgggctgggtgtggattctcaccccaggcctctgcctgctttctcagaccctcatctgtcacccccacgctgaacccagctgccacccccagaagcccatcagactgcccccagcacacggaatggatttctgagaaagaagccgaaacagaaggcccgtgggagtcagcatgccgcgtggctgggccgcccccttgctcctgctgctgctccagggaggctggggctgccccgacctcgtctgctacaccgattacctccagacggtcatctgcatcctggaaatgtggaacctccaccccagcacgctcacccttacctggcaagaccagtatgaagagctgaaggacgaggccacctcctgcagcctccacaggtcggcccacaatgccacgcatgccacctacacctgccacatggatgtattccacttcatggccgacgacattttcagtgtcaacatcacagaccagtctggcaactactcccaggagtgtggcagctttctcctggctgagagcatcaagccggctccccctttcaacgtgactgtgaccttctcaggacagtataatatctcctggcgctcagattacgaagaccctgccttctacatgctgaagggcaagcttcagtatgagctgcagtacaggaaccggggagacccctgggctgtgagtccgaggagaaagctgatctcagtggactcaagaagtgtctccctcctccccctggagttccgcaaagactcgagctatgagctgcaggtgcgggcagggcccatgcctggctcctcctaccaggggacctggagtgaatggagtgacccggtcatctttcagacccagtcagaggagttaaaggaaggctggaaccctcacctgctgcttctcctcctgcttgtcatagtcttcattcctgccttctggagcctgaagacccatccattgtggaggctatggaagaagatatgggccgtccccagccctgagcggttcttcatgcccctgtacaagggctgcagcggagacttcaagaaatgggtgggtgcacccttcactggctccagcctggagctgggaccctggagcccagaggtgccctccaccctggaggtgtacagctgccacccaccacggagcccggccaagaggctgcagctcacggagctacaagaaccagcagagctggtggagtctgacggtgtgcccaagcccagcttctggccgacagcccagaactcggggggctcagcttacagtgaggagagggatcggccatacggcctggtgtccattgacacagtgactgtgctagatgcagaggggccatgcacctggccctgcagctgtgaggatgacggctacccagccctggacctggatgctggcctggagcccagcccaggcctagaggacccactcttggatgcagggaccacagtcctgtcctgtggctgtgtctcagctggcagccctgggctaggagggcccctgggaagcctcctggacagactaaagccaccccttgcagatggggaggactgggctgggggactgccctggggtggccggtcacctggaggggtctcagagagtgaggcgggctcacccctggccggcctggatatggacacgtttgacagtggctttgtgggctctgactgcagcagccctgtggagtgtgacttcaccagccccggggacgaaggacccccccggagctacctccgccagtgggtggtcattcctccgccactttcgagccctggaccccaggccagctaatgaggctgactggatgtccagagctggccaggccactgggccctgagccagagacaaggtcacctgggctgtgatgtgaagacacctgcagcctttggtctcctggatgggcctttgagcctgatgtttacagtgtctgtgtgtgtgtgtgcatatgtgtgtgtgtgcatatgcatgtgtgtgtgtgtgtgtgtcttaggtgcgcagtggcatgtccacgtgtgtgtgtgattgcacgtgcctgtgggcctgggataatgcccatggtactccatgcattcacctgccctgtgcatgtctggactcacggagctcacccatgtgcacaagtgtgcacagtaaacgtgtttgtggtcaacagatgacaacagccgtcctccctcctagggtcttgtgttgcaagttggtccacagcatctccggggctttgtgggatcagggcattgcctgtgactgaggcggagcccagccctccagcgtctgcctccaggagctgcaagaagtccatattgttccttatcacctgccaacaggaagcgaaaggggatggagtgagcccatggtgacctcgggaatggcaattttttgggcggcccctggacgaaggtctgaatcccgactctgataccttctggctgtgctacctgagccaagtcgcctcccctctctgggctagagtttccttatccagacagtggggaaggcatgacacacctgggggaaattggcgatgtcacccgtgtacggtacgcagcccagagcagaccctcaataaacgtcagcttccttccttctgcggccagagccgaggcgggcgggggtgagaacatcaatcgtcagcgacagcctgggcacccgcggggccgtcccgcctgcagagggccactcgggggggtttccaggcttaaaatcagtccgtttcgtctcttggaaacagctccccaccaaccaagatttctttttctaacttctgctactaagtttttaaaaattccctttatgcacccaagagatatttattaaacaccaattacgtagcaggccatggctcatgggacccaccccccgtggcactcatggagggggctgcaggttggaactatgcagtgtgctccggccacacatcctgctgggccccctaccctgccccaattcaatcctgccaataaatcctgtcttatttgttcatcctggagaattgaagggaggtcaagttgtttgtcaatgatttgtcagagaacctgttgaaatgtgaattaagaagctaagaaaata

SEQ ID NO: 343324 - DNA, 4495 bp, Artificial Sequence
  derived and/or modified sequence
ctagaggcagctcagatagaggagctctttgggaagagacgccgggcaggcagaagcagcaggtaccccctccacatccctagggctctgtgatgtaggcagaggcccgtgggagtcagcatgccgcgtggctgggccgcccccttgctcctgctgctgctccagggaggctggggctgccccgacctcgtctgctacaccgattacctccagacggtcatctgcatcctggaaatgtggaacctccaccccagcacgctcacccttacctggcaagaccagtatgaagagctgaaggacgaggccacctcctgcagcctccacaggtcggcccacaatgccacgcatgccacctacacctgccacatggatgtattccacttcatggccgacgacattttcagtgtcaacatcacagaccagtctggcaactactcccaggagtgtggcagctttctcctggctgagagcatcaagccggctccccctttcaacgtgactgtgaccttctcaggacagtataatatctcctggcgctcagattacgaagaccctgccttctacatgctgaagggcaagcttcagtatgagctgcagtacaggaaccggggagacccctgggctgtgagtccgaggagaaagctgatctcagtggactcaagaagtgtctccctcctccccctggagttccgcaaagactcgagctatgagctgcaggtgcgggcagggcccatgcctggctcctcctaccaggggacctggagtgaatggagtgacccggtcatctttcagacccagtcagaggagttaaaggaaggctggaaccctcacctgctgcttctcctcctgcttgtcatagtcttcattcctgccttctggagcctgaagacccatccattgtggaggctatggaagaagatatgggccgtccccagccctgagcggttcttcatgcccctgtacaagggctgcagcggagacttcaagaaatgggtgggtgcacccttcactggctccagcctggagctgggaccctggagcccagaggtgccctccaccctggaggtgtacagctgccacccaccacggagcccggccaagaggctgcagctcacggagctacaagaaccagcagagctggtggagtctgacggtgtgcccaagcccagcttctggccgacagcccagaactcggggggctcagcttacagtgaggagagggatcggccatacggcctggtgtccattgacacagtgactgtgctagatgcagaggggccatgcacctggccctgcagctgtgaggatgacggctacccagccctggacctggatgctggcctggagcccagcccaggcctagaggacccactcttggatgcagggaccacagtcctgtcctgtggctgtgtctcagctggcagccctgggctaggagggcccctgggaagcctcctggacagactaaagccaccccttgcagatggggaggactgggctgggggactgccctggggtggccggtcacctggaggggtctcagagagtgaggcgggctcacccctggccggcctggatatggacacgtttgacagtggctttgtgggctctgactgcagcagccctgtggagtgtgacttcaccagccccggggacgaaggacccccccggagctacctccgccagtgggtggtcattcctccgccactttcgagccctggaccccaggccagctaatgaggctgactggatgtccagagctggccaggccactgggccctgagccagagacaaggtcacctgggctgtgatgtgaagacacctgcagcctttggtctcctggatgggcctttgagcctgatgtttacagtgtctgtgtgtgtgtgtgcatatgtgtgtgtgtgcatatgcatgtgtgtgtgtgtgtgtgtcttaggtgcgcagtggcatgtccacgtgtgtgtgtgattgcacgtgcctgtgggcctgggataatgcccatggtactccatgcattcacctgccctgtgcatgtctggactcacggagctcacccatgtgcacaagtgtgcacagtaaacgtgtttgtggtcaacagatgacaacagccgtcctccctcctagggtcttgtgttgcaagttggtccacagcatctccggggctttgtgggatcagggcattgcctgtgactgaggcggagcccagccctccagcgtctgcctccaggagctgcaagaagtccatattgttccttatcacctgccaacaggaagcgaaaggggatggagtgagcccatggtgacctcgggaatggcaattttttgggcggcccctggacgaaggtctgaatcccgactctgataccttctggctgtgctacctgagccaagtcgcctcccctctctgggctagagtttccttatccagacagtggggaaggcatgacacacctgggggaaattggcgatgtcacccgtgtacggtacgcagcccagagcagaccctcaataaacgtcagcttccttccttctgcggccagagccgaggcgggcgggggtgagaacatcaatcgtcagcgacagcctgggcacccgcggggccgtcccgcctgcagagggccactcgggggggtttccaggcttaaaatcagtccgtttcgtctcttggaaacagctccccaccaaccaagatttctttttctaacttctgctactaagtttttaaaaattccctttatgcacccaagagatatttattaaacaccaattacgtagcaggccatggctcatgggacccaccccccgtggcactcatggagggggctgcaggttggaactatgcagtgtgctccggccacacatcctgctgggccccctaccctgccccaattcaatcctgccaataaatcctgtcttatttgttcatcctggagaattgaagggaggtcaagttgtttgtcaatgatttgtcagagaacctgttgaaatgtgaattaagaagctaagaaaatatttcttagcaacattttctttttcttttttttttttttcttttgagacagagtctcactctcgtcgcccaggctggaatgcagtggtgcgatctcggctctctgcaacctctgtctcccgggttcaagcgatttcctgcgtcagccccagagtagctggaattacaggcacacaccaccacgcctggctaatttttgtatttttagtagagctggggccaccctggcccggccccgtcttcctccccaaaggtcagactgcaggctgcagggctgtgctggaggagccagctctagctcacccatgcttttgcaacagggtcgggttggaagtcagcacaggtcagtcctgcggaaggttccttcgtgactcatctgtgaagtggggtggttgggagaggtagctgagagaatgcatgagagtcctcggtgcctggcaggaggctggaaggttctagaacactgatggttataagagtgggactgtgagcctgggatcggggggtgtgagacttggatgggagcacaagagtggaaacacagcttctgcacggagcaggcgcagccctcaacaccccgtgcacctgcaccctagggactcttgggtccagatgtgctgtggttttcacaccttcttgggggcaacaggttccaggagccacctgtgggtgccacctgagccacaggctcccaggaaagcagcacagctctcctgcacccagagcttgctgggtggcggaggggaacacagatggttggggaaggcctgaggccagattgggggactctggactggggcagatgaggctcctcagaatcccacctttgaagggaactcagcttataaacacagaggagcaaagttggagggccgggcgtagtggctcacacctgtgatctcagcactttgggaggccaaggaaggtggatcacttgaggccaggagttcgagaccagcctgggcaacatagcaaggccccatctctacaaaaattattattttttaaaaaaattagccaggtgtggtggtgcttgcctatagtcccagctactcgggaggctaaggtgggaggatcgctggagcccaggaatttgaggctgcagtgagctgtgattacaccgttgcactccagcctgggtcacagatcaagaccctgtctcttaaaaataaaagttggagacaagagctggctcacctgaaaggagggattagtaggtaggagggtggatggaggatggatggatgtgtgggtggataggaagatggtattaagttggtgcaaaagtctttgatattactcttaatggctttaataaaaagcttgaaggaagaatgattggttggatagacagagataaatgcatactggaaacaaagataaagataaaacacaagttataccaggccagcaactctattttgttcactgcctttagtcccagcctggcacatagtaggcactcaataaagcctgatttgtagc

SEQ ID NO: 343325 - DNA, 3263 bp, Artificial Sequence
  derived and/or modified sequence
ggtagagtgattttccctcggtgactcaactgggacgtagcaggtcgggcagtcaagccaggtgaccccatgagctgtcgctgcatctttctcatgaagcacggggaacgggtcggatggcccgtgggagtcagcatgccgcgtggctgggccgcccccttgctcctgctgctgctccagggaggctggggctgccccgacctcgtctgctacaccgattacctccagacggtcatctgcatcctggaaatgtggaacctccaccccagcacgctcacccttacctggcaagaccagtatgaagagctgaaggacgaggccacctcctgcagcctccacaggtcggcccacaatgccacgcatgccacctacacctgccacatggatgtattccacttcatggccgacgacattttcagtgtcaacatcacagaccagtctggcaactactcccaggagtgtggcagctttctcctggctgagagcatcaagccggctccccctttcaacgtgactgtgaccttctcaggacagtataatatctcctggcgctcagattacgaagaccctgccttctacatgctgaagggcaagcttcagtatgagctgcagtacaggaaccggggagacccctgggctgtgagtccgaggagaaagctgatctcagtggactcaagaagtgtctccctcctccccctggagttccgcaaagactcgagctatgagctgcaggtgcgggcagggcccatgcctggctcctcctaccaggggacctggagtgaatggagtgacccggtcatctttcagacccagtcagaggagttaaaggaaggctggaaccctcacctgctgcttctcctcctgcttgtcatagtcttcattcctgccttctggagcctgaagacccatccattgtggaggctatggaagaagatatgggccgtccccagccctgagcggttcttcatgcccctgtacaagggctgcagcggagacttcaagaaatgggtgggtgcacccttcactggctccagcctggagctgggaccctggagcccagaggtgccctccaccctggaggtgtacagctgccacccaccacggagcccggccaagaggctgcagctcacggagctacaagaaccagcagagctggtggagtctgacggtgtgcccaagcccagcttctggccgacagcccagaactcggggggctcagcttacagtgaggagagggatcggccatacggcctggtgtccattgacacagtgactgtgctagatgcagaggggccatgcacctggccctgcagctgtgaggatgacggctacccagccctggacctggatgctggcctggagcccagcccaggcctagaggacccactcttggatgcagggaccacagtcctgtcctgtggctgtgtctcagctggcagccctgggctaggagggcccctgggaagcctcctggacagactaaagccaccccttgcagatggggaggactgggctgggggactgccctggggtggccggtcacctggaggggtctcagagagtgaggcgggctcacccctggccggcctggatatggacacgtttgacagtggctttgtgggctctgactgcagcagccctgtggagtgtgacttcaccagccccggggacgaaggacccccccggagctacctccgccagtgggtggtcattcctccgccactttcgagccctggaccccaggccagctaatgaggctgactggatgtccagagctggccaggccactgggccctgagccagagacaaggtcacctgggctgtgatgtgaagacacctgcagcctttggtctcctggatgggcctttgagcctgatgtttacagtgtctgtgtgtgtgtgtgcatatgtgtgtgtgtgcatatgcatgtgtgtgtgtgtgtgtgtcttaggtgcgcagtggcatgtccacgtgtgtgtgtgattgcacgtgcctgtgggcctgggataatgcccatggtactccatgcattcacctgccctgtgcatgtctggactcacggagctcacccatgtgcacaagtgtgcacagtaaacgtgtttgtggtcaacagatgacaacagccgtcctccctcctagggtcttgtgttgcaagttggtccacagcatctccggggctttgtgggatcagggcattgcctgtgactgaggcggagcccagccctccagcgtctgcctccaggagctgcaagaagtccatattgttccttatcacctgccaacaggaagcgaaaggggatggagtgagcccatggtgacctcgggaatggcaattttttgggcggcccctggacgaaggtctgaatcccgactctgataccttctggctgtgctacctgagccaagtcgcctcccctctctgggctagagtttccttatccagacagtggggaaggcatgacacacctgggggaaattggcgatgtcacccgtgtacggtacgcagcccagagcagaccctcaataaacgtcagcttccttccttctgcggccagagccgaggcgggcgggggtgagaacatcaatcgtcagcgacagcctgggcacccgcggggccgtcccgcctgcagagggccactcgggggggtttccaggcttaaaatcagtccgtttcgtctcttggaaacagctccccaccaaccaagatttctttttctaacttctgctactaagtttttaaaaattccctttatgcacccaagagatatttattaaacaccaattacgtagcaggccatggctcatgggacccaccccccgtggcactcatggagggggctgcaggttggaactatgcagtgtgctccggccacacatcctgctgggccccctaccctgccccaattcaatcctgccaataaatcctgtcttatttgttcatcctggagaattgaagggaggtcaagttgtttgtcaatgatttgtcagagaacctgttgaaatgtgaattaagaagctaagaaaatatttcttagcaacattttctttttcttttttttttttttcttttgagacagagtctcactctcgtcgcccaggctggaatgcagtggtgcgatctcggctctctgcaacctctgtctcccgggttcaagcgatttcctgcgtcagccccagagtagctggaattacaggcacacaccaccacgcctggctaatttttgtatttttagtagagctggggccaccctggcccggccccg

SEQ ID NO: 343326 - DNA, 1617 bp, Artificial Sequence
  derived and/or modified sequence
atgccccggggctgggccgcccccctgctgctgctgctgctgcagggcggctggggctgcccagacctggtgtgctacacagactacctgcagaccgtcatctgcatcctggagatgtggaacctgcaccccagcaccctgaccctgacctggcaggaccagtatgaggagctgaaggatgaggccaccagctgcagcctgcacaggtctgcccacaatgccacccacgccacctacacctgccacatggatgtgttccacttcatggctgatgacatcttctctgtgaacatcacagaccagagcggcaactacagccaggagtgtggcagcttcctgctggccgagagcatcaagccagccccacccttcaacgtgacagtgaccttcagcggccagtacaacatctcctggaggagtgactatgaagatcctgccttctacatgctgaagggcaagctgcagtatgagctgcagtacagaaacagaggagacccctgggccgtgagccccaggaggaagctgatctctgtggacagccgctctgtgtccctgctgcccctggagttcaggaaggacagcagctatgagctgcaggtgcgggccggccccatgcctggcagcagctaccagggcacctggagcgagtggagcgaccccgtcatcttccagacccagagcgaggagctgaaggagggctggaacccccacctgctgctgctgctgctgctggtgattgtgttcatcccagccttctggagcctgaagacccaccccctgtggaggctgtggaagaagatctgggccgtgcccagccctgagcgcttcttcatgcccctgtacaagggctgcagcggggacttcaagaagtgggtgggcgcccccttcaccggcagcagcctggagctgggcccctggagccctgaggtgcccagcaccctggaggtgtacagctgccaccccccaagaagccctgccaagaggctgcagctgacagagctgcaggagcctgctgagctggtggagagtgatggagtgcccaagcccagcttctggcccacagcccagaacagcggcggcagcgcctacagcgaggagcgggaccggccctacggcctggtgtccattgacacagtgacagtgctggatgctgagggcccctgcacctggccctgcagctgtgaagatgatggctacccagccctggacctggatgctggcctggagcccagccctggcctggaggaccccctgctggatgctggcaccaccgtgctgagctgtggctgtgtgtctgctggcagccctggcctgggcggccccctgggcagcctgctggaccggctgaagccacccctggctgatggagaggactgggccggcggcctgccctggggcggccgcagccctgggggcgtgtctgagagcgaggccggcagccccctggccggcctggacatggacacctttgacagcggctttgtgggcagtgactgcagcagccctgtggagtgtgacttcaccagccctggagatgagggccccccaagaagctacctgcggcagtgggtggtgattcctccacccctgagcagccctggcccccaggccagctag

SEQ ID NO: 343327 - DNA, 1617 bp, Artificial Sequence
  derived and/or modified sequence
atgccccggggctgggccgcccccctgctgctgctgctgctgcaggggggttgggggtgcccggacctggtgtgttataccgactacctgcagactgtgatctgtattttggaaatgtggaatttacaccctagcacgttgacactcacctggcaagaccagtatgaggagctaaaggacgaagccacgtcctgctctcttcaccgatcagcacacaacgctacccatgccacctacacctgccatatggacgtctttcattttatggccgatgacatcttcagcgttaacattaccgatcagtcaggaaactattcacaggaatgcggtagcttcctactggctgaatcaattaagcccgcgccgcctttcaacgtgacggtcaccttctctggacagtataatattagttggaggtcggactatgaggaccctgccttttacatgttaaaaggtaagctccagtacgagttacaatatcggaatcgcggtgatccctgggctgtgtcaccaaggaggaagctgatatccgtcgactccaggagcgtgtcactgttgcccctagaattcagaaaagattccagttacgaactgcaagtccgggccggaccaatgcctggatctagttatcaaggaacatggagtgaatggtcagatccagttatttttcagacacagagcgaggagcttaaagagggctggaatcctcacttgctgttactactcctcttggtgattgtcttcattccagccttttggtcactcaaaacacaccccttgtggaggctgtggaagaagatctgggccgtgccttcccccgagaggttttttatgccactctacaagggttgtagcggggattttaagaaatgggtgggagccccctttaccggctcttctctggaattgggcccctggtccccagaggttccttcgaccttagaggtctatagctgtcacccacctcggtcccctgccaagcggctgcagctgacagagctgcaggaaccggctgaacttgtggagagtgacggggttccaaaaccgtccttttggcctactgctcaaaactctggtggctccgcctacagcgaggaacgagacaggccatatggactggtctcgatagatacagtcacggtattggacgcagaaggcccttgtacctggccctgctcttgcgaggacgacgggtatcccgccttggatctggatgccggcttagagccaagccccggtttggaagatcctctgttagatgcagggaccactgtcctgagctgtggctgtgtgtccgccggatcacccgggctcggcggtcctttgggatccctactagacagactgaaacccccactcgccgatggggaggactgggctggaggcctaccttggggaggacgttctccaggcggagtgagcgagtcggaggcaggctctcccctcgccggtctcgacatggatacatttgacagtgggtttgtgggaagcgactgttcgtcaccagtggagtgtgactttacaagtccgggcgatgaagggccacccagatcttatctgagacagtgggtggtgattcctccccccttaagttcacccggcccgcaagcatcctag

SEQ ID NO: 343328 - DNA, 1617 bp, Artificial Sequence
  derived and/or modified sequence
atgccccggggctgggccgcccccctgctgctgctgctgctgcagggggggtgggggtgcccagacctagtttgctacaccgattacctacaaactgtgatatgcatcttggagatgtggaatttgcaccctagcactttaactttgacctggcaggaccagtatgaggagctgaaagacgaggccaccagctgttcgcttcatcggagcgcgcataatgccacacacgctacctatacatgccatatggacgtgtttcactttatggccgatgatatcttttcagtgaatattacggaccagtctggaaattattcgcaagagtgtggtagctttctcctcgccgaaagtattaagcctgcaccccccttcaacgtcacggtgacgttttcaggtcagtacaatatatcctggcgatccgactacgaagaccccgccttctatatgctcaaaggtaagttacagtatgagctccaatatcggaacagaggagatccttgggctgtctcaccaaggaggaaactcataagtgttgactcacggtccgtgtccttgctgccattggagtttcgcaaagacagctcatatgaactgcaggtgagggcgggtccgatgcccggttcttcctatcagggaacttggtctgaatggtcggaccccgtcatattccagactcaatcagaggaactgaaggaaggttggaaccctcaccttcttctgcttttactactcgtaatcgtgttcatccccgcattttggagccttaagacacatcccctctggcgtctgtggaaaaagatatgggccgtaccaagccctgagaggttcttcatgccactctataaagggtgttcaggcgactttaagaagtgggtgggtgccccttttacaggctcttctctggaacttggcccatggtccccggaggtgccgagcactctcgaggtatattcctgtcaccctccccgctctccagcaaagcgcctgcagctgactgaactccaggaaccagcggagcttgtggagtctgatggggtcccgaaacccagcttctggccgaccgctcaaaacagcggaggcagcgcgtattccgaggagcgtgaccggccatacggattggtgtccattgacacagtaacagtattagacgccgaagggccctgtacatggccctgctcttgcgaggacgacggatacccggctctcgacctcgatgcgggactcgagcctagtccaggactcgaggacccactgctggatgccggtacaaccgtactgagttgtggctgtgtctccgccggtagtcccggactgggcggcccccttggcagcttactcgatcgactcaaaccccccctagcagatggggaggattgggctggcggacttccatggggaggacgatcccccggcggcgtctctgaatcagaggctggatctcctctcgctggattagatatggacacctttgactcaggattcgtgggatctgattgttcgagcccagtcgaatgtgactttacctcccctggcgacgagggccccccaaggagttaccttaggcaatgggtggttataccccctcctctaagctcacccggacctcaagcctcttag

SEQ ID NO: 343329 - DNA, 1617 bp, Artificial Sequence
  derived and/or modified sequence
atgccccggggctgggccgcccccctgctgctgctgctgctgcagggagggtggggctgtccggatctcgtctgttacacagactaccttcagacagtaatctgtattctggagatgtggaatctccaccccagcacacttacactgacttggcaagaccagtacgaggaattgaaggatgaggccactagttgttctctccatagatcagcccacaatgccacacatgccacatacacatgtcacatggacgtgtttcacttcatggcagacgatatttttagcgttaacattacggatcagtccggaaactattctcaagagtgtggaagttttttgctggccgagtctatcaaacctgctcctccgttcaacgtgactgttacgttctctgggcagtacaatatatcttggagatccgattacgaagatcccgccttttacatgcttaagggcaagctccagtatgagctgcagtacagaaatagaggtgatccgtgggcagtctccccccggaggaaattgatatctgtggatagccgttcagttagcttgctgcccttagagtttcgcaaggattcctcatacgagctacaggtacgtgcaggccctatgcctggcagctcatatcagggaacatggtcagagtggtctgatccagtgatttttcagacacagtccgaggaactgaaagagggttggaatccacacctgctgttgctgctgctcctggtcatcgtgtttattccggccttctggagtctgaaaacccacccactgtggcgcctctggaagaagatatgggcagtgcctagccctgaacgtttttttatgccactttataaggggtgctccggggacttcaaaaaatgggtaggcgcccccttcactggctcatctctggaattgggcccctggtctcccgaagttccatctacactggaggtgtactcatgccatcctccccgaagccctgctaaacgtctgcagctcactgagctgcaggagcccgcggagctggttgagtccgatggggtcccgaagccttcattttggcctacagcccagaatagcggagggtcagcgtactctgaggaaagagaccgtccttacggactggtgtctattgacaccgtgacagtgctcgatgcggaaggcccctgtacatggccatgctcctgtgaagatgatgggtatccagctttggacttagacgccgggctggagccgtcccctggcttggaggaccccctgcttgacgctgggacaacggtgctgtcttgtggttgcgtgagcgcaggctcccccggattaggaggcccactcggatccctcttggataggctcaagcctcctctggccgatggtgaggattgggccggaggactcccttggggtggcaggtcccccggaggtgtgagcgagtccgaagccggaagtcctctcgccgggcttgacatggacaccttcgattctggattcgtagggagcgactgctcttctccagtggaatgcgactttacttcccccggtgatgaaggcccgccaagaagctaccttaggcagtgggtcgtcatcccgccaccactgagtagtccaggtccgcaggcatcctag

SEQ ID NO: 343330 - DNA, 1617 bp, Artificial Sequence
  derived and/or modified sequence
atgcctagggggtgggcagccccactgctgctcctcctgctgcagggtgggtggggctgtcctgacctggtgtgttacacagactacttacagaccgtaatttgtatcctcgaaatgtggaatctgcatcccagtacattgacgctcacctggcaggaccagtatgaggagctgaaagatgaggcaaccagttgctcattgcaccggagtgcacacaacgctacccacgctacctatacctgtcacatggatgtttttcacttcatggccgacgacatcttttctgtcaatattactgatcagagcggcaactacagccaggaatgtggctccttcttgctcgccgaatccatcaagccagctcctccctttaatgtgactgtgactttctcaggtcagtataatatcagctggaggagtgattacgaggaccccgcattctacatgctgaaggggaagctccagtacgaactgcagtaccgcaaccgcggtgacccatgggcagtgagccctcggagaaaacttatatctgtggattctaggagcgtttccctgctcccattggaattccgcaaagattccagctatgagctccaagtgcgtgccggaccaatgccagggagctcataccaggggacatggtcagaatggtcagatccagtaatttttcaaactcagagcgaggagttgaaggagggctggaacccacatctactactcctgcttttgcttgtgatagtgttcataccagccttttggtcgctgaagacccatccgctttggaggctttggaagaagatctgggcagttccaagtcctgaacgctttttcatgcccctttataaaggctgcagtggagacttcaaaaagtgggtaggagcaccgttcacaggctctagtctggagctggggccttggagtcctgaagttccgtcaaccctggaagtgtactcttgtcatcctccacgctcgcctgccaagcgcttgcagctgacagagctccaggagccagctgagctggtcgagtcagacggcgtgccgaagccgagcttttggcctacggcccagaacagtggcggaagtgcttactccgaggagagagatagaccctatgggctggtcagtatagacacggttacagtgctcgacgcagaaggcccatgtacttggccatgcagctgtgaggacgatggataccctgctctcgatttggatgcaggacttgagccaagcccaggccttgaggatccgctgctggacgccggaacaactgtgctttcgtgcggatgtgtcagcgctgggtctccagggctcggaggaccactgggaagtctcctggataggctgaagccacccctagctgatggcgaagattgggccggtggcttgccgtggggtggtcgctctcctggcggagtgtcggagagtgaggctggttccccactggctggactcgacatggacactttcgatagcggctttgttgggagcgactgctcgtcccctgtggagtgtgattttacatctcctggggacgagggtcctccccgatcgtacctccggcaatgggtggtcatcccaccccctttgtcttcaccaggacctcaggcttcctag

SEQ ID NO: 343331 - DNA, 1617 bp, Artificial Sequence
  derived and/or modified sequence
atgccccgaggctgggcagcacctctgctcctgctcctcttgcaggggggttggggctgtcctgatctggtgtgctacacggattacttgcagacggttatatgcatcctggaaatgtggaatctgcatccctccacccttacactaacctggcaggatcagtacgaggagctcaaagatgaagctacctcatgctcactgcaccgctcggcacacaatgccactcatgccacttatacctgtcacatggacgtgttccatttcatggctgatgacatttttagtgtgaacatcacagatcaaagtggaaattactctcaggaatgtgggtcattcctgctggccgaatccatcaagccagccccacctttcaacgtgactgtgactttctctggtcagtacaacatttcttggaggagcgactacgaggaccccgctttctacatgcttaaaggaaaactccaatacgaactgcagtatcggaacagaggggacccctgggccgtctcccccaggagaaaactgatatctgtggactcaagatctgtgtccctgctgccgctggaattcagaaaggactcctcctacgagttgcaggttagagccggacccatgcctgggtcctcttatcaagggacgtggagcgaatggtctgatcctgtcatatttcagactcagtcagaggaactcaaagaagggtggaacccccacttgcttctgctcctgctactcgttatcgtgtttatccctgccttctggagtcttaagacacaccccctctggcgtctctggaagaagatctgggctgtgccctcccctgagcggtttttcatgcccctgtataagggctgtagtggcgacttcaagaaatgggtgggcgcaccctttactgggtcatcactggaactgggcccatggtcccccgaggttccctcgactttggaggtctacagctgccaccctcccaggagccccgctaaacggctgcagctcaccgagctccaggaacctgcagaactagtggagagtgacggcgtgcctaaacctagcttttggcccacggctcaaaacagtggaggaagcgcctacagcgaagagagggaccgcccttatggactggtgagcatcgataccgtgacagtgctcgacgccgaaggaccatgcacatggccatgttcttgcgaggatgacggttatcctgccttggacctggacgccggtcttgagccaagccctggcctggaagacccgctgctggatgccggaactaccgtactctcatgcggatgcgtgtccgccggaagtccaggactcggtggacccctgggttccctcctggatcgcctgaagccacctctcgccgacggagaagactgggcgggtggattgccctggggaggcaggtcacccggaggggtttcagaatcagaggccggtagccccctggctggcctcgatatggatacctttgatagtggtttcgtcggctcagactgcagcagccccgttgaatgtgactttacatctccgggagacgagggtccacctaggtcgtatctgagacagtgggtggtcatccctccacctctgtcgtctccgggaccccaggccagttag

SEQ ID NO: 343332 - DNA, 1617 bp, Artificial Sequence
  derived and/or modified sequence
atgccaagaggttgggcggcaccacttctcctgcttctgttgcagggcggatggggctgtccagatctggtttgctataccgactatttacagaccgtgatttgcatcttggagatgtggaacctccacccaagcactctcaccctgacttggcaggaccagtacgaggagctgaaggatgaggccacatcttgttctcttcacaggtccgcacacaatgcgactcacgcaacctacacctgtcatatggacgtgttccatttcatggccgatgatatcttcagcgtgaatattaccgaccagtccggcaattattctcaggaatgtggcagtttcctcctcgctgagagcattaaacctgccccaccgtttaatgtcactgtgacgttttctgggcagtataatattagctggaggagcgattacgaggatcccgcattttacatgctcaaggggaagctgcagtacgaactacaatatcgcaacaggggggatccctgggccgtttccccaaggagaaaactcatctccgtggattcaagatctgtctctctgctccctcttgagttcagaaaagacagctcctacgaattgcaggttagagctgggcctatgccaggaagtagttatcaggggacctggagtgagtggtcggaccctgtcatattccagactcagtcagaagaactgaaggaaggatggaacccccatcttcttctcctgctgttgttagtgatcgtatttattcccgcattttggtcactgaaaacccaccctctatggaggctgtggaaaaaaatttgggccgtgccttcccccgagcgcttttttatgccattatataagggctgctccggggattttaagaagtgggtgggtgctccttttactggttcctcactcgaactcgggccatggagcccagaggtcccctcaaccctggaggtatactcctgccatcctcccagatctcctgctaaaagacttcagctcaccgagctgcaggagccagctgagttggtggaatcagacggggtgccaaaaccatcattttggccaactgcccagaactcaggtggctctgcgtactcagaggagcgggatcgaccgtacggtctggtaagtatcgacaccgtgacagtgctggacgcagagggcccatgcacctggccatgctcttgtgaagacgacgggtatcccgcactggacctcgacgccggactggaaccctctcctggcctcgaagacccattgctcgacgcgggaactactgtcctgtcctgtgggtgcgtatccgcgggttccccagggctcggaggtccactcggctccctgctcgatcgactcaagcccccactcgctgatggtgaggactgggccggtggattgccttgggggggtcggtcccctggcggtgtatcggagagcgaagctggatcacctctagcaggactggatatggacacattcgactcaggcttcgtcgggagcgattgctccagcccagtggagtgcgatttcacgagtcccggagatgaaggtccaccacgatcctacctgagacagtgggtggtaattccaccccctctgagcagccctggcccacaggcctcctag

SEQ ID NO: 343333 - DNA, 1617 bp, Artificial Sequence
  derived and/or modified sequence
atgcccagaggctgggccgcccccctgctgctgctgctgctgcagggcggctggggctgccccgacctggtgtgctacaccgactacctgcagaccgtgatctgcatcctggagatgtggaacctgcaccccagcaccctgaccctgacctggcaggaccagtacgaggagctgaaggacgaggccaccagctgcagcctgcacagaagcgcccacaacgccacccacgccacctacacctgccacatggacgtgttccacttcatggccgacgacatcttcagcgtgaacatcaccgaccagagcggcaactacagccaggagtgcggcagcttcctgctggccgagagcatcaagcccgccccccccttcaacgtgaccgtgaccttcagcggccagtacaacatcagctggagaagcgactacgaggaccccgccttctacatgctgaagggcaagctgcagtacgagctgcagtacagaaacagaggcgacccctgggccgtgagccccagaagaaagctgatcagcgtggacagcagaagcgtgagcctgctgcccctggagttcagaaaggacagcagctacgagctgcaggtgagagccggccccatgcccggcagcagctaccagggcacctggagcgagtggagcgaccccgtgatcttccagacccagagcgaggagctgaaggagggctggaacccccacctgctgctgctgctgctgctggtgatcgtgttcatccccgccttctggagcctgaagacccaccccctgtggagactgtggaagaagatctgggccgtgcccagccccgagagattcttcatgcccctgtacaagggctgcagcggcgacttcaagaagtgggtgggcgcccccttcaccggcagcagcctggagctgggcccctggagccccgaggtgcccagcaccctggaggtgtacagctgccacccccccagaagccccgccaagagactgcagctgaccgagctgcaggagcccgccgagctggtggagagcgacggcgtgcccaagcccagcttctggcccaccgcccagaacagcggcggcagcgcctacagcgaggagagagacagaccctacggcctggtgagcatcgacaccgtgaccgtgctggacgccgagggcccctgcacctggccctgcagctgcgaggacgacggctaccccgccctggacctggacgccggcctggagcccagccccggcctggaggaccccctgctggacgccggcaccaccgtgctgagctgcggctgcgtgagcgccggcagccccggcctgggcggccccctgggcagcctgctggacagactgaagccccccctggccgacggcgaggactgggccggcggcctgccctggggcggcagaagccccggcggcgtgagcgagagcgaggccggcagccccctggccggcctggacatggacaccttcgacagcggcttcgtgggcagcgactgcagcagccccgtggagtgcgacttcaccagccccggcgacgagggcccccccagaagctacctgagacagtgggtggtgatccccccccccctgagcagccccggcccccaggccagctag

SEQ ID NO: 343334 - protein, 351 aa, Artificial Sequence
  derived and/or modified sequence
ELPSAAPDSTLLLTAQHWVANLFILATLIGWTVRSFFLGRMETCCSHLGLRSGRRFAVSIGYWHDPYIQHFVRLSKERKAPEINRGYFARVHGVSQLIKAFLRKTECHCQIVNLGAGMDTTFWRLKDEDLLPSKYFEVDFPMIVTRKLHSIKCKPPLSSPILELHSEDTLQMDGHILDSKRYAVIGADLRDLSELEEKLKKCNMNTQLPTLLIAECVLVYMTPEQSANLLKWAANSFERAMFINYEQVNMGDRFGQIMIENLRRRQCDLAGVETCKSLESQKERLLSNGWETASAVDMMELYNRLPRAEVSRIESLEFLDEMELLEQLMRHYCLCWATKGGNELGLKEITY

SEQ ID NO: 343335 - DNA, 1056 bp, Artificial Sequence
  derived and/or modified sequence
gaactgccttcagctgccccagactctaccctgttactgactgcacagcattgggtcgccaaccttttcatcttggccactctgatcggctggacagtgcggagttttttcttgggccggatggagacgtgttgcagtcaccttggcttgcggtctggtagaagatttgccgtcagcatcggatactggcacgacccctatattcaacactttgtgagactgagtaaggagcgcaaggctcctgaaatcaatagaggctatttcgcacgagtgcatggggtctcccagctcattaaagcattcctgcgcaagacagagtgtcactgtcagatcgtgaacctgggcgctggtatggacaccactttttggaggctgaaggacgaggacttgttgccttctaaatacttcgaagtcgacttccccatgatagtaactcggaaattgcattccatcaaatgcaagccacccctcagtagccccatcctggaattgcacagcgaagatacactccagatggacgggcacattctggatagtaagcggtacgctgttattggcgccgacctgcgggacctctccgagctcgaagaaaaactgaagaagtgcaacatgaatacccagctgccgaccctattaatcgctgagtgtgtcctggtgtatatgaccccagagcagtctgcaaatctcttgaagtgggcagccaattcctttgaacgggccatgtttataaattacgagcaggtcaacatgggcgataggttcgggcaaattatgattgagaacctgcgaagaaggcaatgtgatctggctggggtcgaaacctgcaagtcactggagtcgcagaaggagaggctcttgtccaacggctgggagacagccagcgccgtagatatgatggagctgtataaccgcctccctcgggccgaagtgagccggattgaaagcttagaatttctggatgaaatggagctgcttgagcagctgatgcgacactattgtctgtgttgggctactaaaggagggaatgagcttggtcttaaggagattacgtattag

SEQ ID NO: 343336 - DNA, 1056 bp, Artificial Sequence
  derived and/or modified sequence
gagctgcccagcgctgccccagacagcaccctgctgctgacagcccagcactgggtggccaacctcttcatcctggccaccctgattggctggacagtgcgctccttcttcctgggccgcatggagacctgctgcagccacctgggcctgcggagcggccgccgctttgctgtgtccatcggctactggcatgacccctacatccagcactttgtgcggctgagcaaggagaggaaggcccctgagatcaacagaggctactttgcccgggtgcacggcgtgtcccagctgatcaaggccttcctgaggaagacagagtgccactgccagatcgtgaacctgggcgccggcatggacaccaccttctggaggctgaaggatgaggacctgctgcccagcaagtactttgaggtggacttccccatgattgtgaccaggaagctgcacagcatcaagtgcaagccacccctgagcagccccatcctggagctgcacagcgaggacaccctgcagatggatggccacatcctggacagcaagagatatgctgtgattggagctgacctgcgggacctgtctgagctggaggagaagctgaagaagtgcaacatgaacacccagctgcccaccctgctgattgctgaatgtgtgctggtgtacatgaccccagagcagagcgccaacctgctgaagtgggccgccaacagctttgagcgggccatgttcatcaactatgagcaggtgaacatgggagaccgcttcggccagatcatgattgagaacctgcggcggcggcagtgtgacctggccggcgtggagacctgcaagagcctggagagccagaaggagcggctgctgagcaatggctgggagacagccagcgctgtggacatgatggagctgtacaaccggctgcccagggctgaggtgtccagaattgagagcctggagttcctggatgagatggagctgctggagcagctgatgaggcactactgcctgtgctgggccaccaagggcggcaatgagctgggcctgaaggagatcacctactag

SEQ ID NO: 343337 - DNA, 1260 bp, Artificial Sequence
  derived and/or modified sequence
gaactgccatcagcagcgcccgacagcactctcctcctcactgcccaacactgggtggcaaatcttttcatcttggccactctgataggctggacagtgaggtccttcttcctagggcgcatggaaacctgttgcagtcacctgggtttgcggagtgggaggaggtttgcagtaagcattggctactggcatgacccttacatacagcactttgtgagactgtctaaagagaggaaagcccctgaaatcaacagaggatattttgctcgagtccatggtgtcagtcagcttataaaggcatttctacggaagacagaatgtcattgtcaaattgtcaaccttggggcaggcatggataccaccttctggagattaaaggatgaagatcttctcccaagtaaatattttgaggttgactttccaatgattgtcacgagaaagctgcacagtatcaaatgcaagcctcccctatccagccccattctagaactgcattcagaggacacacttcagatggatggacacatactggattcaaagagatatgccgttattggagcagatctccgagacctgtctgaactggaagagaagctaaagaaatgtaacatgaatacacaattgccaacactcctgatagctgaatgtgtgctggtttacatgactccagagcagtccgcaaacctcctgaagtgggcagccaacagttttgagagagccatgttcataaactacgaacaggtgaacatgggtgatcggtttgggcagatcatgattgaaaacctgcggagacgccagtgtgacctggcgggagtggagacctgcaagtcattagagtcacagaaagaacggctcctgtcgaatgggtgggaaacagcatcggccgtcgacatgatggagttgtacaacaggttacctcgagctgaagtgagcaggatagaatcacttgaattcctggatgaaatggagctgctggagcagctcatgcggcattactgcctttgctgggcaaccaaaggaggaaatgagcttgggctgaaggagataacttattaatctgtcgaaggcttatgccgagccagaagccgaagccacttgccctcctggaggagacctgcaagctccctgagcggtgggcgggcctcgtccgcaggtctcatcccacactcttgagaagccttggtcactacagtggtcgcacatgttcctcttcctgttcctgttgacatgtcgttgtttaaataaatctcacttgccacc

SEQ ID NO: 343338 - DNA, 1056 bp, Artificial Sequence
  derived and/or modified sequence
gagctgcccagcgccgcccccgacagcaccctgctgctgaccgcccagcactgggtggctaatctgtttatcctggccactctgattggatggaccgtgcggtccttcttcctgggaaggatggaaacttgttgctcacacctggggcttcgctccggaaggagattcgccgtctctatcggatactggcacgacccctacattcagcactttgtgcgcctgtcaaaggaaaggaaagccccggaaatcaatcgcggttactttgccagggtacatggcgtgtctcagctgataaaggccttcctacgtaaaacagaatgccactgtcagatcgtgaatctgggggcaggaatggatactacattctggcggctaaaggatgaggatctgcttccatccaagtacttcgaagtcgattttcctatgatcgtgactagaaagctgcattcgatcaaatgcaagccccctttgtccagcccaatcctcgaactccatagcgaagacacactgcaaatggacgggcacattctggactcaaagcggtatgctgtgatcggcgccgatctcagagatctgtcagagctggaggagaaacttaagaaatgcaatatgaatactcagctccctaccctgttgatagctgagtgtgtgcttgtttacatgacaccggaacagtcagctaacctactgaaatgggccgccaatagctttgaacgcgcgatgttcattaactacgaacaagttaacatgggcgataggtttggccagattatgatagagaaccttcggcggagacagtgtgatctagccggcgtcgaaacctgcaaaagcctggaaagccaaaaggaacggctgctaagcaacgggtgggagaccgcttccgcagtggacatgatggagctttataatcgcctacctcgagcagaggtgtcgcggattgaaagcctcgaatttctggatgagatggagctgctggaacaactcatgcggcactactgcctgtgctgggcgacaaagggcggaaatgaattaggcctgaaggagatcacttattag

SEQ ID NO: 343339 - DNA, 1056 bp, Artificial Sequence
  derived and/or modified sequence
gaactgccctcagccgcaccagacagcaccttactactgaccgcccagcactgggtcgcaaacctgttcatccttgcaaccctgattggttggaccgtgcgatcattcttcctgggccgaatggagacgtgttgcagccatcttggtctccgatcaggacggaggtttgccgtgtcaattgggtattggcacgatccttatattcaacattttgttaggctcagtaaagagcggaaagcgccagaaattaatagagggtacttcgcacgggtacatggcgttagccagttgataaaggcatttctgcgtaaaaccgaatgtcactgtcagatagtgaacttgggcgcaggcatggacaccacgttctggcggcttaaggatgaggacctcctcccctccaagtacttcgaggtggattttccgatgatagtcaccagaaagctgcactctatcaaatgtaagccgccactgtcctctcccatcctggaactccactccgaagacactctgcagatggatggacacatactcgactctaaacggtacgcagtgataggagcagacttacgagacctgagcgagttggaggaaaaattgaaaaaatgcaatatgaacacacagcttcccaccctgctgatcgccgagtgcgtgttggtttatatgacaccggagcagtcagccaacttgcttaagtgggccgctaatagctttgaaagagcaatgtttatcaattatgagcaggttaacatgggggacagatttggtcagatcatgatcgaaaatctgagacggcgtcagtgcgatcttgcaggagttgagacatgtaaatcattggagtcgcagaaggagaggcttctctcaaacgggtgggagacggcatcggccgttgatatgatggaattatacaatagactgccaagggctgaagttagtcggattgagtcactagagtttctcgatgagatggaactgctggaacagctcatgcgccactattgtttatgttgggcaaccaaaggagggaatgagctgggactcaaagaaatcacgtactag

SEQ ID NO: 343340 - DNA, 1056 bp, Artificial Sequence
  derived and/or modified sequence
gagctgcccagcgccgcccccgacagcaccctgctgctgaccgcccagcactgggtggccaacctgttcatcctggccaccctgatcggctggaccgtgagaagcttcttcctgggcagaatggagacctgctgcagccacctgggcctgagaagcggcagaagattcgccgtgagcatcggctactggcacgacccctacatccagcacttcgtgagactgagcaaggagagaaaggcccccgagatcaacagaggctacttcgccagagtgcacggcgtgagccagctgatcaaggccttcctgagaaagaccgagtgccactgccagatcgtgaacctgggcgccggcatggacaccaccttctggagactgaaggacgaggacctgctgcccagcaagtacttcgaggtggacttccccatgatcgtgaccagaaagctgcacagcatcaagtgcaagccccccctgagcagccccatcctggagctgcacagcgaggacaccctgcagatggacggccacatcctggacagcaagagatacgccgtgatcggcgccgacctgagagacctgagcgagctggaggagaagctgaagaagtgcaacatgaacacccagctgcccaccctgctgatcgccgagtgcgtgctggtgtacatgacccccgagcagagcgccaacctgctgaagtgggccgccaacagcttcgagagagccatgttcatcaactacgagcaggtgaacatgggcgacagattcggccagatcatgatcgagaacctgagaagaagacagtgcgacctggccggcgtggagacctgcaagagcctggagagccagaaggagagactgctgagcaacggctgggagaccgccagcgccgtggacatgatggagctgtacaacagactgcccagagccgaggtgagcagaatcgagagcctggagttcctggacgagatggagctgctggagcagctgatgagacactactgcctgtgctgggccaccaagggcggcaacgagctgggcctgaaggagatcacctactag

SEQ ID NO: 343341 - DNA, 273 bp, Artificial Sequence
  derived and/or modified sequence
atgtggcactacatcggcgccgccgagtgcccctacctgcagctgccacgatgcaggggaagctccaccaggtattggcacaagaagagtaggggcaggctgacgtggccatggctgctgatgagccagcttcgtacttgccacattaacagccccttccccctcgctgtcacctgtggggtcaagttcagcgaggcagcagtcccagttcacctctctggctgcgtccaaaagatgaatatctgcctgcagcttcagttctctaacgattag

SEQ ID NO: 343342 - DNA, 270 bp, Artificial Sequence
  derived and/or modified sequence
atgagctgccagcagaatcaacagcagtgtcagccccctcccaaatgtcccgctaagtctcctgcccagtgtctgcccccagcgtcaagctcatgcgcaccaagctcaggaggttgcgggccaagcagcgaacggagctgctgcctgagccaccaccgctgtcggcgatctcatcggtgtcgctgccagtccagcaattcttgcgacagggggagtgggcagcagggaggttccagtagctgcggccactcttcagccggttgttgctag

SEQ ID NO: 343343 - protein, 578 aa, Artificial Sequence
  derived and/or modified sequence
MKQDFKLGIPEYFNFAKDVLDQWTDKEKAGKKPSNPAFWWINRNGEEMRWSFEELGSLSRKFANILSEACSLQRGDRVILILPRVPEWWLANVACLRTGTVLIPGTTQLTQKDILYRLQSSKANCIITNDVLAPAVDAVASKCENLHSKLIVSENSREGWGNLKELMKVFLCHPGWSTVARSWLTATSTSLVQAILSLLSSWDYRHASDSHTCVKTKHNEIMAIFFTSGTSGYPKMTAHTHSSFGLGLSVNGRFWLDLTPSDVMWNTSDTGWAKSAWSSVFSPWIQGACVFTHHLPRFEPTSILQTLSKYPITVFCSAPTVYRMLVQNDITSYKFKSLKHCVSAGEPITPDVTEKWRNKTGLDIYEGYGQTETVLICGNFKGMKIKPGSMGKPSPAFDVKIVDVNGNVLPPGQEGDIGIQVLPNRPFGLFTHYVDNPSKTASTLRGNFYITGDRGYMDKDGYFWFVARADDVILSSGYRIGPFEVENALNEHPSVAESAVVSSPDPIRGEVVKAFVVLNPDYKSHDQEQLIKEIQEHVKKTTAPYKYPRKVEFIQELPKTISGKTKRNELRKKEWKTI

SEQ ID NO: 343344 - DNA, 1737 bp, Artificial Sequence
  derived and/or modified sequence
atgaagcaggactttaaacttggtattcctgaatactttaattttgctaaggacgtgcttgaccaatggactgacaaagagaaggctggcaagaagccgtccaaccctgccttttggtggatcaataggaacggcgaagagatgcggtggagctttgaggagctcggctcgttgagccggaaatttgctaatattttgtccgaagcgtgcagcctccagaggggagatcgtgtgattttgattctgccaagagtcccagaatggtggctcgctaatgtcgcttgcctcagaaccggcaccgtgttaattcccggtaccacgcaactcactcaaaaggacattttgtaccggttgcagagctcaaaagccaattgcattatcaccaatgatgtcctagcacctgcggtagacgctgtggcttctaagtgtgaaaacctccactccaagctgattgtttccgaaaactctcgagaaggctggggcaatctgaaagaattaatgaaggtattcctctgtcaccctggttggtccacagtggcgaggtcttggctgacggccacttcaacatccctcgtccaggcaattctttcactcctcagttcatgggattacaggcacgctagcgactcacatacttgtgtaaaaacaaagcacaatgagatcatggctatcttttttactagtggtacaagcggatatcctaagatgacagcgcacacccactcatccttcgggttaggactgtcagtcaatgggcgcttctggctcgatctcaccccatctgacgtcatgtggaacacaagcgatacaggttgggcaaagtcagcctggtccagtgttttttcgccctggattcagggcgcatgcgtgttcacgcaccacctgccacgcttcgagcctacgagtatacttcagacactcagcaaatatcctataaccgtcttctgtagcgcacccacggtctacaggatgctggtgcagaatgatataacatcgtataaatttaagtctttgaagcactgcgtcagtgcaggtgaacccattacccccgacgtcacggagaaatggaggaacaaaactgggctggacatctatgaaggctatggccagactgagactgtgctcatctgtgggaacttcaaaggtatgaagatcaaacccggctccatgggtaagccttctcccgctttcgatgtaaaaatcgttgatgtaaacggcaacgtgttgcctccaggccaggagggagatatcggcatccaagtgttgccgaatcggccattcgggctgttcacccactatgtggataacccatccaaaacggccagcactcttcgcgggaacttctatattacaggggaccgaggctatatggataaagatgggtatttttggtttgttgccagggcagacgatgttatactctcatcagggtatcgtataggtccctttgaagtcgagaacgcactgaacgaacacccaagtgtagctgaatccgctgtggtgagttcccctgatccaatccgtggcgaggtggtgaaagccttcgtggttcttaatcccgactacaaatctcacgatcaggaacagctgataaaggagatccaagaacacgttaagaagactacggcaccctataagtatccccgaaaggtggagtttattcaagagctgcctaagactatctctgggaaaacaaaacgcaatgaactaaggaagaaggaatggaaaaccatatag

SEQ ID NO: 343345 - DNA, 1737 bp, Artificial Sequence
  derived and/or modified sequence
atgaagcaggacttcaagctgggcatccctgagtacttcaactttgccaaggatgtgctggaccagtggacagacaaggagaaggccggcaagaagcccagcaacccagccttctggtggatcaacagaaatggagaggagatgcgctggagctttgaggagctgggcagcctgagcaggaagtttgccaacatcctgtctgaggcctgcagcctgcagagaggagacagagtcatcctgatcctgccccgggtgcctgagtggtggctggccaacgtggcctgcctgaggacaggcaccgtgctgatccctggcaccacccagctgacccagaaggacatcctgtaccgcctgcagagcagcaaggccaactgcatcatcaccaatgatgtgctggccccagctgtggatgctgtggccagcaaatgtgagaacctgcacagcaagctgattgtgtctgagaacagccgggagggctggggcaacctgaaggagctgatgaaggtgttcctgtgccaccctggctggagcacagtggcccgctcctggctgacagccaccagcaccagcctggtgcaggccatcctgagcctgctgagctcctgggactacagacatgccagtgacagccacacctgtgtgaagaccaagcacaatgagatcatggccatcttcttcaccagcggcaccagcggctaccccaagatgacagcccacacccacagcagctttggcctgggcctgtctgtgaatggccgcttctggctggacctgacccccagtgatgtgatgtggaacaccagtgacaccggctgggccaagagcgcctggagctctgtgttcagcccctggatccagggcgcctgtgtgttcacccaccacctgcccaggtttgagcccaccagcatcctgcagaccctgagcaagtaccccatcaccgtcttctgcagcgcccccaccgtgtacaggatgctggtgcagaatgacatcaccagctacaagttcaagagcctgaagcactgtgtgtctgctggggagcccatcaccccagatgtgacagagaagtggaggaacaagacaggcctggacatctatgagggctacggccagacagaaacagtgctgatctgtggcaacttcaagggcatgaagatcaagccaggctccatgggcaagcccagccctgcctttgatgtgaagatcgtggatgtgaatggaaatgtgctgcccccaggccaggagggggacatcggcatccaggtgctgcccaaccggcccttcggcctcttcacccactacgtggacaaccccagcaagacagccagcaccctgcggggcaacttctacatcactggagaccggggctacatggacaaggatggctacttctggtttgtggcccgggcagatgatgtgatcctgagcagcggctaccgcatcggcccctttgaggtggagaatgccctgaatgagcaccccagcgtggccgagagcgctgtggtgagcagcccagaccccatccggggggaggtggtgaaggcctttgtggtgctgaacccagactacaagagccatgaccaggagcagctgatcaaggagatccaggagcacgtgaagaagaccacagccccctacaagtaccccaggaaggtggagttcatccaggagctgcccaagaccatcagcggcaagaccaagagaaatgagctgaggaagaaggagtggaagaccatctag

SEQ ID NO: 343346 - DNA, 1737 bp, Artificial Sequence
  derived and/or modified sequence
atgaagcaggacttcaagctgggcatccccgagtacttcaacttcgctaaagacgtccttgaccagtggaccgataaggaaaaggcaggcaagaaacctagcaatccagcattttggtggatcaataggaatggggaagagatgcgctggtcattcgaagagcttggcagtctatcgagaaagttcgcaaatatcctgagcgaggcatgtagcctccaaaggggagatagagtcattctcatcctgcccagagtcccggagtggtggctcgcaaatgttgcttgcctgcgtaccgggacagtgctcatccctggaacaacgcaattaacccagaaagacatcctatatagattgcagagtagcaaggcaaactgcatcattaccaatgatgttctggctccagcagtcgacgccgtggcgtcaaaatgtgagaacctccattccaagctgattgtgagtgaaaactctagggaaggatggggaaatttgaaagaactgatgaaagtttttctgtgtcatcctggatggtctactgtggcccggtcctggctcaccgccacatcaacctcactggtccaggcaatcctgtcactgttgagtagctgggactatcgccatgcaagcgattcccacacatgtgtcaagacaaagcacaatgagattatggctatatttttcacaagcggcacctctggttacccaaaaatgacagcgcacactcactccagcttcgggttggggctgagtgtgaacggaaggttttggttggacctgaccccgtcagacgtgatgtggaacacatcagacaccggttgggctaaatctgcatggtcttccgtattcagtccatggattcagggcgcgtgcgtgtttacccatcatctgccccggttcgaaccaacgtccattctgcagacattgtcaaaataccctatcaccgtgttctgctccgcccctactgtgtacaggatgttggtgcagaatgacattacatcgtacaagttcaaatcgctgaaacactgtgtctcagcaggcgaaccaattacgccggacgtcacggaaaagtggcgcaacaagacaggactggatatctacgagggttacggccagacagaaaccgtgctgatctgcgggaacttcaaggggatgaaaatcaagccaggctccatgggtaagccttcaccagcctttgacgtgaagatcgtagatgtgaacggcaacgtccttccacctggacaggagggtgacattggcatccaagtgctgcccaaccggccttttgggctgttcacccattacgtggacaatcctagtaagactgccagtaccctgagaggaaacttctatattacaggagaccgggggtatatggacaaggacgggtacttttggttcgttgctcgagccgacgacgttatcctttctagtggatacaggataggtccttttgaagtggagaatgcattgaatgagcatccaagcgtcgccgaatccgctgtggtctcctcacctgatcccatccggggtgaagttgtgaaggctttcgttgtgcttaaccctgactataaatctcatgaccaggagcaactgatcaaggaaattcaggagcacgtgaagaaaacaacagcaccctacaaataccccaggaaggtggagtttatccaggagctgcctaagaccatcagcggcaaaactaaaagaaatgagctcaggaaaaaggagtggaaaacaatttag

SEQ ID NO: 343347 - DNA, 1737 bp, Artificial Sequence
  derived and/or modified sequence
atgaaacaagatttcaagctgggcattcctgagtattttaattttgcaaaagatgttctggatcagtggaccgacaaggagaaggctggcaagaaacccagcaacccggctttctggtggatcaatcggaacggcgaggagatgcggtggtcttttgaggaattgggtagtttgtcccggaagttcgcaaacattctctctgaggcttgttctcttcaacggggagacagggtaatcttaatcctacctagagtgcccgagtggtggctcgccaacgtggcttgtctgaggaccggaactgtgctcatccctggaaccacgcagctgacccaaaaagacatcctgtatagactccagtcttccaaagctaattgcatcattaccaacgatgttctggcccctgctgtggacgcagtggccagcaagtgcgagaacctccattctaagttgatcgtgagtgagaacagccgcgaaggatggggcaatctgaaggaactgatgaaggtgtttctgtgccacccgggttggagcaccgtcgcccgatcatggctcacagccacaagcacctccctggtccaggcgattctctcattactttcctcttgggattaccggcacgcttccgattcccatacatgtgtgaagaccaaacataatgagatcatggcgattttctttacaagtggtacctcagggtacccgaaaatgaccgctcacacccacagctcttttggcctgggtctgtccgtgaacggcagattttggctggatttaactccatcagatgtgatgtggaacactagcgatacagggtgggcaaaatccgcgtggtcaagcgtgttctcaccttggattcagggagcctgcgtcttcacccaccatcttccgaggttcgagcctacttctattctacagaccctttctaaatacccaatcaccgtattctgttccgcacccacggtctaccggatgctagtgcagaatgatatcacctcttacaagtttaagtcactgaaacattgtgtttcagccggtgaacctatcacaccggacgtaactgagaagtggcgcaacaagactgggctagacatttacgagggctacggccagactgagactgtactcatctgcggaaactttaaaggcatgaagattaaacccggatccatgggtaagccgagtccagcctttgacgtgaagattgttgatgtaaatgggaatgtgcttcctccagggcaggagggagatatcggcatccaggttctacccaacaggccctttggcctattcacacattatgttgacaacccctctaagacggcatccacactcagaggcaacttttatatcaccggagatcggggatacatggacaaggacggctacttctggtttgtggcgcgagccgatgacgtgatcctcagctccggctacaggattgggccttttgaggttgaaaatgcgcttaacgaacacccgagtgtagcggaaagcgcagtcgtctcaagtcccgaccccattcgcggagaggttgtgaaggcttttgtggtcctgaatccagattacaaatctcatgatcaggagcagcttattaaagaaattcaggagcatgttaagaagaccaccgcaccctacaagtaccctcgcaaagttgagttcatccaggagctccctaagaccatctccgggaaaactaaaagaaatgaacttcggaagaaggagtggaaaacaatttag

SEQ ID NO: 343348 - DNA, 1737 bp, Artificial Sequence
  derived and/or modified sequence
atgaagcaggacttcaagctgggcatccccgagtacttcaacttcgccaaggacgtgctggaccagtggaccgacaaggagaaggccggcaagaagcccagcaaccccgccttctggtggatcaacagaaacggcgaggagatgagatggagcttcgaggagctgggcagcctgagcagaaagttcgccaacatcctgagcgaggcctgcagcctgcagagaggcgacagagtgatcctgatcctgcccagagtgcccgagtggtggctggccaacgtggcctgcctgagaaccggcaccgtgctgatccccggcaccacccagctgacccagaaggacatcctgtacagactgcagagcagcaaggccaactgcatcatcaccaacgacgtgctggcccccgccgtggacgccgtggccagcaagtgcgagaacctgcacagcaagctgatcgtgagcgagaacagcagagagggctggggcaacctgaaggagctgatgaaggtgttcctgtgccaccccggctggagcaccgtggccagaagctggctgaccgccaccagcaccagcctggtgcaggccatcctgagcctgctgagcagctgggactacagacacgccagcgacagccacacctgcgtgaagaccaagcacaacgagatcatggccatcttcttcaccagcggcaccagcggctaccccaagatgaccgcccacacccacagcagcttcggcctgggcctgagcgtgaacggcagattctggctggacctgacccccagcgacgtgatgtggaacaccagcgacaccggctgggccaagagcgcctggagcagcgtgttcagcccctggatccagggcgcctgcgtgttcacccaccacctgcccagattcgagcccaccagcatcctgcagaccctgagcaagtaccccatcaccgtgttctgcagcgcccccaccgtgtacagaatgctggtgcagaacgacatcaccagctacaagttcaagagcctgaagcactgcgtgagcgccggcgagcccatcacccccgacgtgaccgagaagtggagaaacaagaccggcctggacatctacgagggctacggccagaccgagaccgtgctgatctgcggcaacttcaagggcatgaagatcaagcccggcagcatgggcaagcccagccccgccttcgacgtgaagatcgtggacgtgaacggcaacgtgctgccccccggccaggagggcgacatcggcatccaggtgctgcccaacagacccttcggcctgttcacccactacgtggacaaccccagcaagaccgccagcaccctgagaggcaacttctacatcaccggcgacagaggctacatggacaaggacggctacttctggttcgtggccagagccgacgacgtgatcctgagcagcggctacagaatcggccccttcgaggtggagaacgccctgaacgagcaccccagcgtggccgagagcgccgtggtgagcagccccgaccccatcagaggcgaggtggtgaaggccttcgtggtgctgaaccccgactacaagagccacgaccaggagcagctgatcaaggagatccaggagcacgtgaagaagaccaccgccccctacaagtaccccagaaaggtggagttcatccaggagctgcccaagaccatcagcggcaagaccaagagaaacgagctgagaaagaaggagtggaagaccatctag

SEQ ID NO: 343349 - DNA, 1931 bp, Artificial Sequence
  derived and/or modified sequence
ctatgaatccatgaaacaggacttcaaactggggattccagagtatttcaactttgctaaagatgtcctggaccaatggactgataaggaaaaggctggaaagaaaccttcaaatccagccttctggtggatcaacagaaatggagaagagatgcgatggagttttgaggaactgggatctctgtccagaaaatttgccaatatactttcagaagcctgttccctacaaagaggagatcgggtaattctgattctgcccagggtcccagagtggtggcttgcaaatgtggcctgtctgcgaacagggacagttttaattccaggaaccactcagctgacccagaaagacattctctacagactacaatcttcaaaagcaaactgcattatcaccaatgatgttttagccccagcagtagacgctgttgcatccaaatgtgaaaatctgcactccaagctgattgtatcagagaactccagagaggggtgggggaacctcaaggagttgatgaaagtctttctctgtcacccaggctggagtacggtggctcgatcttggctcactgcaacctccacctccctggttcaagcgattctcagcctcctgagtagctgggattacagacatgccagtgacagccacacctgtgtgaagacaaaacacaatgagatcatggccatattctttaccagtggaacaagtggatatccgaaaatgactgcacacacccacagcagttttggtttaggattatctgtaaatggaaggttctggctagatttgacaccctcagatgtgatgtggaatacctcagatacgggctgggcaaagtctgcatggagtagtgttttttctccgtggatccagggagcatgtgtattcacacaccatttaccccgttttgagccgacttctatcttgcaaacactctccaagtaccccatcacagtcttctgttcagcaccaactgtataccgaatgcttgtacagaatgatataaccagctataagtttaaaagcttaaagcactgtgtgagtgctggggaaccaattacccctgacgtgactgaaaaatggagaaacaagacgggcctggatatctacgaaggatatggacagactgaaacggtgctaatctgtggaaattttaagggaatgaaaattaaacctggctcaatgggaaaaccttctcctgctttcgatgttaagattgtagatgtaaatggcaatgttctacctcctggacaagaaggagatattggcattcaagttctacccaaccgaccatttggcctttttactcattacgtagataatccttcaaaaacagcttcaactctacgaggcaatttctatatcactggggacagaggatatatggataaagatgggtatttctggtttgttgcaagagcagatgatgtcatattatcctctggctatcgaattggaccatttgaggtagaaaatgccctgaatgaacacccttcagttgcagagtcagctgttgtcagcagcccagaccccatcagaggagaggtagtaaaggcttttgtcgttctaaatcctgattacaagtcacatgatcaagaacaactaataaaggagattcaggagcatgttaaaaaaactacagcaccttacaaatatcccagaaaggtagaatttattcaagagctgccaaagactatcagtgggaagacaaaaagaaatgaactgaggaagaaagaatggaagacaatttaaagttgtttcattaattaccatatctataaaacaaacatagtatctgtcaatctctagaaaccacaagatgatggagaggtcataaaaactgtggtagtatgcttagaaactgttgatttaaaatatcttgtggttatgatatcagaggctaaattttgaaataaaatatttggcaaattcctcc

SEQ ID NO: 343350 - protein, 685 aa, Artificial Sequence
  derived and/or modified sequence
MLLHINPAYLFKLLHGFPPWIMPTDGNLGDKNFQMGKPGHREGATMHVKKYLLKGLHRLQKGPGYTYKELLVWYCDNTNTHGPKRIICEGPKKKAMWFLLTLLFAALVCWQWGIFIRTYLSWEVSVSLSVGFKTMDFPAVTICNASPFKYSKIKHLLKDLDELMEAVLERILAPELSHANATRNLNFSIWNHTPLVLIDERNPHHPMVLDLFGDNHNGLTSSSASEKICNAHGCKMAMRLCSLNRTQCTFRNFTSATQALTEWYILQATNIFAQVPQQELVEMSYPGEQMILACLFGAEPCNYRNFTSIFYPHYGNCYIFNWGMTEKALPSANPGTEFGLKLILDIGQEDYVPFLASTAGVRLMLHEQRSYPFIRDEGIYAMSGTETSIGVLVDKLQRMGEPYSPCTVNGSEVPVQNFYSDYNTTYSIQACLRSCFQDHMIRNCNCGHYLYPLPRGEKYCNNRDFPDWAHCYSDLQMSVAQRETCIGMCKESCNDTQYKMTISMADWPSEASEDWIFHVLSQERDQSTNITLSRKGIVKLNIYFQEFNYRTIEESAANNIVWLLSNLGGQFGFWMGGSVLCLIEFGEIIIDFVWITIIKLVALAKSLRQRRAQASYAGPPPTVAELVEAHTNFGFQPDTAPRSPNTGPYPSEQALPIPGTPPPNYDSLRLQPLDVIESDSEGDAI

SEQ ID NO: 343351 - DNA, 2058 bp, Artificial Sequence
  derived and/or modified sequence
atgttactacatatcaaccccgcctatctttttaaattgctgcatgggtttcccccttggatcatgcctaccgatgggaacttgggcgacaaaaactttcaaatggggaaacccgggcatcgggagggcgctactatgcatgttaagaagtatttactcaagggattgcacagactgcaaaaggggccggggtacacctataaggagttacttgtgtggtattgcgataatactaacactcatggtcccaagcggatcatatgcgaggggcctaagaagaaggccatgtggttcttgctgaccttgcttttcgcggctctggtgtgctggcagtggggaatcttcatccggacttacttatcgtgggaagtgagtgtgagtttgtccgtgggatttaagaccatggatttccccgccgtcaccatttgcaatgcatccccattcaaatactccaaaattaagcatctgctaaaagatctggatgaactgatggaagccgttctggagaggatcctcgctcccgagctctcccacgccaacgccaccaggaatctgaacttctcaatttggaaccatacccccctggtgctcatcgatgaacgcaaccctcatcatcctatggtgctggatttgttcggcgacaaccacaatggcctcacctcatcgtctgcctcggaaaagatctgtaacgcccacggttgcaaaatggcaatgagactctgctccctgaaccgaactcaatgcacctttagaaatttcacaagtgctacgcaggcgctcacagaatggtatatcctgcaggccaccaacatattcgctcaagttccccaacaagagctggtggagatgtcataccccggtgagcaaatgatactggcttgcctattcggggcggaaccatgcaactatcgcaacttcacaagcattttttatcctcattacgggaattgctatatatttaattggggcatgaccgagaaggcgttgccgtctgcaaatcccggtaccgagtttggcttaaagctcattctggatatcgggcaggaggactatgtgcctttcctggccagtaccgctggtgtacgcctgatgctgcacgagcagcgctcgtaccctttcatcagagatgagggaatctatgccatgtctggtaccgaaacctccattggggtcttggtggacaagctccagcgcatgggcgaaccttatagcccatgtaccgttaacggctccgaagtacccgtgcagaacttctactccgactataataccacgtactctatccaggcttgcctgagatcttgtttccaggatcacatgatcagaaactgcaactgtggccactacctataccctctccctaggggagagaaatactgtaacaaccgcgactttcctgactgggcccactgctattccgacctacaaatgtcagtcgcccagcgcgaaacatgcatcggaatgtgtaaggagagctgtaatgacacccagtataagatgacaatctctatggccgactggccctctgaggcatccgaggattggatctttcatgtgctgtctcaggagcgagaccagagcacaaatattacactgtctagaaaagggatcgtcaagctcaatatttactttcaggagtttaactatcggaccatcgaagagagtgccgcaaataacattgtatggctactaagcaatcttgggggtcaattcgggttctggatgggcggctctgtgctatgtctaatagagttcggcgagataattatcgactttgtttggattacgatcataaaactcgtggctttagccaagagcttacgacagaggcgtgctcaagcctcttacgcaggaccaccaccaacagtcgccgaactcgtggaggcccataccaactttggattccagccagataccgccccccgaagccctaatacagggccataccccagcgaacaggccctgcctattccaggcacgcctccccctaattacgactcattacgccttcagcctctggacgtgatcgaatctgactccgagggcgatgcaatctag

SEQ ID NO: 343352 - DNA, 2058 bp, Artificial Sequence
  derived and/or modified sequence
atgctgctgcacatcaacccagcctacctgttcaagctgctgcacggcttccccccctggatcatgcccacagatggcaacctgggggacaagaacttccagatgggcaagccaggccaccgggagggcgccaccatgcacgtgaagaagtacctgctgaagggcctgcaccggctgcagaagggccctggctacacctacaaggagctgctggtgtggtactgtgacaacaccaacacccacggccccaagaggatcatctgtgagggccccaagaagaaggccatgtggttcctgctgaccctgctgtttgctgccctggtgtgctggcagtggggcatcttcatccgcacctacctgtcctgggaggtgtctgtgtccctgtctgtgggcttcaagaccatggacttccctgctgtgaccatctgcaatgccagccccttcaagtacagcaagatcaagcacctgctgaaggacctggatgagctgatggaggccgtgctggagcgcatcctggcccctgagctgagccacgccaatgccaccaggaacctgaacttcagcatctggaaccacacccccctggtgctgattgatgaaagaaacccccaccaccccatggtgctggacctgtttggagacaaccacaacggcctgaccagcagcagcgccagcgagaagatctgcaatgcccacggctgcaagatggccatgaggctgtgcagcctgaacagaacccagtgcaccttcaggaacttcaccagcgccacccaggccctgacagagtggtacatcctgcaggccaccaacatctttgcccaggtgccccagcaggagctggtggagatgagctacccaggagagcagatgatcctggcctgcctgtttggagctgagccctgcaactacagaaacttcaccagcatcttctacccccactacggcaactgctacatcttcaactggggcatgacagagaaggccctgcccagcgccaaccctggaacagaatttggcctgaagctgatcctggacatcggccaggaggactatgtgcccttcctggccagcacagctggggtgcggctgatgctgcacgagcagaggagctaccccttcatcagagatgagggcatctatgccatgtctggaacagagaccagcattggagtgctggtggacaagctgcagaggatgggagagccctacagcccctgcaccgtgaatggaagtgaggtgcctgtgcagaacttctacagcgactacaacaccacctacagcatccaggcctgcctgcggagctgcttccaggaccacatgatccggaactgcaactgtggccactacctgtaccccctgcccagaggagagaagtactgcaacaacagagacttcccagactgggcccactgctacagcgacctgcagatgtctgtggcccagcgggagacctgcatcggcatgtgcaaggagagctgcaatgacacccagtacaagatgaccatctccatggctgactggcccagcgaggccagcgaggactggatcttccacgtgctgagccaggagcgggaccagagcaccaacatcaccctgagcaggaaaggaattgtgaagctgaacatctacttccaggagttcaactaccgcaccatcgaggagagcgctgccaacaacatcgtgtggctgctgagcaacctgggcggccagtttggcttctggatgggcggctctgtgctgtgcctgattgaatttggagagatcatcatcgactttgtgtggatcaccatcatcaagctggtggccctggccaagagcctgcggcagaggcgggcccaggccagctatgccggccccccacccaccgtggccgagctggtggaggcccacaccaactttggcttccagcctgacacagcccccaggagccccaacacaggcccctaccccagcgagcaggccctgcccatccctggcaccccaccacccaactatgacagcctgcggctgcagcccctggatgtgattgaaagtgacagtgaaggagatgccatctag

SEQ ID NO: 343353 - DNA, 2058 bp, Artificial Sequence
  derived and/or modified sequence
atgctgctgcacatcaaccccgcctacctgttcaagctgctgcacggtttccctccatggatcatgccaactgacgggaatctgggggacaaaaatttccagatgggaaaacccggacatagagaaggcgcaaccatgcatgtgaagaagtatttgctgaagggtttgcatcggttgcagaagggccctggttatacctacaaagagctcttggtatggtactgcgataacacaaacacccacggcccaaagaggattatttgtgagggtccgaaaaagaaagccatgtggttcctgctcacactgctgtttgctgcattggtctgctggcagtggggaattttcattcggacctacctaagttgggaggtctcggtaagcctgtcggtgggatttaaaacaatggatttcccagccgtgacaatttgtaatgctagtccctttaagtacagcaaaatcaaacacctcctgaaagacctggatgagctgatggaagccgtcctagagcgcatcctggccccagagctgagtcacgccaatgccacaaggaatctgaacttctccatctggaatcacaccccgttggtcctcattgacgagcgcaatcctcatcaccctatggtgttagacctgtttggagataaccacaatggcctgacctcaagtagtgcctctgagaagatctgtaacgcacacggctgtaagatggcaatgcgactgtgttctctcaaccggacacaatgcactttcaggaattttacttctgccacgcaggccctgactgaatggtacattctacaggcaactaacatcttcgctcaggtgcctcagcaggagcttgtagaaatgtcataccccggggaacagatgatattggcgtgcttgtttggagcagagccctgtaattaccgaaatttcacatctattttctatccgcattatggaaactgctatatctttaactgggggatgaccgaaaaagctctgccaagtgcgaatcccggaacggaattcggtctgaagctcatcctggatattggacaggaggactatgttccgtttctggcctccaccgccggagtgagactaatgctgcatgagcaacgctcttatccatttatcagagacgagggcatctacgcaatgtcaggaacagagacaagtattggtgtgttagtggataagctgcagagaatgggcgagccgtactcaccctgcacagttaatggttctgaagtcccagtgcagaacttctatagtgactacaacactacttattcaattcaggcatgtctgcgatcatgttttcaagaccacatgattcgtaactgcaattgtggtcattatctgtatccactgccccgcggggagaagtactgtaacaatagggactttccagactgggctcactgctattctgacctgcagatgagtgttgctcagagagaaacgtgcattgggatgtgtaaagaaagctgtaatgatactcagtacaagatgaccatctctatggctgattggccttcagaggctagcgaggattggatattccacgttctttcacaggagcgcgaccagtcaactaacatcactctgagcagaaagggcatcgtgaagttgaacatctatttccaggagtttaactataggacaattgaggagagtgccgcaaataacattgtgtggctgttgtctaatctgggaggccagtttggtttctggatgggcggaagcgtcctgtgtctcatagagtttggggagatcatcatcgacttcgtctggatcactattatcaagctggttgcacttgcaaagtcactcaggcaacgcagagcccaggcgtcctatgccggacctccaccaactgtagccgagttagtcgaggcccatactaatttcggatttcagccagataccgctcctcggagccctaacacagggccctatccctcagaacaggcacttcctatccccggaacaccccctccaaattacgactccctgcggctgcaacccctggatgtcatcgaatccgactcagaaggagacgccatatag

SEQ ID NO: 343354 - DNA, 2058 bp, Artificial Sequence
  derived and/or modified sequence
atgctgctgcatatcaacccggcatacttgttcaaactgctgcatgggttccccccatggattatgcctaccgacggcaacttaggcgacaaaaattttcagatgggtaaacccggtcatagagagggggctacaatgcacgtcaagaagtatctcctgaaaggtttacataggctccaaaagggcccaggctatacgtataaagagttgcttgtgtggtactgtgataataccaacacccacggacccaaaagaatcatttgtgagggcccaaaaaagaaggctatgtggttccttctcacactcttgtttgccgcactggtgtgttggcagtggggtatttttattaggacttatctcagctgggaggttagtgtgagtctttccgtcggatttaaaacgatggattttccggcagtaacaatttgcaacgcctccccttttaagtactccaagatcaagcacttgctgaaggaccttgacgagttgatggaggcagtgttggaacggattctggccccagagctttcacacgctaatgcaacccgcaatctgaacttctcaatctggaatcatacacccctggtgctgattgatgagagaaacccgcatcaccctatggttctggacttgttcggagacaaccacaatggccttacctcatcctcagcctcagagaagatctgcaatgcccacggctgcaagatggcaatgcgcctctgctctctgaaccgtacccagtgcacttttcgcaacttcacttctgccacacaggccctgactgagtggtacattctccaggcaactaacatctttgcccaagtgccccagcaggagctcgtggagatgtcctatcccggagaacagatgatactcgcctgtttgttcggagccgagccctgtaactacaggaacttcactagtattttttacccacactatggaaactgctacatattcaactgggggatgacagagaaagcactgcctagcgccaacccaggcaccgagtttgggctaaagctgatcctggatatcggccaggaggactacgttccattcctggctagcaccgccggtgtgcgtctgatgttgcatgaacagcgctcatatcctttcataagggatgaaggcatatatgctatgtctggcaccgagacatccatcggagtgctcgttgacaaactccagcggatgggggagccatactctccttgcacggttaacggctctgaggtgccagttcagaatttctacagcgattacaacacaacctatagcatccaggcttgccttaggtcctgctttcaggatcacatgattagaaactgtaactgtggccactacttgtacccactgccacggggagaaaaatactgcaacaatcgggactttcctgactgggcgcactgctactcagatcttcaaatgagcgtggcccaaagggagacttgcatcggaatgtgcaaagagtcctgtaacgacacacagtataagatgaccatcagtatggccgattggccttctgaggcttcggaggattggatattccatgtcctatcacaggagcgagaccagtctactaatatcacactgtcgcgaaagggcatcgtgaagcttaacatttacttccaggagtttaactatagaaccatagaagaaagcgctgccaataacatagtatggctcctgagcaatctcggtggacagttcggtttctggatgggtggctccgtgctgtgtctcattgaattcggcgaaattatcatagacttcgtttggattaccattattaagcttgtcgccctggcaaaatctctgagacagaggagagctcaggcgagctatgccggaccaccacccaccgtggcagaactggtagaagcccacaccaatttcggattccagcctgacacagcgcctaggtctccaaacacaggcccttatccctccgaacaggcgctccctatcccagggaccccacctcccaattatgattcactcaggcttcaaccactcgacgtgattgagtcagattctgaaggcgatgccatttag

SEQ ID NO: 343355 - DNA, 2556 bp, Artificial Sequence
  derived and/or modified sequence
atgctgctgcatataaacccagcttatttatttaaactgctgcatggattcccgccgtggataatgcctaccgatgggaatttaggtgacaaaaattttcagatggggaaaccagggcacagagagggtgccactatgcacgtgaagaagtacctgctgaagggcctgcatcggctgcagaagggccccggctacacgtacaaggagctgctggtgtggtactgcgacaacaccaacacccacggccccaagcgcatcatctgtgaggggcccaagaagaaagccatgtggttcctgctcaccctgctcttcgccgccctcgtctgctggcagtggggcatcttcatcaggacctacttgagctgggaggtcagcgtctccctctccgtaggcttcaagaccatggacttccctgccgtcaccatctgcaatgctagccccttcaagtattccaaaatcaagcatttgctgaaggacctggatgagctgatggaagctgtcctggagagaatcctggctcctgagctaagccatgccaatgccaccaggaacctgaacttctccatctggaaccacacacccctggtccttattgatgaacggaacccccaccaccccatggtccttgatctctttggagacaaccacaatggcttaacaagcagctcagcatcagaaaagatctgtaatgcccacgggtgcaaaatggccatgagactatgtagcctcaacaggacccagtgtaccttccggaacttcaccagtgctacccaggcattgacagagtggtacatcctgcaggccaccaacatctttgcacaggtgccacagcaggagctagtagagatgagctaccccggcgagcagatgatcctggcctgcctattcggagctgagccctgcaactaccggaacttcacgtccatcttctaccctcactatggcaactgttacatcttcaactggggcatgacagagaaggcacttccttcggccaaccctggaactgaattcggcctgaagttgatcctggacataggccaggaagactacgtccccttccttgcgtccacggccggggtcaggctgatgcttcacgagcagaggtcataccccttcatcagagatgagggcatctacgccatgtcggggacagagacgtccatcggggtactcgtggacaagcttcagcgcatgggggagccctacagcccgtgcaccgtgaatggttctgaggtccccgtccaaaacttctacagtgactacaacacgacctactccatccaggcctgtcttcgctcctgcttccaagaccacatgatccgtaactgcaactgtggccactacctgtacccactgccccgtggggagaaatactgcaacaaccgggacttcccagactgggcccattgctactcagatctacagatgagcgtggcgcagagagagacctgcattggcatgtgcaaggagtcctgcaatgacacccagtacaagatgaccatctccatggctgactggccttctgaggcctccgaggactggattttccacgtcttgtctcaggagcgggaccaaagcaccaatatcaccctgagcaggaagggaattgtcaagctcaacatctacttccaagaatttaactatcgcaccattgaagaatcagcagccaataacatcgtctggctgctctcgaatctgggtggccagtttggcttctggatggggggctctgtgctgtgcctcatcgagtttggggagatcatcatcgactttgtgtggatcaccatcatcaagctggtggccttggccaagagcctacggcagcggcgagcccaagccagctacgctggcccaccgcccaccgtggccgagctggtggaggcccacaccaactttggcttccagcctgacacggccccccgcagccccaacactgggccctaccccagtgagcaggccctgcccatcccaggcaccccgccccccaactatgactccctgcgtctgcagccgctggacgtcatcgagtctgacagtgagggtgatgccatctaaccctgcccctgcccaccccgggcggctgaaactcactgagcagccaagactgttgcccgaggcctcactgtatggtgccctctccaaagggtcgggagggtagctctccaggccagagcttgtgtccttcaacagagaggccagcggcaactggtccgttactggccaagggctctgtagaatcacggtgctggtacaggatgcaggaataaattgtatcttcacctggttcctaccctcgtccctacctgtcctgatcctggtcctgaagacccctcggaacaccctctcctggtggcaggccacttccctcccagtgccagtctccatccaccccagagaggaacaggcgggtgggccatgtggttttctccttcctggccttggctggcctctggggcaggggtggtggagagatggaagggcatcaggtgtagggaccctgccaagtggcacctgatttactctagaaaataaaagtagaaaatactgagtcca

SEQ ID NO: 343356 - DNA, 2597 bp, Artificial Sequence
  derived and/or modified sequence
gtgcttccccgcccctgaacctgctccctcccagtcggtctcgccgcgctcgccgggtgtcccagtgtcaccaacactcggccgccgccgccagcttggcgcgcaccgccgcctccgccaccgccgacagcgcgcatcctccgtgtccccgctccgccgcccgagcaggtgccactatgcacgtgaagaagtacctgctgaagggcctgcatcggctgcagaagggccccggctacacgtacaaggagctgctggtgtggtactgcgacaacaccaacacccacggccccaagcgcatcatctgtgaggggcccaagaagaaagccatgtggttcctgctcaccctgctcttcgccgccctcgtctgctggcagtggggcatcttcatcaggacctacttgagctgggaggtcagcgtctccctctccgtaggcttcaagaccatggacttccctgccgtcaccatctgcaatgctagccccttcaagtattccaaaatcaagcatttgctgaaggacctggatgagctgatggaagctgtcctggagagaatcctggctcctgagctaagccatgccaatgccaccaggaacctgaacttctccatctggaaccacacacccctggtccttattgatgaacggaacccccaccaccccatggtccttgatctctttggagacaaccacaatggcttaacaagcagctcagcatcagaaaagatctgtaatgcccacgggtgcaaaatggccatgagactatgtagcctcaacaggacccagtgtaccttccggaacttcaccagtgctacccaggcattgacagagtggtacatcctgcaggccaccaacatctttgcacaggtgccacagcaggagctagtagagatgagctaccccggcgagcagatgatcctggcctgcctattcggagctgagccctgcaactaccggaacttcacgtccatcttctaccctcactatggcaactgttacatcttcaactggggcatgacagagaaggcacttccttcggccaaccctggaactgaattcggcctgaagttgatcctggacataggccaggaagactacgtccccttccttgcgtccacggccggggtcaggctgatgcttcacgagcagaggtcataccccttcatcagagatgagggcatctacgccatgtcggggacagagacgtccatcggggtactcgtggacaagcttcagcgcatgggggagccctacagcccgtgcaccgtgaatggttctgaggtccccgtccaaaacttctacagtgactacaacacgacctactccatccaggcctgtcttcgctcctgcttccaagaccacatgatccgtaactgcaactgtggccactacctgtacccactgccccgtggggagaaatactgcaacaaccgggacttcccagactgggcccattgctactcagatctacagatgagcgtggcgcagagagagacctgcattggcatgtgcaaggagtcctgcaatgacacccagtacaagatgaccatctccatggctgactggccttctgaggcctccgaggactggattttccacgtcttgtctcaggagcgggaccaaagcaccaatatcaccctgagcaggaagggaattgtcaagctcaacatctacttccaagaatttaactatcgcaccattgaagaatcagcagccaataacatcgtctggctgctctcgaatctgggtggccagtttggcttctggatggggggctctgtgctgtgcctcatcgagtttggggagatcatcatcgactttgtgtggatcaccatcatcaagctggtggccttggccaagagcctacggcagcggcgagcccaagccagctacgctggcccaccgcccaccgtggccgagctggtggaggcccacaccaactttggcttccagcctgacacggccccccgcagccccaacactgggccctaccccagtgagcaggccctgcccatcccaggcaccccgccccccaactatgactccctgcgtctgcagccgctggacgtcatcgagtctgacagtgagggtgatgccatctaaccctgcccctgcccaccccgggcggctgaaactcactgagcagccaagactgttgcccgaggcctcactgtatggtgccctctccaaagggtcgggagggtagctctccaggccagagcttgtgtccttcaacagagaggccagcggcaactggtccgttactggccaagggctctgtagaatcacggtgctggtacaggatgcaggaataaattgtatcttcacctggttcctaccctcgtccctacctgtcctgatcctggtcctgaagacccctcggaacaccctctcctggtggcaggccacttccctcccagtgccagtctccatccaccccagagaggaacaggcgggtgggccatgtggttttctccttcctggccttggctggcctctggggcaggggtggtggagagatggaagggcatcaggtgtagggaccctgccaagtggcacctgatttactctagaaaataaaagtagaaaatactgagtcca

SEQ ID NO: 343357 - DNA, 2058 bp, Artificial Sequence
  derived and/or modified sequence
atgctgctgcacatcaaccccgcctacctgttcaagctgctgcacggcttccccccctggatcatgcccaccgacggcaacctgggcgacaagaacttccagatgggcaagcccggccacagagagggcgccaccatgcacgtgaagaagtacctgctgaagggcctgcacagactgcagaagggccccggctacacctacaaggagctgctggtgtggtactgcgacaacaccaacacccacggccccaagagaatcatctgcgagggccccaagaagaaggccatgtggttcctgctgaccctgctgttcgccgccctggtgtgctggcagtggggcatcttcatcagaacctacctgagctgggaggtgagcgtgagcctgagcgtgggcttcaagaccatggacttccccgccgtgaccatctgcaacgccagccccttcaagtacagcaagatcaagcacctgctgaaggacctggacgagctgatggaggccgtgctggagagaatcctggcccccgagctgagccacgccaacgccaccagaaacctgaacttcagcatctggaaccacacccccctggtgctgatcgacgagagaaacccccaccaccccatggtgctggacctgttcggcgacaaccacaacggcctgaccagcagcagcgccagcgagaagatctgcaacgcccacggctgcaagatggccatgagactgtgcagcctgaacagaacccagtgcaccttcagaaacttcaccagcgccacccaggccctgaccgagtggtacatcctgcaggccaccaacatcttcgcccaggtgccccagcaggagctggtggagatgagctaccccggcgagcagatgatcctggcctgcctgttcggcgccgagccctgcaactacagaaacttcaccagcatcttctacccccactacggcaactgctacatcttcaactggggcatgaccgagaaggccctgcccagcgccaaccccggcaccgagttcggcctgaagctgatcctggacatcggccaggaggactacgtgcccttcctggccagcaccgccggcgtgagactgatgctgcacgagcagagaagctaccccttcatcagagacgagggcatctacgccatgagcggcaccgagaccagcatcggcgtgctggtggacaagctgcagagaatgggcgagccctacagcccctgcaccgtgaacggcagcgaggtgcccgtgcagaacttctacagcgactacaacaccacctacagcatccaggcctgcctgagaagctgcttccaggaccacatgatcagaaactgcaactgcggccactacctgtaccccctgcccagaggcgagaagtactgcaacaacagagacttccccgactgggcccactgctacagcgacctgcagatgagcgtggcccagagagagacctgcatcggcatgtgcaaggagagctgcaacgacacccagtacaagatgaccatcagcatggccgactggcccagcgaggccagcgaggactggatcttccacgtgctgagccaggagagagaccagagcaccaacatcaccctgagcagaaagggcatcgtgaagctgaacatctacttccaggagttcaactacagaaccatcgaggagagcgccgccaacaacatcgtgtggctgctgagcaacctgggcggccagttcggcttctggatgggcggcagcgtgctgtgcctgatcgagttcggcgagatcatcatcgacttcgtgtggatcaccatcatcaagctggtggccctggccaagagcctgagacagagaagagcccaggccagctacgccggccccccccccaccgtggccgagctggtggaggcccacaccaacttcggcttccagcccgacaccgcccccagaagccccaacaccggcccctaccccagcgagcaggccctgcccatccccggcacccccccccccaactacgacagcctgagactgcagcccctggacgtgatcgagagcgacagcgagggcgacgccatctag

SEQ ID NO: 343358 - DNA, 1923 bp, Artificial Sequence
  derived and/or modified sequence
atgcacgtgaaaaagtacctccttaaagggctccatcgacttcagaaaggcccaggctacacttataaagaactcctggtttggtactgcgataatactaacacccatgggccaaaacgtattatctgcgagggcccaaagaagaaggcaatgtggttcttattaacattgctttttgctgccctggtgtgctggcagtggggaatcttcatacggacataccttagttgggaggtgtctgtttcactgagcgttgggtttaagactatggactttccagctgtgaccatatgtaatgcatctcctttcaagtactcaaagatcaagcatcttctgaaagatctggacgaactgatggaggctgttctggaacgcatcctcgcccctgagctaagccatgccaatgctacacgtaatttgaacttctcaatctggaatcacactcctttagtactgattgatgagcggaaccctcaccatcccatggttttggacctgttcggcgataaccacaacggccttacatcttccagtgcctcagagaagatctgcaacgcccatggatgcaagatggcgatgagattgtgttctctgaacaggacccaatgtactttccggaatttcactagcgccacgcaagccctcaccgagtggtacattctccaggccacgaacatcttcgcacaagttccgcagcaggagctcgtggagatgtcttatcctggagaacagatgattctcgcatgtctctttggcgcagaaccttgcaactaccgaaattttaccagcattttttaccctcattacggaaattgttacatctttaattggggtatgacagagaaggctctcccttccgccaacccaggcaccgagttcgggttgaagttgattctcgacataggccaggaagattacgttccgttcctggccagcacagcgggcgtgcgacttatgctccacgagcagcgtagctatccttttatcagggatgaggggatctatgctatgtccggaaccgagacgagcatcggggtcctggtagataagttgcagagaatgggcgagccatactctccgtgtactgtgaatggttccgaggttccagtgcagaatttttactcagactataataccacctattcgatccaggcatgcttgagaagctgtttccaggatcacatgatccgcaattgtaactgtggacattatttatatccactgcctcgaggggagaaatactgcaacaaccgcgacttcccagattgggctcactgttactcagacttacaaatgtccgttgctcagcgggagacgtgcattggtatgtgcaaagaatcgtgtaacgacacacagtataagatgacaatctctatggccgattggccgtcggaggcaagcgaagactggatttttcatgtgttgtcgcaagagagggaccagagcacgaatatcaccctgtcccggaaaggaatcgttaagcttaatatctatttccaagaattcaattacaggaccatcgaagagtctgcagccaacaacatagtctggttattgtctaaccttgggggccagtttggattctggatgggcggctccgtgttgtgcctgattgagtttggcgaaattatcatagatttcgtgtggatcacaatcattaagctcgtggcgcttgccaaatcactcaggcagcgaagagcacaagcctcctatgcgggccccccgcctaccgtggcggagttggtggaagctcacacaaatttcggatttcagcctgataccgccccccgatccccaaacactggaccttacccaagcgaacaagcactgcccattcccggcaccccccctcccaactacgactcattgcgcctgcaaccactagatgttatcgagtcagacagcgagggggacgccatctag

SEQ ID NO: 343359 - DNA, 1923 bp, Artificial Sequence
  derived and/or modified sequence
atgcacgtgaagaagtacctgctgaagggcctgcaccggctgcagaagggccctggctacacctacaaggagctgctggtgtggtactgtgacaacaccaacacccacggccccaagaggatcatctgtgagggccccaagaagaaggccatgtggttcctgctgaccctgctgtttgctgccctggtgtgctggcagtggggcatcttcatccgcacctacctgtcctgggaggtgtctgtgtccctgtctgtgggcttcaagaccatggacttccctgctgtgaccatctgcaatgccagccccttcaagtacagcaagatcaagcacctgctgaaggacctggatgagctgatggaggccgtgctggagcgcatcctggcccctgagctgagccacgccaatgccaccaggaacctgaacttcagcatctggaaccacacccccctggtgctgattgatgagaggaacccccaccaccccatggtgctggacctgtttggagacaaccacaacggcctgaccagcagcagcgccagcgagaagatctgcaatgcccacggctgcaagatggccatgaggctgtgcagcctgaacagaacccagtgcaccttcaggaacttcaccagcgccacccaggccctgacagagtggtacatcctgcaggccaccaacatctttgcccaggtgccccagcaggagctggtggagatgagctacccaggagagcagatgatcctggcctgcctgtttggagctgagccctgcaactacagaaacttcaccagcatcttctacccccactacggcaactgctacatcttcaactggggcatgacagagaaggccctgcccagcgccaaccctggaacagaatttggcctgaagctgatcctggacatcggccaggaggactatgtgcccttcctggccagcacagctggggtgcggctgatgctgcacgagcagaggagctaccccttcatcagagatgagggcatctatgccatgagcggcacagagaccagcattggagtgctggtggacaagctgcagaggatgggagagccctacagcccctgcaccgtgaatggcagcgaggtgcctgtgcagaacttctacagcgactacaacaccacctacagcatccaggcctgcctgcggagctgcttccaggaccacatgatccggaactgcaactgtggccactacctgtaccccctgcccagaggagagaagtactgcaacaacagagacttcccagactgggcccactgctacagcgacctgcagatgtctgtggcccagcgggagacctgcatcggcatgtgcaaggagagctgcaatgacacccagtacaagatgaccatctccatggctgactggcccagcgaggccagcgaggactggatcttccacgtgctgagccaggagcgggaccagagcaccaacatcaccctgagcaggaagggcatcgtgaagctgaacatctacttccaggagttcaactaccgcaccatcgaggagagcgctgccaacaacatcgtgtggctgctgagcaacctgggcggccagtttggcttctggatgggcggctctgtgctgtgcctgattgaatttggagagatcatcatcgactttgtgtggatcaccatcatcaagctggtggccctggccaagagcctgcggcagaggcgggcccaggccagctatgccggccccccacccaccgtggccgagctggtggaggcccacaccaactttggcttccagcctgacacagcccccaggagccccaacacaggcccctaccccagcgagcaggccctgcccatccctggcaccccaccacccaactatgacagcctgcggctgcagcccctggatgtgattgaaagtgacagtgaaggagatgccatctag

SEQ ID NO: 343360 - DNA, 1923 bp, Artificial Sequence
  derived and/or modified sequence
atgcacgtgaagaagtacctgctgaagggcctgcaccggctgcagaaagggccgggttatacttacaaagagctgctcgtgtggtactgcgacaacactaacacccacggacctaaaagaattatatgcgaaggcccaaagaagaaggccatgtggtttcttctaacgctgttgttcgccgcactggtgtgctggcagtggggcatttttatcagaacatatctcagttgggaagtatccgtcagcctttcagtgggctttaagactatggatttccccgctgtcacaatttgtaacgctagccccttcaagtactccaaaataaaacacctcctgaaggatttggatgagcttatggaggctgttctagagaggatactggcgccagagctgtcccatgccaatgccaccaggaatctgaactttagcatctggaatcacacacccttggttctgatagacgaacgcaatcctcaccacccaatggttctggacttgttcggagacaaccataacggtctaaccagtagcagtgcaagcgaaaaaatctgcaacgcgcacggatgtaaaatggccatgcgactctgctcactgaatcgcacacagtgtacattcagaaatttcacgagtgctacacaggctttgacggagtggtacatccttcaagccacaaacattttcgcacaagtgccacagcaggaattggtcgaaatgtcctacccaggcgaacagatgattcttgcctgtctatttggagccgaaccttgcaattacagaaactttaccagcatcttctatcctcactatggcaactgttatatcttcaattggggcatgactgaaaaagctctgccatctgcaaatccagggactgaatttgggctgaagctgatcttagacatcggccaagaggattatgtgcccttcttggcctcaaccgccggtgtcaggctgatgctgcatgaacagcgctcatatccttttatcagagacgaaggcatctatgccatgagcggtaccgaaacttccatcggagtcctcgttgacaagttgcagcgcatgggggaaccctactccccgtgcactgtgaatggaagcgaggtccccgtgcagaacttttatagtgactataatactacatacagtatacaggcatgtttgagatcttgcttccaggatcacatgatcagaaattgcaattgtggccactacctgtaccccctacctcgaggggagaagtattgcaacaacagggactttcctgactgggcacactgttactccgatctccagatgtcagtggcgcaacgcgaaacctgtattggcatgtgcaaggagtcgtgcaatgacacacagtataagatgacaatttccatggccgactggccttccgaagcctccgaggactggatttttcacgtgctcagtcaggaaagggatcagtcgacaaacattaccctctcaagaaaagggattgtaaagctgaacatctactttcaggaatttaactatcgcaccattgaggagagcgccgccaacaacatcgtgtggctcctttcaaatctcggcggacaattcggattttggatgggcggctctgttttatgcctgatagaatttggcgagatcataatcgactttgtgtggattacgattatcaagctggttgcattggcaaagagcttaaggcagaggagggcccaggcttcctatgctggaccaccccccacagtagccgagctagtggaagcccatacaaacttcggctttcaacctgacacggctcccaggtcaccaaatactgggccttatccctctgagcaagcactgccgatccctggaacccctcctcccaactacgattctctgcgcttgcaaccactggatgtgattgagtctgactctgagggcgacgcaatctag

SEQ ID NO: 343361 - DNA, 1923 bp, Artificial Sequence
  derived and/or modified sequence
atgcatgtcaaaaagtatcttctgaaggggctgcacagattacagaaaggtcccggatatacttacaaggaactgctggtctggtactgcgacaatacgaacacccacggaccaaagagaattatttgcgagggcccaaaaaagaaagcgatgtggttccttctgaccctcttattcgccgcactggtgtgttggcagtggggcatttttattcgaacctaccttagctgggaggtgagtgtgtccctgagcgtggggttcaagacgatggatttcccagccgttaccatatgtaacgcgtctccctttaagtactccaagataaaacatctgctgaaagacctggacgaactcatggaggcagtgttagaaaggatcctggcgcctgaattgagccacgcgaatgccacgcggaacctcaacttctcgatctggaatcacactccgttggtactcattgacgaacggaatccccaccacccaatggtccttgaccttttcggcgacaaccacaacgggttgacatcatcaagtgctagtgaaaaaatatgtaatgcccacggctgtaagatggccatgcgcctgtgtagtctcaatagaacacagtgtacctttcggaactttacttctgccacccaggcactcaccgagtggtacattctgcaggcgaccaatattttcgcccaggtcccacaacaagaattagtcgagatgtcctaccctggcgagcaaatgattcttgcctgcctgttcggtgccgaaccgtgcaattacagaaacttcactagcatattctacccccattatggaaactgctacatcttcaattgggggatgacagagaaggccctcccatcagctaacccaggtactgaatttggcttgaaactgattttagatattggccaggaggactatgtaccatttctggccagcaccgccggtgtgagactcatgctgcatgagcaacgctcctatccttttatccgagatgagggcatatatgcgatgtctggtaccgagacctctatcggcgttctggtggacaagctgcagcgtatgggcgagccctactccccttgtactgtgaatggctctgaggtcccagttcagaatttttactcagactataacactacatacagcatacaggcctgcctgcggagctgctttcaggaccacatgattagaaactgtaactgcggccactacctgtacccgctgcctaggggggagaagtactgcaataatagggacttccccgattgggcccattgttattcagacctgcagatgtctgtagcgcagagagagacttgcattgggatgtgtaaagagtcctgcaatgatacgcaatacaaaatgaccatcagcatggctgattggccctccgaggctagtgaggactggatctttcacgtgttgagtcaggaaagagaccaaagtactaacatcaccctgtcacgcaagggcatcgtgaaactaaatatttacttccaggagtttaactataggacgatagaggaaagcgccgctaacaacattgtgtggctcctgagtaatcttgggggacaatttggtttctggatggggggaagcgtgctctgcttaattgaatttggcgaaattataatcgactttgtgtggattaccatcatcaaattggtggccctagccaaatccctacggcagcggcgagcccaagcgtcttacgccggacccccacccaccgttgctgagttggttgaagcccatacaaatttcgggttccagcccgacacagctcctaggagccctaacactggaccttatcccagtgaacaggcgttgccaattcctgggacccctccccctaactatgattctttgcgactgcagccactggacgtgatcgaaagcgactccgagggcgatgccatttag

SEQ ID NO: 343362 - DNA, 1923 bp, Artificial Sequence
  derived and/or modified sequence
atgcacgtgaagaagtacctgctgaagggcctgcacagactgcagaagggccccggctacacctacaaggagctgctggtgtggtactgcgacaacaccaacacccacggccccaagagaatcatctgcgagggccccaagaagaaggccatgtggttcctgctgaccctgctgttcgccgccctggtgtgctggcagtggggcatcttcatcagaacctacctgagctgggaggtgagcgtgagcctgagcgtgggcttcaagaccatggacttccccgccgtgaccatctgcaacgccagccccttcaagtacagcaagatcaagcacctgctgaaggacctggacgagctgatggaggccgtgctggagagaatcctggcccccgagctgagccacgccaacgccaccagaaacctgaacttcagcatctggaaccacacccccctggtgctgatcgacgagagaaacccccaccaccccatggtgctggacctgttcggcgacaaccacaacggcctgaccagcagcagcgccagcgagaagatctgcaacgcccacggctgcaagatggccatgagactgtgcagcctgaacagaacccagtgcaccttcagaaacttcaccagcgccacccaggccctgaccgagtggtacatcctgcaggccaccaacatcttcgcccaggtgccccagcaggagctggtggagatgagctaccccggcgagcagatgatcctggcctgcctgttcggcgccgagccctgcaactacagaaacttcaccagcatcttctacccccactacggcaactgctacatcttcaactggggcatgaccgagaaggccctgcccagcgccaaccccggcaccgagttcggcctgaagctgatcctggacatcggccaggaggactacgtgcccttcctggccagcaccgccggcgtgagactgatgctgcacgagcagagaagctaccccttcatcagagacgagggcatctacgccatgagcggcaccgagaccagcatcggcgtgctggtggacaagctgcagagaatgggcgagccctacagcccctgcaccgtgaacggcagcgaggtgcccgtgcagaacttctacagcgactacaacaccacctacagcatccaggcctgcctgagaagctgcttccaggaccacatgatcagaaactgcaactgcggccactacctgtaccccctgcccagaggcgagaagtactgcaacaacagagacttccccgactgggcccactgctacagcgacctgcagatgagcgtggcccagagagagacctgcatcggcatgtgcaaggagagctgcaacgacacccagtacaagatgaccatcagcatggccgactggcccagcgaggccagcgaggactggatcttccacgtgctgagccaggagagagaccagagcaccaacatcaccctgagcagaaagggcatcgtgaagctgaacatctacttccaggagttcaactacagaaccatcgaggagagcgccgccaacaacatcgtgtggctgctgagcaacctgggcggccagttcggcttctggatgggcggcagcgtgctgtgcctgatcgagttcggcgagatcatcatcgacttcgtgtggatcaccatcatcaagctggtggccctggccaagagcctgagacagagaagagcccaggccagctacgccggccccccccccaccgtggccgagctggtggaggcccacaccaacttcggcttccagcccgacaccgcccccagaagccccaacaccggcccctaccccagcgagcaggccctgcccatccccggcacccccccccccaactacgacagcctgagactgcagcccctggacgtgatcgagagcgacagcgagggcgacgccatctag

SEQ ID NO: 343363 - protein, 399 aa, Artificial Sequence
  derived and/or modified sequence
MHVRVAYMILRHQEKMKGDSHKLDFRNDLLPCLPGPYGALPPGQELSHPASLFTATGAVHAAANPFTAAPGAHGPFLSPSTHIDPFGRPTSFASLAALSNGAFGGLGSPTFNSGAVFAQKESPGAPPAFASPPDPWGRLHRSPLTFPAWVRPPEAARTPGSDKERPVERREPSITKEEKDRDLPFSRPQLRVSPATPKARAGEEGPRPTKESVRVKEERKEEAAAAAAAAAAAAAAAAAAATGPQGLHLLFERPRPPPFLGPSPPDRCAGFLEPTWLAAPPRLARPPRFYEAGEELTGPGAVAAARLYGLEPAHPLLYSRLAPPPPPAAAPGTPHLLSKTFCTFLQGCPSQQFPSWLIKPSDWCCVPSLWPLCGERGLQGEEPGRDSQASPWEGGASRR

SEQ ID NO: 343364 - DNA, 297 bp, Artificial Sequence
  derived and/or modified sequence
atgtggaaccccaacgccggcggccccccccaccccgtgccccagccgggttaccccggctgccaacctcttggaccttatccccctccgtacccacctcccgcaccaggaattccccccgtcaatcccctggccccaggcatggtggggccagcggtgatcgtggacaaaaaaatgcagaagaaaatgaagaaggcccacaaaaagatgcataaacaccagaaacaccacaaatatcacaaacacggcaaacattcatcatcctcctctagctcaagctcctcagactctgactag

SEQ ID NO: 343365 - DNA, 1383 bp, Artificial Sequence
  derived and/or modified sequence
atgttcgagaagtaccccggcaagatggagggcctgttcagacacaacccctacaccgccttcccccccgccgtgcccggcctgccccccggcctgccccccgccgtgagcttcggcagcctgcagggcgccttccagcccaagagcaccaaccccgagctgccccccagactgggccccgtgcccagcggcctgagccagaagggcacccagatccccgaccacttcagaccccccctgagaaagcccggcaagtggtgcgccatgcacgtgagagtggcctacatgatcctgagacaccaggagaagatgaagggcgacagccacaagctggacttcagaaacgacctgctgccctgcctgcccggcccctacggcgccctgccccccggccaggagctgagccaccccgccagcctgttcaccgccaccggcgccgtgcacgccgccgccaaccccttcaccgccgcccccggcgcccacggccccttcctgagccccagcacccacatcgaccccttcggcagacccaccagcttcgccagcctggccgccctgagcaacggcgccttcggcggcctgggcagccccaccttcaacagcggcgccgtgttcgcccagaaggagagccccggcgccccccccgccttcgccagcccccccgacccctggggcagactgcacagaagccccctgaccttccccgcctgggtgagaccccccgaggccgccagaacccccggcagcgacaaggagagacccgtggagagaagagagcccagcatcaccaaggaggagaaggacagagacctgcccttcagcagaccccagctgagagtgagccccgccacccccaaggccagagccggcgaggagggccccagacccaccaaggagagcgtgagagtgaaggaggagagaaaggaggaggccgccgccgccgccgccgccgccgccgccgccgccgccgccgccgccgccgccgccaccggcccccagggcctgcacctgctgttcgagagacccagacccccccccttcctgggccccagcccccccgacagatgcgccggcttcctggagcccacctggctggccgccccccccagactggccagaccccccagattctacgaggccggcgaggagctgaccggccccggcgccgtggccgccgccagactgtacggcctggagcccgcccaccccctgctgtacagcagactggcccccccccccccccccgccgccgcccccggcaccccccacctgctgagcaagaccccccccggcgccctgctgggcgcccccccccccctggtgcccgcccccagacccagcagcccccccagaggccccggccccgccagagccgacagatag

SEQ ID NO: 343366 - DNA, 1200 bp, Artificial Sequence
  derived and/or modified sequence
atgcacgtgagagtggcctacatgatcctgagacaccaggagaagatgaagggcgacagccacaagctggacttcagaaacgacctgctgccctgcctgcccggcccctacggcgccctgccccccggccaggagctgagccaccccgccagcctgttcaccgccaccggcgccgtgcacgccgccgccaaccccttcaccgccgcccccggcgcccacggccccttcctgagccccagcacccacatcgaccccttcggcagacccaccagcttcgccagcctggccgccctgagcaacggcgccttcggcggcctgggcagccccaccttcaacagcggcgccgtgttcgcccagaaggagagccccggcgccccccccgccttcgccagcccccccgacccctggggcagactgcacagaagccccctgaccttccccgcctgggtgagaccccccgaggccgccagaacccccggcagcgacaaggagagacccgtggagagaagagagcccagcatcaccaaggaggagaaggacagagacctgcccttcagcagaccccagctgagagtgagccccgccacccccaaggccagagccggcgaggagggccccagacccaccaaggagagcgtgagagtgaaggaggagagaaaggaggaggccgccgccgccgccgccgccgccgccgccgccgccgccgccgccgccgccgccgccaccggcccccagggcctgcacctgctgttcgagagacccagacccccccccttcctgggccccagcccccccgacagatgcgccggcttcctggagcccacctggctggccgccccccccagactggccagaccccccagattctacgaggccggcgaggagctgaccggccccggcgccgtggccgccgccagactgtacggcctggagcccgcccaccccctgctgtacagcagactggcccccccccccccccccgccgccgcccccggcaccccccacctgctgagcaagaccttctgcaccttcctgcagggctgccccagccagcagttccccagctggctgatcaagcccagcgactggtgctgcgtgcccagcctgtggcccctgtgcggcgagagaggcctgcagggcgaggagcccggcagagacagccaggccagcccctgggagggcggcgccagcagaagatag

SEQ ID NO: 343367 - DNA, 528 bp, Artificial Sequence
  derived and/or modified sequence
atgaccagacccctgcccgagagcatcagactgctgagacacaccggcctggtgccccccacccccgtgcccctgggctacccccaccagagcttcgtgagccagccccaccccttcagcaagcagcccagcccctgccccagacagagcccccagggcgacttcggctgggtgagccccggcgccagcagaagcatcaccggccccagcagccccgccgcccccagcctgatcagcctgggcagcctgggcagccacctgcagggcgccagaccccaccccagacagagcagcctgggcgacttcggcctggtgacccccggcaccccctgctgcagactgtgcccccccctgctgctgccccagggcagacccccctgggtgctgtgcgccggcgtgagcaaggagctgggccccaaccccgtgctgcccagccccatcgtggagcagagactgggccacggcgccgacatggtgcccccccccgaccaggaggagtggaacgtggtgatgagccagagcacctag

SEQ ID NO: 343368 - DNA, 1383 bp, Artificial Sequence
  derived and/or modified sequence
atgtttgaaaaatatccaggcaaaatggagggtttgtttagacataacccttataccgcgttcccccctgccgttcccggtctgccaccaggcctgcccccggcagtcagctttggttccttacagggcgcgttccagcccaagagcacaaatcccgagctacctcctagacttgggccggtaccatccggcctctcgcagaaggggacccagatccccgatcattttagacctcctctccgcaagcccgggaaatggtgcgctatgcatgtgagagtggcttatatgattctcaggcaccaagagaagatgaaaggagatagtcacaaactagacttccgcaacgacctgctgccttgccttccaggcccctacggcgcattaccgccaggccaggagctgagtcaccccgcaagcttgtttacagctacaggcgccgttcatgccgccgccaatcctttcacagcggcgcccggagcacacggcccattcttgagtccgagcacccatatagaccctttcggcaggcctacctcattcgcctctctcgcagctctatctaatggtgcattcggcggtctggggtcccctactttcaactccggagcagtattcgcacagaaagaatcccccggggccccccctgcatttgccagcccaccagacccctggggaagattgcaccgttcacctctcacatttcccgcatgggtacggcccccggaggcagcccggacccccggcagcgacaaggagcgccctgtcgaacggagagaaccgtcgataaccaaagaggaaaaggacagggatcttcccttcagcagacctcagttgcgggtgtctccagctacacccaaagctcgagcaggagaggagggaccgaggcctaccaaagagtccgttagggtcaaagaagaaaggaaagaggaggctgcagccgccgcagctgctgccgcagccgctgctgcggcagctgctgcagcggccacaggtccccagggcctgcatctactattcgagagacctcgtcccccccccttcctgggcccatcccctccagaccgctgcgcagggttcttggagccaacatggcttgccgcacccccaaggctcgccaggcctccccgattttacgaagctggtgaagagctaacgggccctggggccgtggccgctgcccgtctctatggcctggagcctgctcaccccctcctttactctcggctggcacctcctccaccccccgctgctgctcccggcactccgcacttgctctcaaaaacaccgcccggcgctctgctgggcgcgcctcctccgctggtacctgcccccagaccgtcaagccccccacggggcccaggccccgctcgggcagaccgctag

SEQ ID NO: 343369 - DNA, 1200 bp, Artificial Sequence
  derived and/or modified sequence
atgcacgttagagtcgcgtacatgatcctccggcatcaggagaagatgaagggggactctcacaagctcgacttcagaaacgacctgctgccttgcctgcccgggccctatggcgcactgccacctggtcaagaactctcccatcctgcatcgctgtttaccgccaccggcgcagttcatgctgccgcaaatcccttcaccgccgcaccaggtgctcatgggccttttctgtcaccctcaacgcatattgatccttttggccgtcctacttcatttgcttcactggctgctctgtctaacggggcttttggaggactcggtagcccgacatttaattcaggcgccgtattcgctcagaaggaaagtcccggcgcacctcctgcttttgcttcgccacccgatccgtgggggcgtctacatcgcagccccctaactttcccggcctgggtgagacctcccgaagctgctcggacccctggatctgacaaagagaggcctgtggagcgacgcgaaccctctattacaaaggaggaaaaagaccgtgatctgcccttttcgcgcccgcaactgcgggtgtcccctgccactccaaaggcacgggccggagaggaaggccctagacctacaaaggaatccgtgagggttaaagaggagcgcaaagaagaagcagctgccgcagccgctgcggcagccgctgccgccgcagctgcagctgcagctgctacagggcctcaaggactccatctcctttttgagaggccacggcctcccccatttctgggaccatccccgcccgataggtgcgctggttttttggagccaacctggttggcggctcctccacgtctcgccagacccccgcgcttctacgaggctggagaagagctcactgggcccggagctgtcgccgcggcacgcctatatggactggaacctgcccatcctttgctgtatagtcgactcgccccccctccacctccggccgccgcacccggaacaccacacttgcttagtaaaaccttctgtacttttctgcaagggtgcccctcacagcaatttccctcctggttaatcaagccctccgactggtgttgcgtcccttctttgtggcctttatgtggagaacgcggtctgcagggggaagagccagggagagacagccaggccagtccttgggaggggggggcctctcgtaggtag

SEQ ID NO: 343370 - DNA, 2811 bp, Artificial Sequence
  derived and/or modified sequence
ccccacccctgctgcaggtgccagggcaccctggggcctcagccgctaacgccctttctgagcaggacctgatcggccaggacctgaactctcgctacctgaatgcccagggtggccctgaggtggtgggggcagggggctcggcccggcccctggccttccagttccaccagcacaaccaccagcaccagcacacccaccagcacacccaccagcacttcaccccttatcccccgggcctgctgccaccccacggcccccacatgtttgagaaatatccaggaaagatggaaggccttttccgacataatccgtacacggccttccctcccgcagtgcccgggctgcctccgggcctcccgccggccgtctcctttggctccctgcagggggccttccagcccaagagcacgaaccctgagctgccaccacgactggggccggtgccgagcgggctctcccagaaggggacacagatccccgaccatttccggccacctttgaggaaaccagggaagtggtgtgccatgcacgtgcgtgtggcttacatgatcctgagacaccaggagaaaatgaagggtgactcccacaagcttgactttcggaatgacctcctgccctgccttccggggccctatggggccctgccccctgggcaggagctctcccacccggcctccctcttcactgcgactggtgccgtccacgctgcagccaaccctttcacggcagctcccggggcccacggacccttcctgagccccagcacccacattgatccctttgggcgtcccacaagcttcgcctctttggctgccctctccaacggggcctttggaggcctgggcagccccacattcaactccggcgccgtctttgcccagaaagaaagcccaggggccccaccagccttcgcctccccaccggacccatggggccgcctgcaccgcagtcctctgacctttcctgcctgggtccggccccctgaggccgcccggactccaggctcagacaaggagcggcctgtggagcggagggagccctccatcaccaaggaggagaaggacagggacctccccttctcacggccccagctccgagtttctcctgctactcccaaggcccgggctggtgaggaggggcctcggccaaccaaggaatctgtgcgggtaaaggaagagcggaaggaggaggctgccgccgccgctgccgctgctgctgccgccgccgctgccgccgccgcagcagccactgggccccagggccttcacctgctgtttgagaggccccggccgcccccgtttctgggccctagcccaccagatcgctgtgctggcttcctggagccaacctggttggcagcacccccacgcctggcaaggccaccccgcttctatgaggcgggtgaggagctaactggacccggggccgtggccgctgcccgcctctacggtctggaacctgctcaccccttgctctacagccgcttggctcctccaccaccacctgctgcggccccgggaacccctcaccttctcagcaagaccccaccgggagcccttttgggggcaccacctccgcttgtgcccgccccccggcccagttccccacctaggggccctggcccagctcgggctgacaggtgaggggaacgggggggggtcggggcaaagctccatctccccttcctttaaccaggtcctagggctgaggttttaagccagggctggagggcaaaggtcataacctcaccagccacctctgaggtcatggaacctgggaacagaagcctcaacccccacaagaccaagcatcacatggagtgtagggtcactgggagagcagaggtcacagcctctagagaagggagaggggcgtgtgcatgggagtgtggctcatctcgggggccatggggcctcctgaggtacacctttgcccctgtaagggcctctaggccctgggcctgcctccccaagggctcactaagccagaggccaaagtgccccctcccgttcacctaccacccaagtcctcatgccctccgagggctgggggaggaggggctcaaggaaggggggttccatgtacatatttatcacccctttcacatagccccaagaccttttgtacatttttacaggggtgcccctcccaacagttcccttcctggttaattaaaccctcagactggtgctgtgttcctagcctctggcctctctgtggggaaaggggactgcagggggaagagccgggaagggacagtcaggcttctccctgggaaggtggggccagcaggagatgaccaacagggggcaggacctggggacctgggctggagggaagggcagaagcttcctacttggctgacagccccggttcccccaacatgttcccgttcactctgcccccacccccaaaggctcagcctctaaatctcagactccaccacctcttaatggctcagtccccttcaccccatttccaagtgcccccaggactcctgggccctgcttccctgaaccctgttctccaaaaccctgccccaggctaagggtggccagagaaggtcaccatgtaccacacaccaaagaagggggtcggcccaggggtgggcgacacaggcagcttcttcggcagcctcacggcagcaaccccagccttcccaaagcagcaggcgcctccaggctggggcccaacctagaaggcaggggtcaatctaacaaaaccctaacgttgacttttttccctggtggggcttcttctgtaacatgacttgcgaatatttatataaaaacgagtgttacaatgaga

SEQ ID NO: 343371 - DNA, 1727 bp, Artificial Sequence
  derived and/or modified sequence
ccccacccctgctgcaggtgccagggcaccctggggcctcagccgctaacgccctttctgagcaggacctgatcggccaggacctgaactctcgctacctgaatgcccagggtggccctgaggtggtgggggcagggggctcggcccggcccctggccttccagttccaccagcacaaccaccagcaccagcacacccaccagcacacccaccagcacttcaccccttatcccccgggcctgctgccaccccacggcccccacatgtttgagaaatatccaggaaagatggaaggccttttccgacataatccgtacacggccttccctcccgcagtgcccgggctgcctccgggcctcccgccggccgtctcctttggctccctgcagggggccttccagcccaagagcacgaaccctgagctgccaccacgactggggccggtgccgagcgggctctcccagaaggggacacagatccccgaccatttccggccacctttgaggaaaccagggaagtggtgtgccatgcacgtgcgtgtggcttacatgatcctgagacaccaggagaaaatgaagggtgactcccacaagcttgactttcggaatgacctcctgccctgccttccggggccctatggggccctgccccctgggcaggagctctcccacccggcctccctcttcactgcgactggtgccgtccacgctgcagccaaccctttcacggcagctcccggggcccacggacccttcctgagccccagcacccacattgatccctttgggcgtcccacaagcttcgcctctttggctgccctctccaacggggcctttggaggcctgggcagccccacattcaactccggcgccgtctttgcccagaaagaaagcccaggggccccaccagccttcgcctccccaccggacccatggggccgcctgcaccgcagtcctctgacctttcctgcctgggtccggccccctgaggccgcccggactccaggctcagacaaggagcggcctgtggagcggagggagccctccatcaccaaggaggagaaggacagggacctccccttctcacggccccagctccgagtttctcctgctactcccaaggcccgggctggtgaggaggggcctcggccaaccaaggaatctgtgcgggtaaaggaagagcggaaggaggaggctgccgccgccgctgccgctgctgctgccgccgccgctgccgccgccgcagcagccactgggccccagggccttcacctgctgtttgagaggccccggccgcccccgtttctgggccctagcccaccagatcgctgtgctggcttcctggagccaacctggttggcagcacccccacgcctggcaaggccaccccgcttctatgaggcgggtgaggagctaactggacccggggccgtggccgctgcccgcctctacggtctggaacctgctcaccccttgctctacagccgcttggctcctccaccaccacctgctgcggccccgggaacccctcaccttctcagcaagaccttttgtacatttttacaggggtgcccctcccaacagttcccttcctggttaattaaaccctcagactggtgctgtgttcctagcctctggcctctctgtggggaaaggggactgcagggggaagagccgggaagggacagtcaggcttctccctgggaaggtggggccagcaggagatga

SEQ ID NO: 343372 - DNA, 1383 bp, Artificial Sequence
  derived and/or modified sequence
atgtttgagaagtacccaggcaagatggagggcctcttccgccacaacccctacacagccttccccccagctgtgcccggcctgcccccaggcctgcccccagctgtgtcctttggcagcctgcagggcgccttccagcccaagagcaccaaccctgagctgcccccccggctgggccctgtgcccagcggcctgagccagaagggcacccagatcccagaccacttccggccccccctgaggaagccaggcaagtggtgtgccatgcacgtgcgggtggcctacatgatcctgcggcaccaggagaagatgaagggggacagccacaagctggacttcagaaatgacctgctgccctgcctgcccggcccctatggagccctgcccccaggccaggagctgagccacccagccagcctcttcaccgccaccggggctgtgcatgctgctgccaaccccttcaccgctgcccctggggcccacggccccttcctgagccccagcacccacatcgaccccttcggccggcccaccagctttgccagcctggccgccctgagcaatggagcctttggaggcctgggcagccccaccttcaacagcggggctgtgtttgcccagaaggagagccctggggcccccccagcctttgccagccccccagacccctggggccgcctgcacaggagccccctgaccttccctgcctgggtgcggcccccagaggccgcccggaccccaggcagtgacaaggagaggcctgtggagcggcgggagcccagcatcaccaaggaggagaaggaccgggacctgcccttcagccggccccagctgcgggtgtccccagccacccccaaggcccgggccggggaggagggcccccggcccaccaaggagagcgtgcgggtgaaggaggagaggaaggaggaggccgctgctgctgctgctgctgctgctgctgctgctgctgctgctgctgctgctgccaccggcccccagggcctgcacctgctgtttgagcggccccggcccccacccttcctgggccccagccccccagacagatgtgccggcttcctggagcccacctggctggccgccccaccccggctggcccggcccccacgcttctatgaggccggggaggagctgactggacctggagctgtggccgccgcccggctgtatggcctggagcccgcccaccccctgctgtacagccggctggcccctcctcctcctcctgctgctgcccctggcaccccccacctgctgagcaagaccccacctggggccctgctgggcgcccccccacccctggtgcctgccccccggcccagcagccccccccggggccctggccctgcccgggctgacagatag

SEQ ID NO: 343373 - DNA, 1200 bp, Artificial Sequence
  derived and/or modified sequence
atgcacgtgcgggtggcctacatgatcctgcggcaccaggagaagatgaagggggacagccacaagctggacttcagaaatgacctgctgccctgcctgcccggcccctatggagccctgcccccaggccaggagctgagccacccagccagcctcttcaccgccaccggggctgtgcatgctgctgccaaccccttcaccgctgcccctggggcccacggccccttcctgagccccagcacccacatcgaccccttcggccggcccaccagctttgccagcctggccgccctgagcaatggagcctttggaggcctgggcagccccaccttcaacagcggggctgtgtttgcccagaaggagagccctggggcccccccagcctttgccagccccccagacccctggggccgcctgcacaggagccccctgaccttccctgcctgggtgcggcccccagaggccgcccggaccccaggcagtgacaaggagaggcctgtggagcggcgggagcccagcatcaccaaggaggagaaggaccgggacctgcccttcagccggccccagctgcgggtgtccccagccacccccaaggcccgggccggggaggagggcccccggcccaccaaggagagcgtgcgggtgaaggaggagaggaaggaggaggccgctgctgctgctgctgctgctgctgctgctgctgctgctgctgctgctgctgccaccggcccccagggcctgcacctgctgtttgagcggccccggcccccacccttcctgggccccagccccccagacagatgtgccggcttcctggagcccacctggctggccgccccaccccggctggcccggcccccacgcttctatgaggccggggaggagctgactggacctggagctgtggccgccgcccggctgtatggcctggagcccgcccaccccctgctgtacagccggctggcccctcctcctcctcctgctgctgcccctggcaccccccacctgctgagcaagaccttctgcaccttcctgcagggctgccccagccagcagttccccagctggctgatcaagcccagcgactggtgctgcgtgcccagcctgtggcccctgtgtggggagcggggcctgcagggcgaggagcccggccgggacagccaggccagcccctgggagggcggggccagcagaagatag

SEQ ID NO: 343374 - DNA, 477 bp, Artificial Sequence
  derived and/or modified sequence
atggacctggccagcgagatcaccagcgccacccagaccagcagcctctgcagctctgggcgcgggcacgccggctacccggcaccaggaattgtcgcccacgggtttgagacccatggtaccgccagggttgcacaggggcacttactccctccttgtctactaccaccgccccagatgcctgtactggcagccctgagagatctctctagacgaggctccacctccagtagccgtagtccttcgagaccggtgtctacttccgcctcaaagccttgcttaccagcatcctgccttggtgaaacatggtccatatcaatcaatctcgtcggctcctccggccatctgcagagtcccggcgcccaacgcgacgcccagagggagacaggctgcctcgggcctagctggctcccacatcatcaaggaagagacgaagagctttctctctcgcactctgcacagggcgaagaattctag

SEQ ID NO: 343375 - DNA, 1383 bp, Artificial Sequence
  derived and/or modified sequence
atgttcgagaagtaccccggcaagatggagggcctgttccggcacaacccttacacagcttttcccccagccgtgccagggcttccccctggactgccaccagctgtgtcctttggatcacttcaaggtgcgtttcaaccaaagagcacaaatcccgaactcccacccaggctcggccccgtgcctagcgggctttcacaaaaggggacacaaataccagatcattttcggcccccccttcgaaagcccggcaaatggtgtgccatgcacgtgagagtggcatacatgatcctaaggcatcaggaaaagatgaaaggtgactctcataagctcgatttccggaatgacctcctgccttgcctaccaggaccctatggtgccctgccaccaggacaggaattatctcaccctgccagcctgttcaccgcaacaggcgctgtccacgcagccgccaatccatttaccgccgcccccggtgcacatggcccctttttgagcccctctactcatatcgatccttttgggcgccctacttcctttgcgtcgttagccgcgctaagtaacggagcctttggtggcctgggcagtcccactttcaactccggagccgtgttcgctcagaaggagagcccaggcgccccgcctgcattcgcaagcccaccggacccatggggtcgccttcaccggtcgcccctaaccttccctgcctgggtgcggcctcctgaggccgcccggactccagggtccgacaaagagagacccgtggagcgccgggaaccttccatcaccaaagaggaaaaggaccgcgacctacctttttcccgcccccagctgagagtctctccggcaacacctaaagcaagggccggggaagaggggccccggcccactaaagagtccgtgagagtcaaggaggagagaaaagaggaggccgccgcagctgccgcagcggctgcggccgctgcagctgcagccgccgccgctgctactggtccccagggccttcacttgttattcgaaaggcccagaccaccaccgtttctggggccctccccaccagatagatgcgcgggctttcttgaacctacttggctcgcggccccgcctcggcttgcccgcccaccccgcttttacgaagcgggcgaggaactcactggtccaggtgccgtggcggctgccaggctgtacggacttgaaccagcccatccacttctgtatagtaggcttgccccacctccacctccggccgccgctccagggacccctcatctgttatccaaaaccccacctggtgctttactcggtgcccctccacccttagtccctgccccccgaccctcctcgccacctagggggcctgggccagctcgtgcagatagatag

SEQ ID NO: 343376 - DNA, 1200 bp, Artificial Sequence
  derived and/or modified sequence
atgcacgtgcgggtggcctacatgatcctgcggcaccaggagaagatgaaaggggacagccataaactggactttcgcaatgatcttctgccctgcctgcctggaccttatggcgctctgccacccggccaggaactcagccatccagcttcccttttcaccgctaccggtgctgtgcatgccgcggctaatcccttcaccgcggcgccaggtgcccatggccctttcctgtctccgtccacgcatatcgaccctttcgggaggcctacctcatttgccagtttggctgctctaagcaacggagccttcggcggactcgggagccccaccttcaactccggagcagtgtttgcccagaaagagtctcctggtgcgccacccgcatttgccagcccccccgacccctggggccggcttcacagaagcccccttacctttcccgcttgggtgagaccccccgaagccgcacgaactccggggagtgacaaagaacggcccgtggagcgccgcgaaccctcgattacgaaggaagagaaagatcgggacctacccttctcacgcccccagctcagggtgtcgccagctaccccgaaggctcgcgcaggagaggagggccctcgtcccacaaaagagagcgtgcgcgtgaaggaggagcggaaggaggaagcagctgccgctgccgccgcagccgctgccgcagcggctgccgccgcagccgcagccaccggaccccaaggcttacacctcctgtttgagcgcccacgaccaccacccttcctaggaccttctccacctgaccggtgcgcgggctttctggagcctacttggcttgcggcgcccccccggctagcccgtccaccacgcttttacgaggcaggtgaagaacttacagggcctggagctgttgcggcagccagactctatggcctggaacctgcccacccgctcctgtattcacggcttgccccacctccgcccccggctgccgcaccaggcaccccacacctgctctctaaaacattttgcactttcctccagggatgcccgtctcagcaattccccagctggctgattaagccctcagattggtgctgtgtcccatctctttggcccttgtgtggcgagagagggttacaaggggaggagccaggaagggactctcaggcatctccttgggagggcggtgcctcacgtcgctag

SEQ ID NO: 343377 - DNA, 1383 bp, Artificial Sequence
  derived and/or modified sequence
atgtttgagaaatatcccggtaaaatggaggggctttttaggcacaacccatatacggccttccctccggctgtgcccggattgccccctggattgccccctgcagttagcttcggatcgttacaaggggcttttcagccaaagtccacgaatcctgagttgcctcctagattgggtcctgttccttctggtctctcccagaaaggtacccaaatcccagaccattttcggcctccattgcgaaagcccggtaagtggtgtgcaatgcatgtgagggtggcctacatgattttacggcaccaggagaaaatgaagggcgactcacataagctggattttcggaacgacctgctgccttgtttgccaggaccttacggtgcccttcccccaggtcaagaattgagccatccagcaagtctgtttaccgcgaccggcgcagttcatgctgcagccaatccattcacagccgctcccggtgcccacggcccatttctgtccccatcaacccatattgacccattcggccgacctacttctttcgcttcactcgccgctctttctaatggggctttcgggggtctgggatctccgacgtttaattcaggagctgtctttgctcagaaggaatctcccggtgctccccctgcctttgccagcccccctgatccttggggaagactacatcggagtcccctcacctttccagcctgggtgcgccctcccgaagccgctagaactcccggaagtgataaagagcggccagtcgaaagaagggagccgtccatcaccaaggaagagaaagaccgggacctcccattctcacgccctcagttacgtgtcagtcctgccacaccaaaagcccgagcaggagaggagggacctagacctactaaggagagcgtgagagtgaaagaagagagaaaggaagaagcagctgcagcagcagctgctgccgcagcagcagctgcagcagctgccgctgctgccaccggtccacaggggctccatttgttattcgagaggcccaggccccctccttttctaggtccttcgccgcctgatcggtgcgcaggattcctggagcccacatggcttgccgctcctccaaggctggccaggccacctcgtttctatgaggcaggcgaggagctgaccggacccggagcagtggcagctgctagactgtacggactggagcccgctcaccctttgctctactcgaggcttgccccacctccaccaccggctgctgcccctggtacgccccatctgctctctaagacccctccaggcgctctcttgggggctccgcctccacttgtccctgcccctcggcctagttcgccaccgaggggtccaggcccagcaagggctgatcgctag

SEQ ID NO: 343378 - DNA, 1200 bp, Artificial Sequence
  derived and/or modified sequence
atgcatgttcgcgtggcctacatgatccttcgccaccaagaaaaaatgaagggggactcccacaaattagactttcggaacgatctgctgccctgcttgcccggaccatatggcgctctgccccctgggcaggaactatcccaccccgcatccctatttacggccacaggggctgtacacgcggcagctaaccccttcaccgctgctcccggagcccatggacctttcttatctcctagcacccacattgatcctttcggcaggcctacctccttcgcctctctggccgcactgagcaatggggcattcggcggactgggatctcccaccttcaattctggcgcagtgttcgcccagaaggaatcccccggagccccacccgctttcgctagtcctcctgacccatgggggcgtctccatcggtcccccctcactttcccggcttgggtgcgaccacccgaggcggcacggacccccggatccgataaggaaaggcctgtcgagagaagggaaccgtccatcacgaaggaggagaaagaccgagatctgcccttcagccgcccacaactgcgcgtgtctcccgctaccccaaaggcccgagccggagaagaagggcctcggcctaccaaggaatctgttcgggtcaaagaggaacggaaggaggaggcagccgcagctgccgctgcggctgccgctgccgctgccgcagccgcagctgcagccacaggtccccagggattacatctactgttcgagcgccctagaccacctcccttcctgggaccatccccaccagataggtgtgctggctttctggaaccaacctggctcgcagctccaccgaggttggctagacccccaaggttttacgaagcaggtgaagaattaaccgggcctggcgcagtggccgcagccaggttgtatggactggagccagctcatcccctcttgtacagccgactagcgccacccccaccaccggcagcggcaccgggtacccctcatttgttatcaaaaaccttctgtacttttcttcagggatgtccatcccaacagttcccctcctggttaatcaagcctagcgattggtgttgtgtcccaagcctttggcccctgtgcggcgagcgaggattgcaaggcgaggagccaggtagagattcccaagcttctccatgggaaggcggtgcttcacgacgatag

SEQ ID NO: 343379 - protein, 618 aa, Artificial Sequence
  derived and/or modified sequence
MGQPSLTWMLMVVVASWFITTAATDTSEARWCSECHSNATCTEDEAVTTCTCQEGFTGDGLTCVDLDECAIPGAHNCSANSSCVNTPGSFSCVCPEGFRLSPGLGCTDVDECAEPGLSHCHALATCVNVVGSCGPGLDCVPEGDALVCADPCQAHRTLDEYWRSTEYGEGYACDTDLRGWYRFVGQGGARMAETCVPVLRCNTAAPMWLNGTHPSSDEGIVSRKACAHWSGHCCLWDASVQVKACAGGYYVYNLTAPPECHLAYCTDPSSVEGTCEECSIDEDCKSNNGRWHCQCKQDFNITDISLLEHRLECGANDMKVSLGKCQLKSLGFDKVFMYLSDSRCSGFNDRDNRDWVSVVTPARDGPCGTVLTRNETHATYSNTLYLADEIIIRDLNIKINFACSYPLDMKVSLKTALQPMVSALNIRVGGTGMFTVRMALFQTPSYTQPYQGSSVTLSTEAFLYVGTMLDGGDLSRFALLMTNCYATPSSNATDPLKYFIIQDRCPHTRDSTIQVVENGESSQGRFSVQMFRFAGNYDLVYLHCEVYLCDTMNEKCKPTCSGTRFRSGSVIDQSRVLNLGPITRKGVQATVSRAFSSLGLLKVWLPLLLSATLTLTFQ

SEQ ID NO: 343380 - DNA, 1923 bp, Artificial Sequence
  derived and/or modified sequence
atgggccagcccagcctgacctggatgctgatggtggtggtggccagctggttcatcaccaccgccgccaccgacaccagcgaggccagatggtgcagcgagtgccacagcaacgccacctgcaccgaggacgaggccgtgaccacctgcacctgccaggagggcttcaccggcgacggcctgacctgcgtggacctggacgagtgcgccatccccggcgcccacaactgcagcgccaacagcagctgcgtgaacacccccggcagcttcagctgcgtgtgccccgagggcttcagactgagccccggcctgggctgcaccgacgtggacgagtgcgccgagcccggcctgagccactgccacgccctggccacctgcgtgaacgtggtgggcagctacctgtgcgtgtgccccgccggctacagaggcgacggctggcactgcgagtgcagccccggcagctgcggccccggcctggactgcgtgcccgagggcgacgccctggtgtgcgccgacccctgccaggcccacagaaccctggacgagtactggagaagcaccgagtacggcgagggctacgcctgcgacaccgacctgagaggctggtacagattcgtgggccagggcggcgccagaatggccgagacctgcgtgcccgtgctgagatgcaacaccgccgcccccatgtggctgaacggcacccaccccagcagcgacgagggcatcgtgagcagaaaggcctgcgcccactggagcggccactgctgcctgtgggacgccagcgtgcaggtgaaggcctgcgccggcggctactacgtgtacaacctgaccgccccccccgagtgccacctggcctactgcaccgaccccagcagcgtggagggcacctgcgaggagtgcagcatcgacgaggactgcaagagcaacaacggcagatggcactgccagtgcaagcaggacttcaacatcaccgacatcagcctgctggagcacagactggagtgcggcgccaacgacatgaaggtgagcctgggcaagtgccagctgaagagcctgggcttcgacaaggtgttcatgtacctgagcgacagcagatgcagcggcttcaacgacagagacaacagagactgggtgagcgtggtgacccccgccagagacggcccctgcggcaccgtgctgaccagaaacgagacccacgccacctacagcaacaccctgtacctggccgacgagatcatcatcagagacctgaacatcaagatcaacttcgcctgcagctaccccctggacatgaaggtgagcctgaagaccgccctgcagcccatggtgagcgccctgaacatcagagtgggcggcaccggcatgttcaccgtgagaatggccctgttccagacccccagctacacccagccctaccagggcagcagcgtgaccctgagcaccgaggccttcctgtacgtgggcaccatgctggacggcggcgacctgagcagattcgccctgctgatgaccaactgctacgccacccccagcagcaacgccaccgaccccctgaagtacttcatcatccaggacagatgcccccacaccagagacagcaccatccaggtggtggagaacggcgagagcagccagggcagattcagcgtgcagatgttcagattcgccggcaactacgacctggtgtacctgcactgcgaggtgtacctgtgcgacaccatgaacgagaagtgcaagcccacctgcagcggcaccagattcagaagcggcagcgtgatcgaccagagcagagtgctgaacctgggccccatcaccagaaagggcgtgcaggccaccgtgagcagagccttcagcagcctgggcctgctgaaggtgtggctgcccctgctgctgagcgccaccctgaccctgaccttccagtag

SEQ ID NO: 343381 - DNA, 1857 bp, Artificial Sequence
  derived and/or modified sequence
atgggccagcccagcctgacctggatgctgatggtggtggtggccagctggttcatcaccaccgccgccaccgacaccagcgaggccagatggtgcagcgagtgccacagcaacgccacctgcaccgaggacgaggccgtgaccacctgcacctgccaggagggcttcaccggcgacggcctgacctgcgtggacctggacgagtgcgccatccccggcgcccacaactgcagcgccaacagcagctgcgtgaacacccccggcagcttcagctgcgtgtgccccgagggcttcagactgagccccggcctgggctgcaccgacgtggacgagtgcgccgagcccggcctgagccactgccacgccctggccacctgcgtgaacgtggtgggcagctgcggccccggcctggactgcgtgcccgagggcgacgccctggtgtgcgccgacccctgccaggcccacagaaccctggacgagtactggagaagcaccgagtacggcgagggctacgcctgcgacaccgacctgagaggctggtacagattcgtgggccagggcggcgccagaatggccgagacctgcgtgcccgtgctgagatgcaacaccgccgcccccatgtggctgaacggcacccaccccagcagcgacgagggcatcgtgagcagaaaggcctgcgcccactggagcggccactgctgcctgtgggacgccagcgtgcaggtgaaggcctgcgccggcggctactacgtgtacaacctgaccgccccccccgagtgccacctggcctactgcaccgaccccagcagcgtggagggcacctgcgaggagtgcagcatcgacgaggactgcaagagcaacaacggcagatggcactgccagtgcaagcaggacttcaacatcaccgacatcagcctgctggagcacagactggagtgcggcgccaacgacatgaaggtgagcctgggcaagtgccagctgaagagcctgggcttcgacaaggtgttcatgtacctgagcgacagcagatgcagcggcttcaacgacagagacaacagagactgggtgagcgtggtgacccccgccagagacggcccctgcggcaccgtgctgaccagaaacgagacccacgccacctacagcaacaccctgtacctggccgacgagatcatcatcagagacctgaacatcaagatcaacttcgcctgcagctaccccctggacatgaaggtgagcctgaagaccgccctgcagcccatggtgagcgccctgaacatcagagtgggcggcaccggcatgttcaccgtgagaatggccctgttccagacccccagctacacccagccctaccagggcagcagcgtgaccctgagcaccgaggccttcctgtacgtgggcaccatgctggacggcggcgacctgagcagattcgccctgctgatgaccaactgctacgccacccccagcagcaacgccaccgaccccctgaagtacttcatcatccaggacagatgcccccacaccagagacagcaccatccaggtggtggagaacggcgagagcagccagggcagattcagcgtgcagatgttcagattcgccggcaactacgacctggtgtacctgcactgcgaggtgtacctgtgcgacaccatgaacgagaagtgcaagcccacctgcagcggcaccagattcagaagcggcagcgtgatcgaccagagcagagtgctgaacctgggccccatcaccagaaagggcgtgcaggccaccgtgagcagagccttcagcagcctgggcctgctgaaggtgtggctgcccctgctgctgagcgccaccctgaccctgaccttccagtag

SEQ ID NO: 343382 - DNA, 1923 bp, Artificial Sequence
  derived and/or modified sequence
atggggcagcccagcctgacctggatgctcatggttgtcgtggccagctggtttattactaccgcagcaacagacacttctgaagcaaggtggtgctctgagtgtcatagtaatgccacctgcacagaagacgaagctgtgacaacttgtacatgtcaggagggttttacaggggacgggctcacttgtgtcgatttggacgagtgcgctatcccaggcgcacataattgcagcgcgaactccagttgtgtcaataccccagggtcatttagttgtgtgtgcccggaaggctttcggctgtctcccggtctcggttgcactgacgtggatgagtgcgccgaacccgggctaagccattgccacgctcttgctacctgtgtgaacgttgtgggatcatacctttgtgtttgccccgccgggtaccgtggcgacggatggcattgcgaatgctcccctgggagttgcggccctggattggactgcgttcccgaaggtgacgcattagtgtgcgctgatccatgccaggctcacagaaccctggacgagtattggcgttcaacggagtacggggagggctacgcttgcgacacagatctgagaggctggtataggttcgtagggcagggcggggcccgaatggctgagacttgtgtccccgtgctccgatgtaacaccgcagcaccaatgtggttaaatggtacccatccatcaagtgacgagggcattgtgtcccgtaaggcatgtgcccactggagtggtcactgttgcctctgggacgctagcgttcaggtcaaggcttgtgctggagggtattatgtgtacaacctgacggcgcctccggaatgccacctcgcctactgtaccgaccctagcagcgtagaaggcacttgtgaagagtgttccatcgacgaggattgcaagtccaacaacgggcgatggcactgtcagtgtaagcaggattttaacatcactgatatctcccttctggagcacaggctcgaatgcggggctaacgacatgaaagtaagcctcggaaaatgccagctaaagtctctgggttttgacaaagtgttcatgtacctgagcgattccagatgtagcgggtttaacgacagagataatcgcgactgggtaagcgtggttactcccgccagagatggaccctgcggtaccgttctgactcgcaatgaaacacacgccacctattctaacaccctctaccttgccgatgaaattatcatccgggacctgaacattaaaatcaacttcgcctgctcgtatcctctggatatgaaagtgagccttaagacagccttgcagccgatggtatccgccttgaatataagggtcggcgggacaggtatgttcactgtgaggatggcattgttccagacaccatcctatacacagccctatcaggggtccagcgtgactctgtccacagaggccttcctctacgtgggtactatgctcgacgggggggacttgagcagattcgccttgctcatgaccaactgctatgcaacgccgtccagcaacgccaccgacccattgaaatactttatcattcaggatcgatgtccccataccagagactccacaattcaagtggtggaaaacggtgagtccagccagggcagattctcggtccagatgttcaggttcgctggcaactatgatcttgtgtatcttcattgcgaggtttacctctgtgacactatgaatgagaagtgcaagcctacctgcagcggtacacgctttcgctccggttccgtcatcgaccagtctagggtcttaaacttaggccccatcacccgcaagggcgttcaggcaacggtgtcccgggcattctctagcctgggcttgctgaaggtctggctgcccctgttgctttcagccaccctcactcttactttccagtag

SEQ ID NO: 343383 - DNA, 1923 bp, Artificial Sequence
  derived and/or modified sequence
atgggacagccttctctaacatggatgctgatggttgtggtcgcaagttggttcataacgaccgccgctacagataccagcgaggcccgctggtgcagtgaatgtcattcgaatgctacctgtacagaggatgaagcagttactacatgcacatgccaggagggttttacaggtgacggcctgacttgcgtggacctcgacgaatgtgctattccaggagcccacaactgcagtgcaaattcatcctgtgtgaacactcctggttccttctcatgcgtctgccccgagggttttaggctgtcccccgggctaggctgcacagacgtggacgagtgtgccgaacctggtctgtcgcactgccacgcgctcgcaacatgcgtgaatgtagtcgggagctacctgtgcgtgtgtccagccggatacagaggggatgggtggcattgtgagtgctctcctggttcttgtggcccaggactggactgtgtccccgagggggatgccctggtgtgtgcggacccttgtcaagcgcaccgcaccctggatgagtactggcgatctacagagtacggcgaagggtatgcctgtgacacagacctgcgcggctggtaccggtttgtggggcagggaggggctagaatggcagagacatgcgtgcctgttttgaggtgcaataccgccgcacctatgtggctgaatggaacccacccaagttctgacgaggggatcgtatcaagaaaggcctgcgcccactggtccggccattgttgcctctgggatgcgagcgtgcaggttaaggcctgcgcaggtggatactacgtgtataacctgaccgcccctccagagtgtcacctggcctactgcaccgatccaagctctgttgaagggacatgcgaagaatgctctatagacgaggattgtaagtctaacaacggccgctggcactgccagtgcaaacaagatttcaacataactgacatcagtcttctggaacaccgcttagagtgcggagctaatgacatgaaagtaagcttgggcaagtgccagctcaagtccctcggattcgataaggtattcatgtatttgtcagattcgagatgcagtggcttcaatgatagggataaccgcgactgggtgagcgtggttacacctgcccgcgacggaccctgcgggacagtactaactcggaatgagacacatgcaacttattctaacacgttataccttgccgacgaaataatcattcgggacctcaatatcaagataaactttgcctgttcctacccactggacatgaaggtgagcctgaaaaccgctctccagccaatggtttctgctctgaatataagggtcggagggactggcatgtttactgtccgaatggctctgttccagacacccagctatactcagccgtatcaggggtctagtgttactctgagtactgaggctttcctatacgtgggcaccatgttggatgggggggacctgtcccggtttgccctcctgatgaccaactgctacgccacgccttcaagcaacgccaccgacccactaaaatatttcatcatccaggaccggtgcccacatacaagggactccaccatccaagtggtggaaaatggggagtccagccaaggaaggttcagcgtacagatgtttaggttcgccggcaattatgatctggtttatctccattgtgaagtgtatctgtgtgacacaatgaacgaaaagtgtaagccaacctgctccgggacgcggttccgcagcggatcagtgattgatcagtcccgggtgctgaacctcgggccgattactcgcaagggcgtccaagctaccgtcagtcgcgccttttcttccctgggtctgctcaaagtctggcttccccttctgttaagtgcaacactgactctgaccttccagtag

SEQ ID NO: 343384 - DNA, 1923 bp, Artificial Sequence
  derived and/or modified sequence
atgggccagccctcgttgacatggatgttgatggtggttgtagcctcctggttcatcaccaccgctgcaaccgatacctcagaagcccggtggtgtagcgaatgccatagcaacgcgacatgcaccgaagatgaggcagtgaccacttgtacctgccaggaagggtttacaggggatggtttgacttgcgtcgacttggatgagtgtgcgattcctggtgctcacaactgctctgctaatagcagctgcgtgaacactcccggatcattcagctgcgtttgtcctgagggctttcggctgagtcctgggctgggatgtacagacgtggatgagtgcgctgaaccagggctgtcacactgccacgccctggctacgtgcgttaatgtggtggggtcctacctttgcgtctgccccgccggctatagaggagatggatggcactgtgagtgctcccccgggtcatgtggcccggggctggactgcgtgcccgaaggtgacgccctggtgtgcgcagatccatgccaggcacaccgaacattggatgaatattggcgttccaccgaatatggtgagggttatgcttgtgacacagatctacgcggatggtatcgcttcgtgggtcaaggcggtgctcggatggcggaaacatgcgtaccagtcctccggtgtaacacggcagctccgatgtggcttaacggcacccacccctcttctgacgaaggaattgtatcgagaaaagcctgtgctcactggtcaggtcactgctgtctatgggatgcatccgtgcaagttaaagcctgtgcaggtggctactacgtttataatctcacggcccctcccgaatgccacctggcgtattgtacagatccaagctctgtagaggggacatgtgaggagtgttcgattgacgaggattgcaagtccaacaatggtagatggcattgtcaatgcaaacaggacttcaatatcacagacatctcattgctagagcataggcttgagtgtggcgccaacgacatgaaagtgtctctgggcaaatgtcagttgaagtcactggggtttgacaaggtgtttatgtatctgagtgactcgcgttgttcaggatttaacgatagagacaaccgtgactgggtctccgtggttacccccgccagagatgggccgtgcggtacagtcctcactagaaatgagacacatgctacatacagcaataccctataccttgccgacgaaatcattatacgtgacctgaacatcaaaattaacttcgcatgttcctaccctttggacatgaaggtgagcttgaaaacggccctccagcctatggtctctgccctgaacatcagggttggagggactggcatgttcacagttaggatggccctttttcagacaccctcctatacccagccttatcagggctcctccgtcactctttcgacagaggccttcctctacgtcggaaccatgctggatggcggcgacttgtccaggttcgccttgctgatgaccaattgttatgcgacaccttctagtaacgctacagaccccctgaagtacttcattatacaggatcggtgtccccacacgcgggatagcaccatccaggtcgtggagaacggggaatcctctcaaggccgctttagtgtacagatgttcaggttcgctggaaactacgacctggtgtacctgcactgcgaagtgtatctttgcgacacgatgaacgagaaatgtaagcccacttgctcggggacgcgattcagaagcgggtccgttatcgatcaatccagagtcttaaaccttggtcccattacccgaaagggtgtgcaggccacagtctccagggccttcagctccctgggccttttgaaggtgtggctgcctctgctgctgtccgctactttgaccctcaccttccagtag

SEQ ID NO: 343385 - DNA, 1857 bp, Artificial Sequence
  derived and/or modified sequence
atgggccagccctctttgacttggatgctcatggttgtggtcgccagctggtttattacaacagccgcgactgatacctcagaggctcggtggtgttccgagtgccactcaaatgccacctgcactgaagatgaagctgtaactacgtgtacttgccaggagggctttactggagatggcctgacttgcgtggacctagatgaatgtgctatcccaggagcacacaactgcagtgcaaacagcagttgcgtgaacacacccggaagcttctcctgcgtgtgccccgagggcttccgtctcagtccaggcctgggctgcactgacgttgacgagtgcgccgaaccgggcctgtctcactgccacgccttggccacctgcgtgaacgtggtaggctcttgcggcccgggactcgactgcgttcctgaaggcgacgccctcgtctgcgcggacccttgtcaggcccaccggacgctggacgagtattggaggagtacagaatatggtgaagggtacgcgtgtgatactgatcttcgcggatggtaccgcttcgttggccaaggaggagcaagaatggccgagacttgcgtaccggtgctgagatgcaacaccgctgcaccaatgtggctgaacgggacccacccctcgagtgacgaggggatcgtgtctcgaaaagcctgtgcacattggagcggccattgttgtctttgggatgcctccgttcaagtgaaagcctgtgccgggggatactacgtgtacaatcttactgccccgccggagtgccatctggcatactgcaccgatccttcgagcgtcgagggcacctgcgaagaatgctcaattgacgaagactgcaaatctaacaatggacgctggcactgccagtgtaagcaggatttcaacatcactgacatttctttgctggaacataggcttgaatgcggagccaatgacatgaaagtgtctttgggaaaatgtcagttgaagagtcttgggttcgacaaagtgttcatgtatctctccgatagtcggtgcagcggatttaacgatcgcgataatagggattgggtcagcgtggtgacaccggcccgggacgggccctgcggtacagtgctaactagaaacgaaactcatgctacctacagcaatacactatatttggccgatgaaatcataatccgggatctgaatatcaagatcaattttgcctgtagctaccccctagatatgaaggtgagcttaaaaacagcgctgcaaccaatggtgagcgcattgaatatccgagtgggcgggaccggcatgttcactgttcgtatggccttatttcagactccctcttacactcagccctaccagggaagctccgtcaccctctccactgaggccttcttatatgtaggcaccatgttggatggaggcgacttgtcaaggttcgctctgttaatgacaaattgttatgcaacaccttcctctaatgccacagatcccctgaagtactttatcattcaggaccgctgcccgcacactcgagattcaacaatccaagttgtggagaacggcgagagctctcaagggaggttctctgtgcagatgtttcgctttgcaggcaattatgatctggtttacctgcactgcgaggtgtatctgtgtgatactatgaacgagaaatgtaagcctacctgtagtggtacccggtttcggtccggaagcgttatcgatcagtcaagagtccttaacttgggcccaatcaccaggaaaggcgtacaggcaacagtgtctagagcattctcctccctgggattactgaaggtttggctacccctgttgctgagcgcgactcttacactgactttccagtag

SEQ ID NO: 343386 - DNA, 1923 bp, Artificial Sequence
  derived and/or modified sequence
atgggccagcccagcctgacctggatgctgatggtggtggtggcctcctggttcatcaccacagctgccacagacaccagcgaggcccgctggtgcagcgagtgccacagcaatgccacctgcacagaagatgaggccgtgaccacctgcacctgccaggagggcttcaccggagatggcctgacctgtgtggacctggatgaatgtgccatccctggggcccacaactgcagcgccaacagcagctgtgtgaacaccccaggcagcttcagctgtgtgtgcccagagggcttccggctgagccctggcctgggctgcacagatgtggatgaatgtgccgagcccggcctgagccactgccacgccctggccacctgtgtgaatgtggtgggcagctacctgtgtgtgtgcccagctggctacagaggagatggctggcactgtgaatgttctcctggcagctgtggccctggcctggactgtgtgcctgaaggagatgccctggtgtgtgccgacccctgccaggcccacaggaccctggatgagtactggaggagcacagaatatggagagggctacgcctgtgacacagacctgcggggctggtacagatttgtgggccagggcggggccaggatggccgagacctgtgtgcctgtgctgcgctgcaacacagctgcccccatgtggctgaatggcacccaccccagcagtgatgagggcatcgtgtccaggaaggcctgtgcccactggagcggccactgctgcctgtgggatgcctctgtgcaggtgaaggcctgtgccggcggctactacgtgtacaacctgacagcccccccagagtgccacctggcctactgcacagaccccagctctgtggagggcacctgtgaagaatgttccattgatgaggactgcaagagcaacaacggccgctggcactgccagtgcaagcaggacttcaacatcacagacatcagcctgctggagcaccggctggagtgtggggccaatgacatgaaggtgtccctgggcaagtgccagctgaagagcctgggctttgacaaggtgttcatgtacctgagtgacagccgctgcagcggcttcaatgaccgggacaacagagactgggtgtctgtggtgaccccagccagagatggcccctgtggcaccgtgctgaccagaaatgagacccacgccacctacagcaacaccctgtacctggctgatgagatcatcatccgggacctgaacatcaagatcaactttgcctgcagctaccccctggacatgaaggtgtccctgaagacagccctgcagcccatggtgtctgccctgaacatccgggtgggcggcaccggcatgttcaccgtgaggatggccctcttccagacccccagctacacccagccctaccagggcagctctgtgaccctgagcacagaggccttcctgtatgtgggcaccatgctggatggaggagacctgagcagatttgccctgctgatgaccaactgctacgccacccccagcagcaatgccacagaccccctgaagtacttcatcatccaggaccgctgcccccacacccgggacagcaccatccaggtggtggagaatggagagagcagccagggccgcttctctgtgcagatgttccgctttgctggcaactatgacctggtgtacctgcactgtgaggtgtacctgtgtgacaccatgaatgagaagtgcaagcccacctgcagcggcacccgcttccgcagcggctctgtgattgaccagagccgggtgctgaacctgggccccatcaccaggaaaggagtgcaggccaccgtgtcccgggccttcagcagcctgggcctgctgaaggtgtggctgcccctgctgctgagcgccaccctgaccctgaccttccagtag

SEQ ID NO: 343387 - DNA, 1857 bp, Artificial Sequence
  derived and/or modified sequence
atgggccagcccagcctgacctggatgctgatggtggtggtggcctcctggttcatcaccacagctgccacagacaccagcgaggcccgctggtgcagcgagtgccacagcaatgccacctgcacagaagatgaggccgtgaccacctgcacctgccaggagggcttcaccggagatggcctgacctgtgtggacctggatgaatgtgccatccctggggcccacaactgcagcgccaacagcagctgtgtgaacaccccaggcagcttcagctgtgtgtgcccagagggcttccggctgagccctggcctgggctgcacagatgtggatgaatgtgccgagcccggcctgagccactgccacgccctggccacctgtgtgaatgtggtgggcagctgtggccctggcctggactgtgtgcctgaaggagatgccctggtgtgtgccgacccctgccaggcccacaggaccctggatgagtactggaggagcacagaatatggagagggctacgcctgtgacacagacctgcggggctggtacagatttgtgggccagggcggggccaggatggccgagacctgtgtgcctgtgctgcgctgcaacacagctgcccccatgtggctgaatggcacccaccccagcagtgatgagggcatcgtgtccaggaaggcctgtgcccactggagcggccactgctgcctgtgggatgcctctgtgcaggtgaaggcctgtgccggcggctactacgtgtacaacctgacagcccccccagagtgccacctggcctactgcacagaccccagctctgtggagggcacctgtgaagaatgttccattgatgaggactgcaagagcaacaacggccgctggcactgccagtgcaagcaggacttcaacatcacagacatcagcctgctggagcaccggctggagtgtggggccaatgacatgaaggtgtccctgggcaagtgccagctgaagagcctgggctttgacaaggtgttcatgtacctgagtgacagccgctgcagcggcttcaatgaccgggacaacagagactgggtgtctgtggtgaccccagccagagatggcccctgtggcaccgtgctgaccagaaatgagacccacgccacctacagcaacaccctgtacctggctgatgagatcatcatccgggacctgaacatcaagatcaactttgcctgcagctaccccctggacatgaaggtgtccctgaagacagccctgcagcccatggtgtctgccctgaacatccgggtgggcggcaccggcatgttcaccgtgaggatggccctcttccagacccccagctacacccagccctaccagggcagctctgtgaccctgagcacagaggccttcctgtatgtgggcaccatgctggatggaggagacctgagcagatttgccctgctgatgaccaactgctacgccacccccagcagcaatgccacagaccccctgaagtacttcatcatccaggaccgctgcccccacacccgggacagcaccatccaggtggtggagaatggagagagcagccagggccgcttctctgtgcagatgttccgctttgctggcaactatgacctggtgtacctgcactgtgaggtgtacctgtgtgacaccatgaatgagaagtgcaagcccacctgcagcggcacccgcttccgcagcggctctgtgattgaccagagccgggtgctgaacctgggccccatcaccaggaaaggagtgcaggccaccgtgtcccgggccttcagcagcctgggcctgctgaaggtgtggctgcccctgctgctgagcgccaccctgaccctgaccttccagtag

SEQ ID NO: 343388 - DNA, 1923 bp, Artificial Sequence
  derived and/or modified sequence
atgggccagcccagcctgacctggatgctgatggtggtggtggccagctggtttattaccactgccgcaaccgacacgtcggaggcgaggtggtgttcagagtgccactccaatgccacctgcaccgaggatgaggccgtaaccacatgtacctgtcaggaaggattcacgggtgacggcttaacgtgtgtggatctcgatgagtgcgccatccccggtgcccacaactgtagtgccaactcatcctgcgtcaacactcccggcagcttttcatgcgtgtgccccgaaggatttcgacttagtcccgggttaggatgcacagatgtagatgagtgtgcagagccggggttgtcccactgccatgcattggccacatgcgtgaacgtggtgggcagttacctgtgcgtgtgtccagccgggtataggggtgatggctggcattgtgagtgctcacctggatcttgcgggccagggcttgattgtgttcccgagggcgatgccctcgtttgtgctgacccatgtcaagcacacagaacactggatgaatattggcgaagcactgaatacggagaaggttatgcgtgtgatactgacctgcggggatggtaccggtttgtgggacagggtggcgcccggatggccgagacctgtgtgcctgtactgagatgcaacaccgctgccccgatgtggttaaatggcacccacccatcttcagatgaagggattgtgagcagaaaggcctgtgcacattggtctggacactgctgtctatgggacgcttccgtccaggtgaaagcttgcgctggcgggtactacgtttacaatctcacagccccacccgaatgtcatttggcctattgcaccgacccaagctctgtcgagggtacatgtgaagaatgtagtattgatgaggattgtaaaagtaacaatggacgatggcactgccagtgtaagcaagactttaacatcacagacatcagcctgttggaacacaggcttgagtgtggggctaatgacatgaaggtgagcctaggcaagtgtcagcttaagagtctcgggtttgacaaggtcttcatgtacctgagtgacagcaggtgtagtggatttaacgatagagataatagggattgggtgagtgtggttacccccgcccgggacggtccttgtggcacagtgctgaccaggaatgaaacacacgctacctatagtaacaccctctatctggcagatgagatcataataagagacttaaatatcaaaataaactttgcttgcagctaccccctggacatgaaggttagccttaagactgccctgcagcctatggtcagcgccttgaacattcgtgtcggtggaactggcatgtttacagtgcggatggccctgttccagacacccagctatactcaaccatatcaagggagctcagtgactctgagcacggaagcgtttttgtacgtcgggacgatgctagatgggggcgatctgtcaagattcgccctgctgatgacaaattgctatgcgactccctcctcaaacgcaaccgatccactgaagtattttattatccaagaccggtgcccacacacacgcgactccaccatccaagtagtcgagaacggcgagtcttctcaaggaaggttcagtgttcaaatgttcagattcgcaggcaattatgacctggtgtacctacactgtgaagtctacctgtgtgatactatgaatgaaaagtgcaagcccacctgcagtggcacccgatttcggagcggttcagtgattgaccagagtcgagtgctaaacttgggaccgataactaggaagggggtgcaggccaccgtgtccagagcatttagctcccttggcctgctgaaggtctggctgccattgttgttgtcagccacactcactctcacattccaatag

SEQ ID NO: 343389 - DNA, 1923 bp, Artificial Sequence
  derived and/or modified sequence
atgggccagcccagcctgacctggatgctgatggtggtggtggccagttggttcatcactactgctgccaccgatacaagcgaggcccgatggtgttccgagtgccacagcaatgcgacctgtacagaggacgaagccgtgactacatgcacttgccaggaaggtttcacgggcgacggcctgacttgtgtggacctcgatgaatgcgccatcccaggggcccacaactgcagcgctaattcctcctgtgtgaatactcccgggtctttttcgtgtgtgtgtcccgagggctttaggctttctcctgggctggggtgtactgatgtggacgagtgtgctgaaccaggtctctctcattgccacgccctcgccacttgtgtgaatgtggtcggttcatatctctgtgtttgccctgccgggtataggggcgatggctggcactgtgaatgctctcctggtagttgcggacctggcctggattgtgttccagagggggacgccctggtgtgtgctgatccatgtcaggctcaccgcacgctggacgaatactggcggagtactgagtatggtgaggggtatgcttgcgatacggacttgcgggggtggtaccgttttgttggtcagggcggagcccgcatggcagagacctgcgtcccggtgctgagatgtaatacagctgctcctatgtggctgaatggaacccatccgtccagcgacgaaggaatagtctctagaaaggcctgtgcccattggtctggccactgttgcctgtgggacgccagtgtgcaggtgaaagcctgtgctggtggctactatgtgtacaacttgacggcccccccggagtgtcatcttgcctactgtactgatccatccagcgtggagggtacatgcgaagagtgcagtatagacgaagactgcaagtctaataacggacgttggcattgccaatgcaaacaggactttaacatcaccgatataagcctgctggagcaccgcttggaatgcggtgccaacgacatgaaagtcagcctcgggaagtgccagttgaagtccctgggcttcgacaaggtcttcatgtatttgagtgattctagatgcagcggttttaacgatcgggataatcgtgattgggtttccgtagtgaccccagcacgtgacggcccttgtgggacggtattaactaggaatgagacacatgcaacatattcgaatactctctatttggccgatgagattattatcagagatctaaatataaagatcaacttcgcctgctcctatccattggatatgaaagtcagtctcaaaaccgccttgcagcccatggtcagcgcactaaatatcagggtgggtggtaccggcatgttcacagttcgtatggcactgtttcaaactccaagttacacacaaccttaccagggctcctcagttacactgtctacagaggcctttctttacgtcggaacaatgctggatggaggcgatttgtcccggtttgcgctcttaatgactaactgctatgcaactccctcctccaacgcaaccgaccccctgaagtatttcatcatccaagatcggtgtcctcacactagggacagcaccattcaggtggttgagaatggagagtcgtcacaggggcgtttcagcgtccagatgtttcgatttgccggcaattacgacctcgtctatctgcactgtgaagtgtatctgtgtgacactatgaacgaaaaatgcaaacctacatgctccgggacacggttcaggtcagggtccgtaatcgaccagtcccgcgtccttaatctcgggccgattacccgcaaaggcgtgcaagctacagtgtctagagccttctcaagtctgggccttcttaaggtgtggctgccacttctgctctctgcgactctgactctcacctttcaatag

SEQ ID NO: 343390 - DNA, 1923 bp, Artificial Sequence
  derived and/or modified sequence
atgggccagcccagcctgacctggatgctgatggtggtggtggcctcttggtttatcactaccgcagctaccgacacttccgaggcacgctggtgtagcgagtgtcacagcaacgccacgtgcacagaggatgaggcagtcaccacctgcacatgccaggagggcttcacaggtgatggcctgacctgtgttgacctggacgagtgtgctatccccggcgctcacaactgttccgccaattcttcctgtgtgaacacaccaggcagtttcagctgtgtctgtcctgaggggtttcgtctgtctcctggactcggatgcacagatgtggatgagtgcgccgaaccagggctctcccactgccacgccttggccacctgcgtgaacgtcgtcgggagttatctttgcgtctgccccgccgggtacaggggtgatggctggcattgcgagtgtagcccaggcagctgcgggcccggactcgactgcgtgcctgagggcgacgccttggtgtgcgccgatccttgtcaggcccataggacactcgacgaatattggcgctccaccgagtacggcgaaggctacgcatgcgacaccgaccttcgaggctggtatcgtttcgttgggcaaggaggcgctcgcatggcagaaacatgcgtccctgtactcagatgcaatactgccgccccaatgtggcttaacggaacacatcctagcagcgatgagggaatcgtctctcgcaaggcctgcgcccattggagcggtcactgttgtttgtgggatgccagcgtgcaggtaaaggcttgtgcagggggctactacgtctataaccttacagcacccccggaatgtcaccttgcctactgtactgatcctagttcagtcgaggggacctgcgaggaatgtagcatagacgaggactgcaagtcaaataacgggagatggcattgtcagtgcaaacaggactttaatataaccgacataagcctgctagagcacagactggaatgcggcgccaacgacatgaaggtgagcttgggaaaatgtcaactgaagtcactggggttcgataaagtcttcatgtatctaagcgactcccgttgttctggattcaacgaccgggacaaccgggattgggtgtctgtcgtgactcccgcgagggacggcccatgcggcacggttctaactaggaacgaaacccatgctacttactccaatacactttatctggccgacgagatcattataagagatttgaatattaaaataaactttgcctgttcttacccacttgatatgaaagtgtctcttaagacagctctacaacctatggtgagtgccttaaacattagagtgggcggcaccggaatgttcacggtgcggatggccctgttccagactcccagttacacccaaccttaccaagggtcctccgtaacactgtctactgaagcgttcttgtacgtcggtacaatgctagacggaggagatttatcccgatttgcactgctgatgaccaactgttacgccacgccatcttctaatgccacagaccccctgaaatatttcatcatccaagaccgttgtccacacacaagagacagcacaattcaggtggtcgaaaatggtgagtcctcccagggcagattctccgtgcagatgttccggttcgctggtaactatgatcttgtgtatctccattgcgaagtgtatctgtgtgataccatgaatgaaaagtgtaaacccacgtgctctggaacccggttccggagcggttcggtgatcgaccagagccgggttctgaacctgggccccatcactcgtaagggtgtgcaggcgactgtgagtcgagctttttcctctctgggtttgttgaaagtgtggctcccgttactgcttagtgccaccctgaccttaacttttcagtag

SEQ ID NO: 343391 - DNA, 1857 bp, Artificial Sequence
  derived and/or modified sequence
atgggccagcccagcctgacctggatgctgatggtggtggtggcctcctggttcatcaccaccgccgccacggatacgagcgaagcccgatggtgcagtgaatgtcatagtaacgcaacctgtacagaagatgaggctgtgaccacctgtacctgtcaagaggggtttaccggcgacggtctgacgtgcgttgacctcgatgaatgcgccatccccggggcgcataattgttcagcgaactccagctgcgttaacactccaggttccttctcctgtgtttgccccgaggggtttagactgagccccgggctggggtgcacagatgtcgacgagtgcgccgaaccaggcctgtcccattgtcatgctctggcgacctgcgtaaatgtggtggggtcctgcgggcccggtctggattgcgtgcctgaaggggatgccttggtgtgcgctgacccctgtcaggctcatagaacactggacgagtattggagatccactgaatatggcgagggttatgcctgcgatactgacctacgggggtggtatagattcgtcggacagggaggagcaagaatggcggaaacttgcgtgcctgtgctgcgctgcaatacagcagcacccatgtggttgaatggtacacacccctcttcagacgagggaatagtgagcagaaaggcatgcgctcactggagcggtcactgctgcttgtgggatgcatctgtgcaagtgaaggcctgtgccggaggctactatgtatacaatcttactgctcctccagagtgtcatctcgcttattgtacagaccctagcagtgtggaagggacatgtgaagagtgctctattgacgaagactgtaaaagcaataatgggcggtggcactgtcagtgtaagcaggacttcaatatcactgacatctctctgctcgagcaccggctggagtgtggcgcaaacgatatgaaggtgagcttgggcaaatgtcaactaaagagcttggggttcgacaaggttttcatgtatctgtctgacagccgatgttccgggttcaatgaccgagataacagagactgggtatctgtggtcacccccgcacgcgatggaccatgcggaactgtcctgactcggaacgagacccacgctacgtactctaatactctctatctggccgacgagatcatcattagagacctcaacattaaaattaactttgcttgtagttacccactggacatgaaggtcagtctaaagacggcgcttcaacccatggtaagcgccctaaacatcagggtaggcggaaccggcatgttcaccgtgcgcatggctctgttccagaccccaagttacactcagccctatcaggggtcaagtgtgaccctgtccactgaagccttcttatatgtcggaaccatgctggatggaggtgacctttcccgctttgcgttgctgatgaccaactgttacgcaacaccctcatccaacgctacagaccctctgaaatactttattatccaggaccgctgccctcatacacgtgattccacaattcaggtcgtggaaaacggcgaaagctctcagggacgctttagtgttcagatgttccgattcgccggcaactacgatctggtttatctccactgtgaggtgtatttgtgcgacacaatgaacgaaaaatgtaaaccgacgtgtagcggcactcggtttcggagtggaagcgtgatagaccaaagcagggtgctgaatctgggcccaatcaccaggaagggtgttcaagcaacggtatcgagggccttctctagccttggactgttaaaagtctggcttcccctcctcctaagcgcaaccctgaccctcaccttccagtag

SEQ ID NO: 343392 - DNA, 1923 bp, Artificial Sequence
  derived and/or modified sequence
atgggccagccctctctcacttggatgctaatggttgttgttgcatcctggtttatcaccacagcagccacagatacttccgaagcccgatggtgtagtgaatgtcactcaaacgccacctgcacagaggacgaggccgtaaccacttgtacatgtcaggaagggtttacaggggatggcctcacgtgcgtcgacctcgatgagtgtgccattccaggagcccacaactgcagtgcaaactccagctgtgtgaacacccccggaagtttctcctgtgtgtgccccgagggattcaggctgtcccctggtctcggatgtactgacgttgacgaatgtgccgaacctggactctcccattgtcatgcactggccacctgtgtaaacgttgtgggaagctacttgtgtgtctgcccagcaggatacaggggcgacggatggcactgcgagtgctcccccggttcttgtggaccgggactggattgtgtgcccgagggcgacgcactggtttgcgccgacccatgccaggcacataggactctggacgagtactggcgatccacagagtatggcgaggggtacgcctgtgatacagacctcagaggctggtaccggttcgtggggcagggcggagccagaatggctgagacctgtgtgccggtcctgaggtgtaataccgctgccccaatgtggctcaatggcacccaccctagtagtgatgagggtatcgtctcccgcaaagcatgtgctcactggagcggtcactgttgcctgtgggatgcatccgtgcaggtgaaggcgtgcgcgggaggatactatgtctataacctcaccgcccctccagagtgccatctggcctactgtaccgaccccagcagtgtcgagggcacatgcgaagaatgtagcatcgacgaggactgtaagtctaacaacggcagatggcattgtcagtgcaaacaggactttaacatcactgacatctcactcctggaacaccgtctagagtgcggggcaaatgatatgaaggtcagtttaggcaagtgccagctaaaaagtctgggattcgataaagtgttcatgtacctgagcgactcaaggtgttcaggattcaatgaccgggacaatcgtgactgggtctcagttgtgaccccagcacgcgacggaccatgtggcaccgtcctgacccggaatgagactcacgctacttactctaatactctctatctggctgacgagattattatccgggatcttaatatcaaaatcaactttgcatgctcttacccattagacatgaaggtgtccctcaagacggcccttcaacccatggtgagtgctctgaacattcgcgtcggcggaaccggtatgttcaccgtacgaatggcattgtttcagaccccctcctacactcagccatatcaggggagctctgtgaccttgagcaccgaagccttcctctatgtggggaccatgttggatggcggagacctctcccggtttgccctgttaatgacaaactgctacgccacaccttcttccaatgcaactgatccacttaagtactttattatccaggaccgatgcccccacactcgggattcaacgatccaagtggtggaaaatggtgaaagctcccagggacgcttcagcgtgcagatgttccgattcgccggaaactatgacttggtctacttgcattgcgaagtgtacctgtgtgacacgatgaatgagaagtgtaagcctacctgtagcggaactaggtttcggtcaggaagcgtgatcgaccagagcagagtactgaatctcggaccgataactcgcaagggggtccaggctacagttagtagagccttctcttctttgggcctgttaaaggtctggttacctctgcttctgtctgcgacactgacgctgactttccagtag

SEQ ID NO: 343393 - DNA, 1923 bp, Artificial Sequence
  derived and/or modified sequence
atgggacagccgagtttgacatggatgcttatggtcgtggtcgcctcttggttcatcacaaccgcggcaactgatactagtgaagctaggtggtgcagcgagtgccacagcaacgccacctgcactgaagacgaagccgtcaccacctgtacttgccaagagggatttacgggcgacggactgacttgcgtggatctcgacgaatgcgctatccccggtgcgcacaactgctcggcaaattcgtcctgcgttaacacaccagggtcattttcatgcgtttgccccgagggattcagactaagcccagggctcggttgtactgacgtagatgagtgcgcagagccaggtctctctcactgccacgccctggcaacttgcgtgaacgttgttggttcgtacctgtgcgtgtgccccgctggctaccgcggagacggttggcattgtgaatgtagccctggcagttgtggccctggactggattgcgttcctgaaggtgatgctcttgtgtgcgccgacccatgtcaggcgcaccgaacactggacgagtattggagatcaaccgaatacggcgaggggtatgcttgcgacaccgacctaagaggatggtaccgctttgtagggcagggcggtgccaggatggctgaaacgtgcgtaccagtactgaggtgcaatactgcggctccaatgtggctgaatgggacacatccaagctccgacgagggtatcgtctctcggaaggcatgtgcccactggtccggacactgctgcctgtgggacgcctctgtacaggtgaaggcttgtgctggcggatattacgtctataatttaaccgctcctcctgagtgccacttggcatactgtaccgatccctcctcagtagagggaacatgcgaagagtgtagcattgacgaggactgcaaatcaaataatggcagatggcactgccagtgtaaacaggatttcaatataactgacatcagtctccttgagcaccggctagaatgcggggctaacgacatgaaagtgagcctggggaaatgtcagcttaagtcacttggctttgataaggtgtttatgtatttatccgatagccgatgttctggatttaatgacagagacaaccgggactgggtctctgtagtgaccccggcacgcgacgggccttgtggtacagtccttacacgtaacgagacacacgcaacttattcaaatacgctatacctcgctgacgagatcataatccgcgatctgaacattaaaattaactttgcctgttcctatcccctggacatgaaggtgagtctcaagaccgctcttcagccaatggtcagtgccctaaacattagggtgggcggtaccggtatgttcacagtgcgcatggcgttatttcaaactccctcttacacgcagccttaccagggttcttcagtgacacttagcacagaagcctttctctacgttggcacaatgctggatggcggagatctgagccgctttgctcttctgatgacaaactgctacgccactccttctagtaacgccactgacccactcaaatattttataattcaagacagatgtccccacacaagggatagtaccatccaggtggtggagaatggggagagcagccaaggcagatttagcgtgcagatgttccgctttgctggaaactatgacttagtgtatcttcactgtgaggtctatctgtgtgacacaatgaacgaaaaatgcaagccgacatgtagtgggaccaggtttagatctggttctgtgatcgaccaatctagggtattgaacctggggcctatcaccaggaaaggggtacaggctaccgtgagtagagcgttttccagtctaggtctccttaaggtctggcttcctctcttgctgtctgccactctgaccctgaccttccagtag

SEQ ID NO: 343394 - DNA, 1923 bp, Artificial Sequence
  derived and/or modified sequence
atggggcagccaagtctgacttggatgctaatggtggtggtcgcttcttggtttattactacggcagccacagacacatcggaagctcgctggtgcagcgagtgccatagcaatgccacatgtactgaagacgaagcagtcaccacatgtacatgtcaagagggatttacgggcgacggactgacctgtgtcgaccttgacgaatgtgccattcccggagcgcacaactgttctgccaattcctcatgcgtgaataccccagggtctttttcttgtgtctgcccagagggtttcagactgagccccggtctcggttgcacagacgtggatgaatgtgccgagcccggactttctcattgccatgcattggctacatgtgtcaacgtggtaggttcgtacctgtgcgtgtgcccagctggttatcggggagacgggtggcactgtgaatgttcaccaggatcatgtggccctggactggattgcgtgcccgaaggggacgccttagtgtgcgctgatccctgtcaggcacaccgaaccttagatgagtattggagatcaaccgaatacggggagggatacgcctgtgatactgatttacggggatggtataggtttgtcgggcaaggcggtgcacgcatggccgaaacttgtgtgccagttctgagatgtaataccgcagcacccatgtggctcaatggcacacacccttcgtctgacgagggcattgtttctcgtaaggcctgcgcccattggtctggccattgttgcctgtgggacgcctctgtccaggttaaggcctgtgccggagggtattatgtatacaatctcacggcaccccctgagtgccacctggcatactgcacggatccatcctcggtggagggcacttgtgaagaatgttcaattgatgaggactgcaaatccaacaatggaaggtggcactgtcagtgcaagcaagatttcaacatcacagacatttctctgctggagcaccgcttggaatgtggggcaaatgacatgaaggtttccctagggaagtgccagttaaaatccttaggtttcgataaagtttttatgtacttatcggactcacgctgctccggattcaatgatcgtgacaatagggattgggtttcggtggtgacaccagctcgagacgggccatgcggaaccgtgttgaccagaaatgaaacgcacgccacctacagcaacaccctttatcttgctgacgaaataatcatcagagatctgaatatcaaaattaacttcgcctgcagctatccactggacatgaaggtctccctaaaaactgctcttcagcccatggttagtgccctgaatatccgagtggggggaacggggatgtttaccgtacgaatggcgttgttccaaaccccgtcctacacacagccgtatcagggttcttctgtcacactctccaccgaggccttcctatacgtgggtaccatgctcgacggcggagatctgtctaggtttgccttgcttatgacgaattgttacgcaacacccagtagtaacgctacagatcctctgaagtatttcattattcaggatcgctgccctcacactagagatagtaccatccaggtggtagagaacggcgagagcagccagggtagattttcggtccagatgttcagatttgccggaaattacgatctagtctaccttcattgtgaagtgtatctttgtgatacaatgaacgagaaatgtaaaccaacctgctctggcacccgctttcgatccgggtctgtgatagaccagagtcgcgtgctgaatctgggacctattactcgcaagggtgtgcaggccactgtctctagggctttctcttctctgggcctgcttaaggtgtggttaccgttgcttttgtccgctactctcactctgaccttccagtag

SEQ ID NO: 343395 - DNA, 1857 bp, Artificial Sequence
  derived and/or modified sequence
atggggcagccctctctcacatggatgcttatggtcgtggtggccagttggtttattactaccgccgcaaccgacacttcggaagcccgttggtgttccgaatgtcactcaaacgcaacatgcactgaagacgaagccgtcaccacgtgcacatgccaggagggctttactggtgacggtctcacctgtgtggatctggacgaatgtgccatacctggcgcacataattgtagcgcaaatagctcttgtgttaatacacctgggtccttcagctgtgtctgtcccgaggggtttcgactgtctcccggactcggatgtactgacgtggacgagtgtgccgagcccggtctgtcgcattgccacgctctggccacttgcgtgaacgtggtgggatcctgcgggccaggccttgactgcgtccctgagggcgacgcgcttgtatgcgcagatccatgtcaggcgcatcgaacccttgacgaatactggagatcaaccgaatatggagaagggtatgcttgcgacacagacctgcgcggatggtaccggtttgtgggtcagggcggtgcgaggatggcagagacctgcgtgccagtgctccgatgtaatacagctgccccaatgtggctgaatggcacacaccccagttccgacgaggggatcgtgagcagaaaagcctgcgcgcattggtccggtcactgttgcctctgggacgcctccgtgcaggtaaaagcctgcgcgggagggtactatgtctataatctcaccgctcctcccgagtgccaccttgcatactgtaccgacccgtcatccgtggaaggcacttgtgaagaatgctctattgatgaggattgtaaatcaaacaacgggaggtggcattgtcagtgtaagcaggacttcaatattactgatatctccttgctggagcatcggctcgagtgcggcgctaatgatatgaaggtatctctcggaaaatgccagctgaagtccctggggttcgataaagtcttcatgtacctttcagatagcagatgctcaggatttaatgaccgggacaacagggactgggtaagtgttgtgacgcctgcacgggacgggccatgtgggaccgtcttgacaaggaatgagacccacgcaacttactccaacacactctacctggctgatgagattatcatccgggacctgaatattaaaatcaacttcgcttgttcttatccactggacatgaaagtgtccctgaagactgcgctgcagccaatggtcagcgcactgaacatcagggtcggtgggaccggcatgttcacagtgaggatggccctatttcaaacccctagctatacccagccttaccaagggtccagcgtgaccctgtccacagaggcctttctgtacgtgggtaccatgctggatggcggagacttatctagatttgccctccttatgacaaactgttacgcaacccccagctcaaacgccaccgaccccctgaaatatttcataattcaggaccgctgcccgcacacaagggattccacaatccaggttgttgaaaacggagagtcctctcaaggcagattctctgtgcagatgtttaggttcgccggtaattacgatctcgtgtatttgcattgtgaagtttatctttgtgacactatgaatgagaagtgcaaacccacctgctcaggaacgagattcagatctggttcagttatagatcagagcagagtcttgaacctcggtccaatcacgcgaaagggcgtacaggccaccgtgagcagggcatttagtagcctcggattgctgaaggtgtggctgcctctgttattaagcgccaccctcaccttgaccttccagtag

SEQ ID NO: 343396 - DNA, 2251 bp, Artificial Sequence
  derived and/or modified sequence
agactaactctacctttctggcttcaggtgctatctagacctgaagtagcgggaagagcagaaaggatggggcagccatctctgacttggatgctgatggtggtggtggcctcttggttcatcacaactgcagccactgacacctcagaagcaagatggtgctctgaatgtcacagcaatgccacctgcacggaggatgaggccgttacgacgtgcacctgtcaggagggcttcaccggcgatggcctgacctgcgtggacctggatgagtgcgccattcctggagctcacaactgctccgccaacagcagctgcgtaaacacgccaggctccttctcctgcgtctgccccgaaggcttccgcctgtcgcccggtctcggctgcacagacgtggatgagtgcgctgagcctgggcttagccactgccacgccctggccacatgtgtcaatgtggtgggcagctacttgtgcgtatgccccgcgggctaccggggggatggatggcactgtgagtgctccccgggctcctgcgggccggggttggactgcgtgcccgagggcgacgcgctcgtgtgcgcggatccgtgccaggcgcaccgcaccctggacgagtactggcgcagcaccgagtacggggagggctacgcctgcgacacggacctgcgcggctggtaccgcttcgtgggccagggcggtgcgcgcatggccgagacctgcgtgccagtcctgcgctgcaacacggccgcccccatgtggctcaatggcacgcatccgtccagcgacgagggcatcgtgagccgcaaggcctgcgcgcactggagcggccactgctgcctgtgggatgcgtccgtccaggtgaaggcctgtgccggcggctactacgtctacaacctgacagcgccccccgagtgtcacctggcgtactgcacagaccccagctccgtggaggggacgtgtgaggagtgcagtatagacgaggactgcaaatcgaataatggcagatggcactgccagtgcaaacaggacttcaacatcactgatatctccctcctggagcacaggctggaatgtggggccaatgacatgaaggtgtcgctgggcaagtgccagctgaagagtctgggcttcgacaaggtcttcatgtacctgagtgacagccggtgctcgggcttcaatgacagagacaaccgggactgggtgtctgtagtgaccccagcccgggatggcccctgtgggacagtgttgacgaggaatgaaacccatgccacttacagcaacaccctctacctggcagatgagatcatcatccgtgacctcaacatcaaaatcaactttgcatgctcctaccccctggacatgaaagtcagcctgaagaccgccctacagccaatggtcagtgctctaaacatcagagtgggcgggaccggcatgttcaccgtgcggatggcgctcttccagaccccttcctacacgcagccctaccaaggctcctccgtgacactgtccactgaggcttttctctacgtgggcaccatgttggatgggggcgacctgtcccgatttgcactgctcatgaccaactgctatgccacacccagtagcaatgccacggaccccctgaagtacttcatcatccaggacagatgcccacacactagagactcaactatccaagtggtggagaatggggagtcctcccagggccgattttccgtccagatgttccggtttgctggaaactatgacctagtctacctgcactgtgaagtctatctctgtgacaccatgaatgaaaagtgcaagcctacctgctctgggaccagattccgaagtgggagtgtcatagatcaatcccgtgtcctgaacttgggtcccatcacacggaaaggtgtccaggccacagtctcaagggcttttagcagcttggggctcctgaaagtctggctgcctctgcttctctcggccaccttgaccctgacttttcagtgactgacagcggaaagccctgtgctccatggctgccatctcacctcctgctgggcagggggcatgatgcgggccagtgctccagccacagaaaagaaagttcatgctttgttcagcctgccttcttttctcccttttaatcctggctgtcgagaaacagcctgtgtctttaaatgctgctttttctcaaaatgggacttgtgacggtgtacctgaggcccccatctccttaaagagtgtggcaaaataatgatttttaaatctc

SEQ ID NO: 343397 - DNA, 2180 bp, Artificial Sequence
  derived and/or modified sequence
aactctacctttctggcttcaggtgctatctagacctgaagtagcgggaagagcagaaaggatggggcagccatctctgacttggatgctgatggtggtggtggcctcttggttcatcacaactgcagccactgacacctcagaagcaagatggtgctctgaatgtcacagcaatgccacctgcacggaggatgaggccgttacgacgtgcacctgtcaggagggcttcaccggcgatggcctgacctgcgtggacctggatgagtgcgccattcctggagctcacaactgctccgccaacagcagctgcgtaaacacgccaggctccttctcctgcgtctgccccgaaggcttccgcctgtcgcccggtctcggctgcacagacgtggatgagtgcgctgagcctgggcttagccactgccacgccctggccacatgtgtcaatgtggtgggctcctgcgggccggggttggactgcgtgcccgagggcgacgcgctcgtgtgcgcggatccgtgccaggcgcaccgcaccctggacgagtactggcgcagcaccgagtacggggagggctacgcctgcgacacggacctgcgcggctggtaccgcttcgtgggccagggcggtgcgcgcatggccgagacctgcgtgccagtcctgcgctgcaacacggccgcccccatgtggctcaatggcacgcatccgtccagcgacgagggcatcgtgagccgcaaggcctgcgcgcactggagcggccactgctgcctgtgggatgcgtccgtccaggtgaaggcctgtgccggcggctactacgtctacaacctgacagcgccccccgagtgtcacctggcgtactgcacagaccccagctccgtggaggggacgtgtgaggagtgcagtatagacgaggactgcaaatcgaataatggcagatggcactgccagtgcaaacaggacttcaacatcactgatatctccctcctggagcacaggctggaatgtggggccaatgacatgaaggtgtcgctgggcaagtgccagctgaagagtctgggcttcgacaaggtcttcatgtacctgagtgacagccggtgctcgggcttcaatgacagagacaaccgggactgggtgtctgtagtgaccccagcccgggatggcccctgtgggacagtgttgacgaggaatgaaacccatgccacttacagcaacaccctctacctggcagatgagatcatcatccgtgacctcaacatcaaaatcaactttgcatgctcctaccccctggacatgaaagtcagcctgaagaccgccctacagccaatggtcagtgctctaaacatcagagtgggcgggaccggcatgttcaccgtgcggatggcgctcttccagaccccttcctacacgcagccctaccaaggctcctccgtgacactgtccactgaggcttttctctacgtgggcaccatgttggatgggggcgacctgtcccgatttgcactgctcatgaccaactgctatgccacacccagtagcaatgccacggaccccctgaagtacttcatcatccaggacagatgcccacacactagagactcaactatccaagtggtggagaatggggagtcctcccagggccgattttccgtccagatgttccggtttgctggaaactatgacctagtctacctgcactgtgaagtctatctctgtgacaccatgaatgaaaagtgcaagcctacctgctctgggaccagattccgaagtgggagtgtcatagatcaatcccgtgtcctgaacttgggtcccatcacacggaaaggtgtccaggccacagtctcaagggcttttagcagcttggggctcctgaaagtctggctgcctctgcttctctcggccaccttgaccctgacttttcagtgactgacagcggaaagccctgtgctccatggctgccatctcacctcctgctgggcagggggcatgatgcgggccagtgctccagccacagaaaagaaagttcatgctttgttcagcctgccttcttttctcccttttaatcctggctgtcgagaaacagcctgtgtctttaaatgctgctttttctcaaaatgggacttgtgacggtgtacctgaggcccccatctccttaaagagtgtggcaaaataatgatttttaaatctc

SEQ ID NO: 343398 - DNA, 2315 bp, Artificial Sequence
  derived and/or modified sequence
agactaactctacctttctggcttcaggacaccagacatcagagacagagagaaaaattcaaagggccaacccgtctttcctttgggcaggtgctatctagacctgaagtagcgggaagagcagaaaggatggggcagccatctctgacttggatgctgatggtggtggtggcctcttggttcatcacaactgcagccactgacacctcagaagcaagatggtgctctgaatgtcacagcaatgccacctgcacggaggatgaggccgttacgacgtgcacctgtcaggagggcttcaccggcgatggcctgacctgcgtggacctggatgagtgcgccattcctggagctcacaactgctccgccaacagcagctgcgtaaacacgccaggctccttctcctgcgtctgccccgaaggcttccgcctgtcgcccggtctcggctgcacagacgtggatgagtgcgctgagcctgggcttagccactgccacgccctggccacatgtgtcaatgtggtgggcagctacttgtgcgtatgccccgcgggctaccggggggatggatggcactgtgagtgctccccgggctcctgcgggccggggttggactgcgtgcccgagggcgacgcgctcgtgtgcgcggatccgtgccaggcgcaccgcaccctggacgagtactggcgcagcaccgagtacggggagggctacgcctgcgacacggacctgcgcggctggtaccgcttcgtgggccagggcggtgcgcgcatggccgagacctgcgtgccagtcctgcgctgcaacacggccgcccccatgtggctcaatggcacgcatccgtccagcgacgagggcatcgtgagccgcaaggcctgcgcgcactggagcggccactgctgcctgtgggatgcgtccgtccaggtgaaggcctgtgccggcggctactacgtctacaacctgacagcgccccccgagtgtcacctggcgtactgcacagaccccagctccgtggaggggacgtgtgaggagtgcagtatagacgaggactgcaaatcgaataatggcagatggcactgccagtgcaaacaggacttcaacatcactgatatctccctcctggagcacaggctggaatgtggggccaatgacatgaaggtgtcgctgggcaagtgccagctgaagagtctgggcttcgacaaggtcttcatgtacctgagtgacagccggtgctcgggcttcaatgacagagacaaccgggactgggtgtctgtagtgaccccagcccgggatggcccctgtgggacagtgttgacgaggaatgaaacccatgccacttacagcaacaccctctacctggcagatgagatcatcatccgtgacctcaacatcaaaatcaactttgcatgctcctaccccctggacatgaaagtcagcctgaagaccgccctacagccaatggtcagtgctctaaacatcagagtgggcgggaccggcatgttcaccgtgcggatggcgctcttccagaccccttcctacacgcagccctaccaaggctcctccgtgacactgtccactgaggcttttctctacgtgggcaccatgttggatgggggcgacctgtcccgatttgcactgctcatgaccaactgctatgccacacccagtagcaatgccacggaccccctgaagtacttcatcatccaggacagatgcccacacactagagactcaactatccaagtggtggagaatggggagtcctcccagggccgattttccgtccagatgttccggtttgctggaaactatgacctagtctacctgcactgtgaagtctatctctgtgacaccatgaatgaaaagtgcaagcctacctgctctgggaccagattccgaagtgggagtgtcatagatcaatcccgtgtcctgaacttgggtcccatcacacggaaaggtgtccaggccacagtctcaagggcttttagcagcttggggctcctgaaagtctggctgcctctgcttctctcggccaccttgaccctgacttttcagtgactgacagcggaaagccctgtgctccatggctgccatctcacctcctgctgggcagggggcatgatgcgggccagtgctccagccacagaaaagaaagttcatgctttgttcagcctgccttcttttctcccttttaatcctggctgtcgagaaacagcctgtgtctttaaatgctgctttttctcaaaatgggacttgtgacggtgtacctgaggcccccatctccttaaagagtgtggcaaaataatgatttttaaatctca

SEQ ID NO: 343399 - DNA, 2290 bp, Artificial Sequence
  derived and/or modified sequence
caggacaccagacatcagagacagagagaaaaattcaaagggccaacccgtctttcctttgggcaggtgctatctagacctgaagtagcgggaagagcagaaaggatggggcagccatctctgacttggatgctgatggtggtggtggcctcttggttcatcacaactgcagccactgacacctcagaagcaagatggtgctctgaatgtcacagcaatgccacctgcacggaggatgaggccgttacgacgtgcacctgtcaggagggcttcaccggcgatggcctgacctgcgtggacctggatgagtgcgccattcctggagctcacaactgctccgccaacagcagctgcgtaaacacgccaggctccttctcctgcgtctgccccgaaggcttccgcctgtcgcccggtctcggctgcacagacgtggatgagtgcgctgagcctgggcttagccactgccacgccctggccacatgtgtcaatgtggtgggcagctacttgtgcgtatgccccgcgggctaccggggggatggatggcactgtgagtgctccccgggctcctgcgggccggggttggactgcgtgcccgagggcgacgcgctcgtgtgcgcggatccgtgccaggcgcaccgcaccctggacgagtactggcgcagcaccgagtacggggagggctacgcctgcgacacggacctgcgcggctggtaccgcttcgtgggccagggcggtgcgcgcatggccgagacctgcgtgccagtcctgcgctgcaacacggccgcccccatgtggctcaatggcacgcatccgtccagcgacgagggcatcgtgagccgcaaggcctgcgcgcactggagcggccactgctgcctgtgggatgcgtccgtccaggtgaaggcctgtgccggcggctactacgtctacaacctgacagcgccccccgagtgtcacctggcgtactgcacagaccccagctccgtggaggggacgtgtgaggagtgcagtatagacgaggactgcaaatcgaataatggcagatggcactgccagtgcaaacaggacttcaacatcactgatatctccctcctggagcacaggctggaatgtggggccaatgacatgaaggtgtcgctgggcaagtgccagctgaagagtctgggcttcgacaaggtcttcatgtacctgagtgacagccggtgctcgggcttcaatgacagagacaaccgggactgggtgtctgtagtgaccccagcccgggatggcccctgtgggacagtgttgacgaggaatgaaacccatgccacttacagcaacaccctctacctggcagatgagatcatcatccgtgacctcaacatcaaaatcaactttgcatgctcctaccccctggacatgaaagtcagcctgaagaccgccctacagccaatggtcagtgctctaaacatcagagtgggcgggaccggcatgttcaccgtgcggatggcgctcttccagaccccttcctacacgcagccctaccaaggctcctccgtgacactgtccactgaggcttttctctacgtgggcaccatgttggatgggggcgacctgtcccgatttgcactgctcatgaccaactgctatgccacacccagtagcaatgccacggaccccctgaagtacttcatcatccaggacagatgcccacacactagagactcaactatccaagtggtggagaatggggagtcctcccagggccgattttccgtccagatgttccggtttgctggaaactatgacctagtctacctgcactgtgaagtctatctctgtgacaccatgaatgaaaagtgcaagcctacctgctctgggaccagattccgaagtgggagtgtcatagatcaatcccgtgtcctgaacttgggtcccatcacacggaaaggtgtccaggccacagtctcaagggcttttagcagcttggggctcctgaaagtctggctgcctctgcttctctcggccaccttgaccctgacttttcagtgactgacagcggaaagccctgtgctccatggctgccatctcacctcctgctgggcagggggcatgatgcgggccagtgctccagccacagaaaagaaagttcatgctttgttcagcctgccttcttttctcccttttaatcctggctgtcgagaaacagcctgtgtctttaaatgctgctttttctcaaaatgggacttgtgacggtgtacctgaggcccccatctccttaaagagtgtggcaaaataatgatttttaaatctc

SEQ ID NO: 343400 - protein, 619 aa, Artificial Sequence [sequence omitted]

SEQ ID NO: 343401 - protein, 108 aa, Artificial Sequence
  derived and/or modified sequence
MEVEAAEARSPAPGYKRSGRRYKCVSCTKTFPNAPRAARHAATHGPADCSEEVAEVPHRRAPLPLLRVREELLPLILAHVPPAHPRGTEALPLPGLRQGLHAAQFLPE

SEQ ID NO: 343402 - protein, 92 aa, Artificial Sequence
  derived and/or modified sequence
MEVEAAEARSPAPGYKRSGRRYKCVSCTKTFPNAPRAARHAATHGPADCSEEVAEVKPKPETEAKAEEASGEKVSGSAAKPRPYACPLCPKA

SEQ ID NO: 343403 - protein, 642 aa, Artificial Sequence
  derived and/or modified sequence
MSEPGMLGRKDVWVPRETPFTKAMEVEAAEARSPAPGYKRSGRRYKCVSCTKTFPNAPRAARHAATHGPADCSEEVAEVKPKPETEAKAEEASGEKVSGSAAKPRPYACPLCPKAYKTAPELRSHGRSHTGEKPFPCPECGRRFMQPVCLRVHLASHAGELPFRCAHCPKAYGALSKLKIHQRGHTGERPYACADCGKSFADPSVFRKHRRTHAGLRPYSCERCGKAYAELKDLRNHERSHTGERPFLCSECGKSFSRSSSLTCHQRIHAAQKPYRCPACGKGFTQLSSYQSHERTHSGEKPFLCPRCGRMFSDPSSFRRHQRAHEGVKPYHCEKCGKDFRQPADLAMHRRVHTGDRPFKCLQCDKTFVASWDLKRHALVHSGQRPFRCEECGRAFAERASLTKHSRVHSGERPFHCNACGKSFVVSSSLRKHERTHRSSEAAGVPPAQELVVGLALPVGVAGESSAAPAAGAGLGDPPAGLLGLPPESGGVMATQWQVVGMTVEHVECQDAGVREAPGPLEGAGEAGGEEADEKPPQFVCRECKETFSTMTLLRRHERSHPELRPFPCTQCGKSFSDRAGLRKHSRTHSSVRPYTCPHCPKAFLSASDLRKHERTHPVPMGTPTPLEPLVALLGMPEEGPA

SEQ ID NO: 343404 - DNA, 1860 bp, Artificial Sequence
  derived and/or modified sequence
atggaggtggaggccgccgaggccagaagccccgcccccggctacaagagaagcggcagaagatacaagtgcgtgagctgcaccaagaccttccccaacgcccccagagccgccagacacgccgccacccacggccccgccgactgcagcgaggaggtggccgaggtgaagcccaagcccgagaccgaggccaaggccgaggaggccagcggcgagaaggtgagcggcagcgccgccaagcccagaccctacgcctgccccctgtgccccaaggcctacaagaccgcccccgagctgagaagccacggcagaagccacaccggcgagaagcccttcccctgccccgagtgcggcagaagattcatgcagcccgtgtgcctgagagtgcacctggccagccacgccggcgagctgcccttcagatgcgcccactgccccaaggcctacggcgccctgagcaagctgaagatccaccagagaggccacaccggcgagagaccctacgcctgcgccgactgcggcaagagcttcgccgaccccagcgtgttcagaaagcacagaagaacccacgccggcctgagaccctacagctgcgagagatgcggcaaggcctacgccgagctgaaggacctgagaaaccacgagagaagccacaccggcgagagacccttcctgtgcagcgagtgcggcaagagcttcagcagaagcagcagcctgacctgccaccagagaatccacgccgcccagaagccctacagatgccccgcctgcggcaagggcttcacccagctgagcagctaccagagccacgagagaacccacagcggcgagaagcccttcctgtgccccagatgcggcagaatgttcagcgaccccagcagcttcagaagacaccagagagcccacgagggcgtgaagccctaccactgcgagaagtgcggcaaggacttcagacagcccgccgacctggccatgcacagaagagtgcacaccggcgacagacccttcaagtgcctgcagtgcgacaagaccttcgtggccagctgggacctgaagagacacgccctggtgcacagcggccagagacccttcagatgcgaggagtgcggcagagccttcgccgagagagccagcctgaccaagcacagcagagtgcacagcggcgagagacccttccactgcaacgcctgcggcaagagcttcgtggtgagcagcagcctgagaaagcacgagagaacccacagaagcagcgaggccgccggcgtgccccccgcccaggagctggtggtgggcctggccctgcccgtgggcgtggccggcgagagcagcgccgcccccgccgccggcgccggcctgggcgacccccccgccggcctgctgggcctgccccccgagagcggcggcgtgatggccacccagtggcaggtggtgggcatgaccgtggagcacgtggagtgccaggacgccggcgtgagagaggcccccggccccctggagggcgccggcgaggccggcggcgaggaggccgacgagaagcccccccagttcgtgtgcagagagtgcaaggagaccttcagcaccatgaccctgctgagaagacacgagagaagccaccccgagctgagacccttcccctgcacccagtgcggcaagagcttcagcgacagagccggcctgagaaagcacagcagaacccacagcagcgtgagaccctacacctgcccccactgccccaaggccttcctgagcgccagcgacctgagaaagcacgagagaacccaccccgtgcccatgggcacccccacccccctggagcccctggtggccctgctgggcatgcccgaggagggccccgcctag

SEQ ID NO: 343405 - DNA, 1929 bp, Artificial Sequence
  derived and/or modified sequence
atgagcgagcccggcatgctgggcagaaaggacgtgtgggtgcccagagagacccccttcaccaaggccatggaggtggaggccgccgaggccagaagccccgcccccggctacaagagaagcggcagaagatacaagtgcgtgagctgcaccaagaccttccccaacgcccccagagccgccagacacgccgccacccacggccccgccgactgcagcgaggaggtggccgaggtgaagcccaagcccgagaccgaggccaaggccgaggaggccagcggcgagaaggtgagcggcagcgccgccaagcccagaccctacgcctgccccctgtgccccaaggcctacaagaccgcccccgagctgagaagccacggcagaagccacaccggcgagaagcccttcccctgccccgagtgcggcagaagattcatgcagcccgtgtgcctgagagtgcacctggccagccacgccggcgagctgcccttcagatgcgcccactgccccaaggcctacggcgccctgagcaagctgaagatccaccagagaggccacaccggcgagagaccctacgcctgcgccgactgcggcaagagcttcgccgaccccagcgtgttcagaaagcacagaagaacccacgccggcctgagaccctacagctgcgagagatgcggcaaggcctacgccgagctgaaggacctgagaaaccacgagagaagccacaccggcgagagacccttcctgtgcagcgagtgcggcaagagcttcagcagaagcagcagcctgacctgccaccagagaatccacgccgcccagaagccctacagatgccccgcctgcggcaagggcttcacccagctgagcagctaccagagccacgagagaacccacagcggcgagaagcccttcctgtgccccagatgcggcagaatgttcagcgaccccagcagcttcagaagacaccagagagcccacgagggcgtgaagccctaccactgcgagaagtgcggcaaggacttcagacagcccgccgacctggccatgcacagaagagtgcacaccggcgacagacccttcaagtgcctgcagtgcgacaagaccttcgtggccagctgggacctgaagagacacgccctggtgcacagcggccagagacccttcagatgcgaggagtgcggcagagccttcgccgagagagccagcctgaccaagcacagcagagtgcacagcggcgagagacccttccactgcaacgcctgcggcaagagcttcgtggtgagcagcagcctgagaaagcacgagagaacccacagaagcagcgaggccgccggcgtgccccccgcccaggagctggtggtgggcctggccctgcccgtgggcgtggccggcgagagcagcgccgcccccgccgccggcgccggcctgggcgacccccccgccggcctgctgggcctgccccccgagagcggcggcgtgatggccacccagtggcaggtggtgggcatgaccgtggagcacgtggagtgccaggacgccggcgtgagagaggcccccggccccctggagggcgccggcgaggccggcggcgaggaggccgacgagaagcccccccagttcgtgtgcagagagtgcaaggagaccttcagcaccatgaccctgctgagaagacacgagagaagccaccccgagctgagacccttcccctgcacccagtgcggcaagagcttcagcgacagagccggcctgagaaagcacagcagaacccacagcagcgtgagaccctacacctgcccccactgccccaaggccttcctgagcgccagcgacctgagaaagcacgagagaacccaccccgtgcccatgggcacccccacccccctggagcccctggtggccctgctgggcatgcccgaggagggccccgcctag

SEQ ID NO: 343406 - DNA, 1860 bp, Artificial Sequence
  derived and/or modified sequence
atggaagtggaagccgccgaagctagatctcccgcccctggctataagcgctctgggagacgttacaagtgtgtctcttgcaccaagacgtttcccaacgcccctagggccgcacgccacgcagcaacgcatgggccggccgattgttctgaagaagtggcagaggtgaagccgaagcccgagaccgaggccaaggccgaggaagcgtccggggagaaagtgtccggctcagcagctaagcccaggccttatgcgtgtcccctctgcccgaaggcatacaaaaccgcgccagagctcagatcacatggccgctctcataccggcgagaagcccttcccgtgccctgagtgcggtcgcaggttcatgcagccggtgtgcctccgcgtccatctggcctcacacgccggagagctgcccttccgctgcgctcactgccctaaagcctacggtgcgctcagcaagctgaaaattcaccagcgaggacacacaggagaacgcccatacgcttgtgctgactgtggaaaatcctttgccgatccgagcgttttcaggaaacaccggcggacacacgcaggcctgcgaccttactcatgcgagcgatgcggcaaggcatacgctgaactcaaagatcttcggaatcacgaaaggagccacacaggcgagagaccatttttgtgctctgagtgcgggaaaagcttctccaggtctagcagtttgacctgtcaccaacggatccacgccgcccaaaagccatatcgttgccctgcctgcgggaagggtttcacccaactgtcctcgtaccagagccacgaacgaacgcattcaggagaaaaaccatttctctgtccccgatgtggcagaatgttttccgatccctcatctttccgccgccatcaaagggcacacgaaggggtgaaaccataccactgtgagaaatgtggcaaagatttccggcagccggcggacctggcgatgcaccgccgggtgcatacaggggatcggccatttaagtgtctccagtgtgataagacctttgtagcatcttgggaccttaagcgtcatgccctggttcatagtggtcaaaggcctttccggtgtgaagagtgtggtcgggccttcgccgaacgcgcctccttaacaaagcacagcagagtgcacagtggcgaacggccttttcactgtaatgcttgcggcaaatcctttgtcgtctccagcagcctgcggaagcacgagagaacacacaggtccagcgaggccgccggcgttcctcccgcccaggagctagtagtaggcttagcccttcctgtgggggttgctggggagagttccgctgctcctgcggccggagcaggtcttggagaccctccagcagggctcttaggcttgccccccgaaagcggaggggtgatggccacccagtggcaggtagttgggatgacagtggagcatgtggagtgtcaggatgcaggcgtgcgggaagctccaggcccactggagggcgccggcgaagccggtggggaggaagccgacgaaaagcctccacagttcgtgtgtagagagtgcaaagagactttcagtactatgaccctcctcaggcggcatgaacggtcgcatcccgaattgcgcccctttccatgtactcagtgtgggaagagcttttctgatagagcaggcctgcgcaaacacagccgcactcacagcagcgttcgtccatacacctgcccacactgtcctaaagctttcttaagcgcgtcagacctgcgcaagcacgagagaacccaccccgtacccatgggtacacccacccctcttgagcccctcgttgcgcttctcggaatgccagaagaaggacccgcttag

SEQ ID NO: 343407 - DNA, 1860 bp, Artificial Sequence
  derived and/or modified sequence
atggaagttgaagctgcagaagccagaagtcctgctccaggttataagaggtctgggagacgatataagtgtgtttcctgcacaaaaactttcccgaacgccccccgagccgcccgtcacgctgctacccacgggcccgctgactgctctgaggaggtcgccgaagtgaagccaaagccggaaaccgaagctaaagccgaagaggctagcggagaaaaggtgagcggaagtgctgcgaaacctcggccctatgcctgccccctatgtccaaaggcatacaaaactgccccagagctgcgcagccacgggaggagtcacaccggcgaaaaaccctttccatgtcccgagtgcgggcgtagatttatgcaacctgtatgtcttagagtgcatttggctagccatgccggagagctcccatttcggtgcgctcattgcccaaaagcgtatggcgctctgtccaagctgaagatccaccaacgcgggcacacgggagaaagaccatatgcttgtgcggattgtggcaaaagctttgcagatccgtctgtcttcaggaagcaccgcagaactcatgcgggtctgcgcccttacagctgcgagcggtgtggaaaagcgtatgctgaactgaaggacctccgcaatcacgaacgcagccataccggtgaaaggccttttctttgtagcgaatgcggaaaaagcttcagccggagcagtagcctcacttgtcatcagagaatccacgccgcacagaagccatataggtgcccagcctgcgggaaagggttcacccagctgtccagttaccagagccacgaacgcacacactccggagagaaaccttttttgtgcccgagatgcggaaggatgtttagtgatccctcctcattcagacggcaccaaagggcgcacgagggggtgaaaccttatcactgcgaaaagtgcggaaaggacttcaggcagcctgccgatctcgcaatgcaccggcgagttcatactggcgataggccattcaagtgtttgcagtgcgacaaaacatttgttgccagctgggatctcaagcgtcacgccttggtgcacagtgggcaacgcccttttcggtgcgaggagtgtggcagagcattcgctgagcgggcgtccttgactaaacactcgagagtgcattcaggcgagaggcccttccactgcaacgcatgcggaaagtcttttgtcgtaagtagcagcctgcgcaaacatgagaggacccataggtctagtgaggccgcgggagttcccccagctcaggaactggttgtagggctagctctgcctgtcggagtggcaggcgagagctcagctgcccctgccgctggcgccggattgggcgacccacccgccggcctcctggggctgcctccagagagcggaggcgtgatggctacccaatggcaggtggtggggatgacggtcgaacacgtggaatgtcaggacgcgggcgtgcgggaagcccctggccccctcgagggggctggcgaagctgggggcgaggaagccgacgaaaagcctccccagttcgtatgccgggagtgtaaggagaccttttcgaccatgaccctcctcaggcggcatgaaagatcccaccccgaacttcgcccttttccatgtactcaatgcggcaagagcttctccgatcgcgccggcctgaggaagcatagccgaacccatagctcagtgcgaccatacacatgtcctcactgtcctaaagctttcctatctgcctccgacctgaggaagcatgagcggacacacccggtccccatggggacacctacacccctggagccgctcgtggccctcctcggcatgcctgaagaaggcccagcttag

SEQ ID NO: 343408 - DNA, 1860 bp, Artificial Sequence
  derived and/or modified sequence
atggaagtggaggccgccgaggcacgctcacccgcccctgggtataagcggtcagggcgtagatataaatgcgtctcctgcactaagacctttcccaacgcgccgagggccgcaaggcacgctgcgacgcatgggcccgccgactgttcggaggaagtcgccgaggtaaagccaaagcccgagacagaggccaaggctgaagaggcatcaggagaaaaagtgtccggcagcgcggctaagccccgcccgtatgcatgtcctctctgcccaaaagcttacaaaactgctcctgaactgcggagtcacggtagaagccataccggggaaaagccttttccttgtccagaatgcggccggcgatttatgcagccggtgtgcctgagggttcatctggcatctcatgcaggagagttgccatttaggtgcgcccactgcccaaaggcatatggcgccctctccaagttaaagattcatcagagaggccacactggcgaaaggccttacgcctgtgctgactgcggaaagagttttgcagatcccagcgtgttccggaaacaccgaaggactcacgccggtctcaggccatactcctgtgaaaggtgtggcaaagcctacgccgagcttaaggacctccgaaaccacgaacgctcacataccggcgaacgcccatttctctgttcggaatgtgggaagtctttctcacggtcatcctccttgacttgccaccaacgaatccacgccgctcagaaaccatatagatgtccagcctgcggcaagggatttacgcaacttagctcttaccagtctcacgagcgcacacattccggggagaagcccttcctgtgtccccgctgcggaaggatgttctcagatccgtcctctttccgtcggcatcagagggcccatgagggagttaaaccataccattgcgagaagtgtggaaaggatttcaggcagccggccgatctcgctatgcacaggcgggtacataccggggatcggcccttcaagtgtctgcagtgcgataagacgtttgtggcttcatgggatctgaaacgccatgccctcgtgcattccggacagagaccatttagatgcgaggaatgcggccgggccttcgctgagcgcgccagccttacaaagcacagcagagtacactctggagaaaggcccttccactgcaacgcttgcgggaaatccttcgttgtatctagcagcttgcgaaagcatgagcgcactcatcggagcagcgaagcagcaggcgtccctcccgcccaggagttggtggtgggtctggcattacccgtgggtgttgccggcgagtcctccgctgctccggcggccggcgccgggctaggggacccccctgccggcctgctgggcttgccacctgagtcgggaggcgtgatggcaactcaatggcaagtggtaggcatgacggtcgagcacgttgagtgtcaggatgcaggggtacgcgaagcacctgggccactggagggtgctggggaggcggggggcgaggaggccgacgagaaaccaccacagttcgtgtgcagagagtgcaaagagactttctcaaccatgaccctccttaggcgccacgaacgtagccacccagagctgcgaccttttccatgtacacagtgcggaaaatcattttctgaccgcgccggactgcggaaacactcacggactcactcttccgttaggccatatacttgccctcactgccccaaggcctttttatcagcctctgatctgcgaaagcacgaacgcactcacccagtgcccatgggcacacccactcctctcgaaccattagttgcactgttaggtatgcctgaagaaggccctgcatag

SEQ ID NO: 343409 - DNA, 1860 bp, Artificial Sequence
  derived and/or modified sequence
atggaagtggaggcagcagaggcccggagccccgctcccggatacaagagatctggacgaagatataaatgcgtgagttgcacaaaaactttcccaaacgcaccccgtgcggctcgtcacgctgctactcatggaccagccgattgcagcgaggaggtggcggaagttaagcctaagcctgagaccgaggccaaagcggaggaggccagtggcgaaaaggtatctggatcagccgccaaaccccgtccttatgcttgtccactgtgccccaaagcgtacaagacggccccagagctacgcagccacggtcgatcacacaccggcgaaaagcccttcccttgtccggaatgcggcaggcggtttatgcagcctgtgtgtctcagagtgcaccttgcctcacatgctggcgagctgccattccgttgcgctcactgccccaaggcatatggcgctcttagtaagttaaaaatccatcagcggggtcatacaggtgaacgcccttatgcatgcgccgattgtggtaaaagctttgccgacccaagtgtgttccgcaaacatcggaggactcacgccgggttacgcccatactcttgcgagcggtgtgggaaagcttatgctgaactgaaggacttacgaaatcacgaaaggtcccacaccggggagagacccttcctgtgttccgagtgcggaaagagcttttctaggtcctcgtctctgacatgtcaccagcgcatacacgcagcccagaaaccataccgctgcccagcatgcggcaaaggctttacgcagctgtctagctaccagagtcacgagaggacacactctggagagaaaccgtttttgtgccctcgctgtggcaggatgtttagcgatcccagcagtttcaggagacaccagcgggcacatgaaggggtcaagccctatcactgtgagaagtgtggtaaagattttaggcagcccgctgacctggcaatgcataggagagtccacacaggcgatcgccctttcaaatgtctccagtgcgataagacattcgttgccagctgggacctgaaacgacacgctctcgttcattcagggcagcgtcctttccggtgcgaagaatgtgggcgtgccttcgccgaacgagcatcactcaccaagcacagccgggtacactctggcgaaagaccattccactgtaatgcatgcggcaagtcattcgtggtcagcagctcactgaggaagcatgaaaggacccatagaagcagcgaggctgccggtgtgcctcctgcacaggaattggtagttggcttggccctacccgtcggggtggccggcgagagttcagctgcacctgccgctggagctgggctgggcgatcccccggctggcctgctaggcctccctcccgagagcggtggcgttatggcaacacagtggcaggtggtgggaatgactgttgaacatgttgagtgtcaggacgctggagtacgggaggcccccgggccactagaaggtgctggggaagctggaggcgaagaagccgacgaaaaaccgccacagtttgtgtgccgagagtgtaaggaaacattctccaccatgaccctgctgagaaggcacgaaaggtctcaccccgagctgagaccatttccctgtacgcagtgtggcaaaagcttctccgatagagctgggctgcggaagcactccaggacccacagttctgtgcgcccatatacttgcccgcactgcccaaaagccttccttagcgcaagcgatctaaggaagcacgagaggactcaccccgtgccaatggggactccgactccactcgagcccctagtggccctcctcgggatgccagaagaaggacccgcctag

SEQ ID NO: 343410 - DNA, 1929 bp, Artificial Sequence
  derived and/or modified sequence
atgagcgagccaggaatgctcgggaggaaggacgtctgggttccacgagaaacgccatttactaaggccatggaggtcgaggccgctgaggctcgtagccccgccccagggtataagaggtccgggcgcagatataaatgtgttagttgtaccaaaactttccctaacgcccctagggctgcccggcacgccgcaactcatggacccgcagactgctcagaggaggtggctgaggtcaaacccaagcctgaaactgaggcgaaagccgaagaagccagtggggagaaggtgtcgggatcggccgccaaaccccggccgtacgcttgcccgctctgccccaaagcttacaaaaccgctccggaactgaggagccatggcaggtctcacactggagagaaacctttcccttgcccggaatgtggtaggcggtttatgcaaccagtgtgccttcgggtgcatttggcctctcatgccggcgaattgccttttaggtgtgcacattgccctaaggcctatggggccctctcaaagctcaaaatccatcagcgcgggcatacaggggaaagaccgtatgcctgtgccgactgcggcaaatcattcgcagaccccagcgtcttccgcaagcatagaagaacccacgccggcctgcggccctactcatgcgagagatgtggtaaagcgtatgcggagttgaaggaccttcgcaaccacgaaaggagtcacacaggcgaaagaccctttctgtgtagcgagtgcggcaaaagcttctcaaggtcgtccagtcttacctgccatcagcggattcacgccgcacagaaaccttacaggtgtcctgcgtgtggaaaaggcttcacccaactctcgagttaccagtctcatgaacggacacattcaggagaaaaaccatttctgtgtccacgctgtggccgcatgttctcggatccatcttcgtttagacggcaccaaagagcccatgagggcgtcaagccctaccactgcgaaaagtgcggcaaagatttccgacagccggctgatctggctatgcaccggagggtgcacaccggagaccgtccattcaaatgcctgcagtgcgataagacctttgtcgcttcttgggacctgaagagacacgctcttgtccattctgggcagcggccatttagatgcgaagaatgtggcagggccttcgcggaaagggctagcctcaccaagcactcaagggtgcacagcggcgagcggccgtttcattgtaacgcctgcggtaagtcttttgtggtaagttcttcacttcgaaaacacgagcggacacatcggtcatcagaagcagcaggagtccctcctgcacaggagctggttgtcggactcgcgctgccagtgggggtggcaggggagagctcggctgcacccgccgcgggcgctgggctgggagatccaccggctggactgttaggacttccccctgagagcggaggcgtgatggcaacgcagtggcaggtggtcggtatgaccgtggaacacgtggagtgccaggatgctggagttcgagaggctcctggaccgctggaaggggccggggaagcaggcggcgaggaggccgatgaaaagccgccccagtttgtgtgcagagagtgcaaagagaccttctcaacgatgacgttactgcgacgccacgagcgcagtcatcccgaacttagacctttcccatgcacccaatgtggtaagtccttctcggaccgtgcgggcttgcgcaagcactccaggacacattcatcagtcaggccgtatacctgccctcactgccctaaagcctttctttcagcctctgatctcagaaagcatgagagaacccaccccgtgcccatgggtacccccacgccactcgagccattggttgctctcctggggatgccagaagaaggtccagcatag

SEQ ID NO: 343411 - DNA, 1860 bp, Artificial Sequence
  derived and/or modified sequence
atggaggtggaggccgctgaggcccggagccctgcccctggctacaagaggagcggccgccgctacaagtgtgtgtcctgcaccaagaccttccccaatgcccccagggctgcccggcatgctgccacccacggccctgctgactgcagcgaggaggtggccgaggtgaagcccaagccagagacagaggccaaggccgaggaggccagcggggagaaggtgtctggcagcgctgccaagccccggccctatgcctgccccctgtgccccaaggcctacaagacagcccctgagctgcggagccacggccgcagccacactggagagaagcccttcccctgcccagaatgtggccgccgcttcatgcagcctgtgtgcctgcgggtgcacctggccagccatgctggggagctgcccttccgctgtgcccactgccccaaggcctatggagccctgagcaagctgaagatccaccagaggggccacactggagagcggccctatgcctgtgccgactgtgggaagagctttgctgaccccagcgtcttcaggaagcacaggaggacccatgctggcctgcggccctacagctgtgagcgctgtgggaaggcctatgcagagctgaaggacctgaggaaccacgagaggagccacactggagagcggcccttcctgtgcagtgaatgtgggaagagcttcagccgcagcagcagcctgacctgccaccagagaattcatgctgcccagaagccctaccgctgcccagcctgtgggaagggcttcacccagctgagcagctaccagagccatgagaggacccacagcggggagaagcccttcctgtgcccccgctgtggccgcatgttcagtgaccccagcagcttccgccgccaccagagggcccacgagggcgtgaagccctaccactgtgagaagtgtgggaaggacttccggcagcctgctgacctggccatgcacagaagagtgcacactggagaccggcccttcaagtgcctgcagtgtgacaagacctttgtggcctcctgggacctgaagagacatgccctggtgcacagcggccagaggcccttccgctgtgaggagtgtggccgggcctttgctgagcgggccagcctgaccaagcacagccgggtgcacagcggggagcggcccttccactgcaatgcctgtgggaagagctttgtggtgagcagcagcctgaggaagcatgagaggacccacaggagcagcgaggccgccggcgtgcccccagcccaggagctggtggtgggcctggccctgcctgtgggcgtggccggggagagcagcgctgccccagctgctggggccggcctgggggaccccccagctggcctgctgggcctgcccccagagagcggcggcgtgatggccacccagtggcaggtggtgggcatgacagtggagcacgtggagtgccaggatgctggggtgcgggaggcccctggccccctggagggcgctggggaggccggcggggaggaggctgatgagaagccaccccagtttgtgtgccgggagtgcaaggagaccttcagcaccatgaccctgctgcggagacatgagaggagccaccctgagctgcggcccttcccctgcacccagtgtgggaagagcttcagtgacagagctggcctgaggaagcacagcaggacccacagctctgtgcggccctacacctgcccccactgccccaaggccttcctgagcgccagtgacctgaggaagcatgagaggacccaccctgtgcccatgggcacccccacccccctggagcccctggtggccctgctgggcatgcctgaggagggccctgcctag

SEQ ID NO: 343412 - DNA, 1929 bp, Artificial Sequence
  derived and/or modified sequence
atgtctgagcccggcatgctgggcaggaaggatgtgtgggtgccccgggagacccccttcaccaaggccatggaggtggaggccgctgaggcccggagccctgcccctggctacaagaggtctggaagacgctacaagtgtgtgtcctgcaccaagaccttccccaatgccccccgggccgcccggcatgctgccacccacggccctgctgactgcagcgaggaggtggccgaggtgaagcccaagccagagacagaggccaaggccgaggaggccagcggggagaaggtgtctggcagcgctgccaagccccggccctatgcctgccccctgtgccccaaggcctacaagacagcccctgagctgcggagccacggccgcagccacactggagagaagcccttcccctgcccagaatgtggccgccgcttcatgcagcctgtgtgcctgcgggtgcacctggccagccacgccggggagctgcccttccgctgtgcccactgccccaaggcctacggggccctgagcaagctgaagatccaccagaggggccacactggagagcggccctatgcctgtgccgactgtgggaagagctttgctgaccccagcgtcttcaggaagcacaggaggacccacgccggcctgcggccctacagctgtgagcgctgtgggaaggcctatgcagagctgaaggacctgagaaatcatgagaggagccacactggagagcggcccttcctgtgcagtgaatgtgggaagagcttcagccgcagcagcagcctgacctgccaccagagaattcatgctgcccagaagccctaccgctgcccagcctgtgggaagggcttcacccagctgagcagctaccagagccatgagaggacccacagcggggagaagcccttcctgtgcccccgctgtggccgcatgttcagtgaccccagcagcttcagaagacaccagagggcccatgaaggagtgaagccctaccactgtgagaagtgtgggaaggacttccggcagcctgctgacctggccatgcaccggcgggtgcacactggagaccggcccttcaagtgcctgcagtgtgacaagacctttgtggcctcctgggacctgaagagacatgccctggtgcacagcggccagaggcccttccgctgtgaagaatgtggccgggcctttgctgagcgggccagcctgaccaagcacagccgggtgcacagcggggagcggcccttccactgcaatgcctgtgggaagagctttgtggtgagcagcagcctgaggaagcatgagaggacccacaggagcagcgaggccgccggcgtgcccccagcccaggagctggtggtgggcctggccctgcctgtgggcgtggccggggagagcagcgctgccccagctgctggagctggcctgggggaccccccagctggcctgctgggcctgcccccagagagcggaggagtgatggccacccagtggcaggtggtgggcatgacagtggagcacgtggagtgccaggatgctggggtgcgggaggcccctggccccctggagggcgctggggaggccggcggggaggaggctgatgagaagccaccccagtttgtgtgccgggagtgcaaggagaccttcagcaccatgaccctgctgcggagacatgagaggagccaccctgagctgcggcccttcccctgcacccagtgtgggaagagcttcagtgaccgggccggcctgaggaagcacagcaggacccacagctctgtgcggccctacacctgcccccactgccccaaggccttcctgagcgccagtgacctgaggaagcatgagaggacccaccctgtgcccatgggcacccccacccccctggagcccctggtggccctgctgggcatgcctgaggagggccctgcctag

SEQ ID NO: 343413 - DNA, 1860 bp, Artificial Sequence
  derived and/or modified sequence
atggaggtggaggccgccgaggcccggagccccgcccccggctacaaaaggtccggacgcaggtataagtgcgtcagctgtacaaaaacattccccaacgccccacgcgccgcacgacatgcggcgacccacggtcctgccgattgtagcgaggaggtcgctgaggtgaagcccaaaccagagacagaggccaaggccgaggaggcgagcggcgaaaaagttagcggatccgcagccaaacctcggccttatgcttgccctctctgccccaaggcatacaagactgcacccgaactacgctcacatgggcgaagccacacaggggaaaaaccgttcccttgtcccgagtgcgggcggcgatttatgcagcccgtctgcttacgggtccatctggccagccatgctggcgagctaccttttcggtgtgctcattgccccaaggcctacggggccctctccaagcttaaaattcaccagaggggacataccggggagagaccttatgcctgcgctgattgtgggaaatcctttgctgacccgtccgtgtttcggaagcaccggaggactcatgctgggctcaggccttacagctgcgaaaggtgtggcaaagcctatgccgagctaaaggacctgaggaatcatgagagaagccacacaggagaaaggccattcttgtgttctgagtgcgggaagtcctttagtcgcagctcatccctcacctgtcaccagaggatacacgccgctcagaaaccttaccggtgccctgcctgcgggaaaggcttcacccagctgagctcctatcagagccacgaacgcacccactcgggggagaagccattcttatgtccccgctgtggtcggatgttctccgaccccagtagctttcgccggcatcaacgcgcgcacgaaggcgtaaagccataccattgcgaaaagtgcggcaaggactttaggcaacctgccgatctcgctatgcacagaagggtacacaccggtgaccgacctttcaaatgcctccaatgtgataaaactttcgtggcctcctgggacctgaaaagacacgccttagtccactctggtcagcggcccttcagatgcgaggagtgtggccgcgcattcgcagagagggcttccttaaccaaacactctagggtacacagcggggagagaccatttcactgtaatgcttgcggtaagtcttttgttgtttccagcagcctgagaaagcacgaaaggactcaccggagttcagaggcagctggcgtgccccctgcccaggagctggttgtgggcctcgcactgccagtaggggtggcaggcgaatcatctgcggcaccagccgctggagcagggttgggtgaccctccggctgggttgttaggcttgcccccggagagtggcggagtaatggctacccaatggcaggttgttgggatgacagtggagcatgtggagtgccaggacgctggtgtccgggaggcacccggccctttagagggtgctggcgaggccggcggcgaagaggccgatgaaaaaccaccacagttcgtctgtcgggaatgcaaggagaccttcagcacgatgacactgcttaggcggcatgaacgatcccacccagagctgcgcccatttccttgcacccaatgcggcaagagcttctccgatagggccggattgaggaagcactctcgcacacatagcagtgtgcgtccctacacatgtccacattgccccaaagcctttctttccgcgagcgacttgagaaagcatgaacggacccaccctgtgccaatgggcacccctactcctctcgagcctctagtcgccctgctgggtatgcctgaggaaggtccagcctag

SEQ ID NO: 343414 - DNA, 1860 bp, Artificial Sequence
  derived and/or modified sequence
atggaggtggaggccgccgaggcccggagccccgcccccggctacaagaggagcggtcggcggtataagtgcgtatcgtgtactaagaccttccctaatgcccctcgtgctgccaggcacgccgcaactcacggcccagccgactgcagcgaggaggttgcagaggtgaagcctaagcccgaaactgaggcaaaagcagaagaagcatcaggagagaaggtgtcgggctctgcagctaagccacgcccctacgcttgcccgctctgtccgaaggcatacaaaacggcccctgagcttagaagtcacgggcgatcccacactggtgaaaagcccttcccctgtccagaatgcggccgacgctttatgcagccagtgtgcttgcgcgtgcatctggcttctcacgctggagaattgccctttcggtgtgcccactgtcccaaagcttatggggccctgtccaagctgaagatccaccagagggggcacacaggcgagcggccttacgcctgcgcagactgtggaaagagcttcgccgatccatctgtgttcagaaagcacagaaggacacacgccggcctgcgcccatattcttgtgagagatgtggcaaagcctatgccgagcttaaggatctaaggaatcacgagaggagccatacaggggagcggcctttcctctgctccgaatgcggcaagtctttttcacgaagtagcagtctcacttgtcaccagaggatacatgcggcccaaaagccttaccgctgtccggcctgtggcaaaggcttcactcagctgtcgagctatcagagccatgagagaacgcactccggcgaaaaaccatttctctgtccccgctgcgggagaatgttttcagaccccagcagctttcgcaggcatcagcgggcccacgaaggggttaagccttaccactgtgaaaagtgtggcaaggacttcaggcaacctgctgatctggctatgcataggagggtgcataccggcgacaggccgttcaaatgcctgcagtgcgacaagacttttgtggcgtcctgggatctgaaaagacacgcattagtgcactccggacagaggccgtttaggtgtgaggagtgcgggcgggcattcgccgagcgcgcttctctcaccaagcattcacgcgttcattcgggagaaagaccattccattgtaacgcctgcggcaaatccttcgttgtgagttcatctctccgcaagcacgaacggacccacagatcaagcgaagctgctggcgttccacccgcccaggagctggtggtgggtcttgccctcccggttggggtggcaggcgagtcttcagccgctcctgctgcgggtgctggcctgggcgatccccccgccggactgctgggacttccccccgaaagtggcggagtaatggctacacagtggcaggtggtggggatgacagtggagcacgtggagtgccaggacgccggggtgcgcgaggctcccggtcccctggaaggggccggagaggcgggaggcgaagaggccgacgaaaagccacctcagttcgtttgtcgggaatgcaaagaaactttctcgaccatgacgctgctccgacgccatgaacggagtcatcccgaactccgccctttcccttgcacacagtgtggtaagtcgtttagtgaccgagcgggactgcgaaaacactccaggactcacagtagtgttaggccttatacctgtccccactgtccaaaggcatttctgtctgcttcggacttgcgcaaacacgagaggacccaccctgtgcctatgggaacaccaaccccactcgagcccctcgtcgcgctgctgggcatgcctgaagagggccccgcatag

SEQ ID NO: 343415 - DNA, 1860 bp, Artificial Sequence
  derived and/or modified sequence
atggaggtggaggccgccgaggcccggagccccgcccccggctacaaacggtcaggtcgcaggtataaatgtgtctcttgcaccaagaccttcccaaatgctccacgcgctgcccggcatgccgcaacccacggaccagcggattgttcagaagaggtcgcggaagttaagcccaaacccgagaccgaagcaaaggcagaggaggctagcggggagaaggtttcaggaagcgcagctaagcccaggccttatgcctgccccctgtgccccaaggcatataaaacagcaccagagctgaggtctcatggccgctctcacaccggcgaaaagccatttccatgcccagagtgtggaagacggttcatgcaacccgtatgtctcagagttcacctggcctcccatgccggcgagttaccttttcgctgcgcccactgccccaaagcttatggcgccctgtcaaaactgaagattcaccagcgcggacacaccggtgagcggccctacgcctgtgcagattgtggcaagtcgttcgcggacccgtccgtctttagaaaacacagaagaacccatgcaggccttcgaccctacagttgtgagcgatgcggaaaagcgtacgccgagctgaaagacctcagaaatcacgagcgcagccatacgggtgagcgccctttcctgtgttcagagtgcggaaaatcctttagcagatcgtcatccctcacctgccatcagaggatccatgcagcacagaaaccttataggtgtccagcctgtggcaaaggtttcacgcagctctcttcatatcagtcacatgagcggacccattccggcgagaagccattcctgtgtccacgttgcggacgcatgttcagcgatccctcctccttccgacgtcaccaacgggcccatgaaggggttaaaccataccattgtgaaaagtgcggcaaagactttaggcagcccgccgacctggcaatgcatcgtcgggtccatactggcgaccggccattcaaatgccttcagtgtgataagaccttcgtggctagctgggatctgaagcgacacgcgctggttcacagcggccagcgtccgttcaggtgcgaagagtgcggcagagcctttgccgagcgcgctagtttgacgaagcattctagagtgcactccggtgagcggccatttcactgcaacgcttgcgggaaatccttcgtggtctcttcaagcttgcgcaaacatgagcggacacacaggtcctcagaggccgccggcgtgcctccggcacaggaactcgtggtggggctggcactgccggtcggagtggcaggcgagtccagcgcggcacccgccgcaggggcaggcttgggagacccccccgcagggctactcggacttccgcccgagagcgggggtgtgatggctacacagtggcaggtggttggtatgactgtggaacacgtggaatgccaagatgcaggggtaagagaagctcctgggcccctggaaggggcaggcgaggccggcggcgaagaggccgatgaaaagcccccacagttcgtatgccgtgagtgtaaggagaccttctctacaatgactctgttaaggaggcacgaacggagccacccagagctgcgcccctttccctgcacccaatgtggtaagtcattctctgacagagctggcctccggaaacactctaggacccattcctcagtgcgcccgtacacttgtcctcactgcccgaaggcttttctgtccgcctcggacctgcgcaagcatgagcggacccacccggtgccgatggggacccccaccccactcgaacccctggtcgccctgctcggtatgccagaggaagggcccgcgtag

SEQ ID NO: 343416 - DNA, 1860 bp, Artificial Sequence
  derived and/or modified sequence
atggaggtggaggccgccgaggcccggagccccgcccccggctacaagagatccgggagacggtacaagtgtgttagttgcacaaaaaccttccctaatgcccctagagccgctcggcacgcggcaactcatggccccgccgattgctccgaagaggtcgctgaggtaaaacccaagcccgagactgaggcaaaagccgaagaggcgtcgggcgagaaggtatctggaagcgcagcgaaacctcggccatacgcatgccccctttgtccgaaagcatataaaactgcccccgaactgaggagccacgggagatcccacaccggggagaagccgtttccctgtccagagtgtggcagaagattcatgcagcctgtgtgcttgagagtgcatctagcttcccatgccggggaactccctttcagatgtgcccattgccctaaagcatacggcgccctgagcaagctgaaaatccatcagcgaggccatactggcgagcgcccttacgcttgcgccgactgcgggaagagtttcgccgaccctagcgttttcagaaagcacagaaggactcatgctgggctccgaccatatagctgtgagcggtgtggtaaagcatacgcagagttgaaggacctgaggaatcatgagagatctcacacaggtgaaaggccctttctgtgttccgagtgcggcaaaagctttagccggtcctcctccctgacctgtcatcagaggatacacgccgcacaaaaaccatacaggtgccccgcgtgtggcaaggggttcacacaactgtccagctaccagtcacatgaacggacccactccggcgagaagccatttctctgccccagatgtggtaggatgttctccgatcccagctctttccggagacaccagcgcgctcacgaaggcgtgaaaccgtatcattgcgaaaaatgcggcaaagatttccggcagccggcagatttagcaatgcaccgcagagtacacaccggagatcggccatttaaatgcctccaatgcgacaagaccttcgttgcctcatgggacctcaaaagacatgctctagtgcactccgggcagcgtccgtttcgctgcgaagagtgcgggagagcattcgctgagcgtgcctcgttgaccaagcattccagggtccactccggggagaggcccttccattgcaatgcctgtggtaagtctttcgtcgtttcgagtagtttgagaaagcatgagaggacgcaccgatcgtctgaggcagcaggcgtccctcctgcccaggaattggttgtgggcctcgccttacccgttggtgttgccggagagtcttctgcagcccctgccgcaggggctggccttggggatccgccagccgggctattaggactcccccctgaaagtggaggcgtaatggcaactcagtggcaggtcgttggcatgacagtggagcacgtagagtgccaggatgcaggggtgagagaggcaccaggccctttggagggggctggagaagccgggggtgaggaagctgatgagaagccacctcagtttgtttgccgggaatgtaaagaaactttctctaccatgacgctcctgcggcgccacgagcgcagccatcctgaactgcgcccattcccatgtacgcagtgtggtaagagtttttcagaccgagccggtctccgcaaacactccagaacccacagcagcgtgcggccatatacatgtccacattgcccaaaggcattcttgtcagcaagtgacctgagaaaacatgaacggacacaccccgtgccgatgggaacaccgactcccctggagccattagtggcgctacttgggatgcccgaagagggaccggcctag

SEQ ID NO: 343417 - DNA, 1929 bp, Artificial Sequence
  derived and/or modified sequence
atgagcgagcccggcatgctgggccggaaggacgtgtgggtgccccgggaaacgcctttcactaaagcaatggaagtggaggcggccgaggcgaggtcccccgcgcccgggtacaaaaggtcaggaaggcgttacaagtgcgtgtcttgcactaaaactttccccaatgctcccagagcggcaaggcacgccgcaacccacgggccagctgattgttcagaagaggtcgccgaagttaagcccaaacccgagacagaggcaaaagcggaagaggcatcgggcgagaaggtgtccggctcagccgccaaaccaaggccctatgcatgcccgttatgtcccaaagcctataaaaccgcgcctgaactgagatctcatggaagatctcacacaggcgaaaaaccatttccctgcccagagtgtgggcgccggtttatgcagcccgtctgcttaagagtgcatctggctagccacgccggagagcttcccttcaggtgtgcccattgtcccaaagcttacggggcgctgtctaagctgaaaatacaccagcgggggcatacgggagaaagaccgtatgcctgcgcggattgcggcaaatcattcgcagacccgtctgtcttcaggaaacacaggcgcacccacgcagggctgagaccttattcatgcgagcggtgtgggaaggcctatgccgaattgaaggatttacggaaccacgagagatcacacacaggggagcgcccgttcctgtgcagtgagtgtggaaagtctttcagtagatcatcaagcctgacttgccaccagcgcatccacgctgcacagaagccttaccggtgtcctgcctgtgggaaagggtttacccagcttagcagttatcagagtcacgagaggacacatagcggcgagaagccatttctgtgtcctcgttgcgggcggatgttttctgaccccagtagctttcgcagacatcagagggcccacgagggcgtcaaaccttaccattgcgagaagtgcggcaaagacttccggcaaccagcggacttggcaatgcatcgtcgcgtccacactggagacaggccctttaagtgtcttcagtgtgataaaactttcgtggcctcctgggacctgaaaagacacgctcttgtgcattccggccagagacctttccgctgcgaagaatgcggcagagcctttgctgagcgcgcctcattgactaaacacagccgtgtccactctggagagaggccttttcattgtaacgcgtgcggcaagtccttcgttgtttccagcagcttacgaaagcacgagcgtacccaccgttcatctgaagccgctggggtacctccagcacaagaactagttgtcgggttagctctgcctgtaggggtggccggcgaatcatcagccgctcccgccgccggagccggactgggagacccaccagccggactgctgggactgcctccagaatctggcggcgttatggcaactcaatggcaggtagtggggatgaccgttgagcatgtagagtgccaggatgccggggtgagggaggctccgggcccactggagggggctggcgaggctgggggcgaagaggcagacgagaagccccctcagtttgtgtgtagagaatgtaaggagactttcagtacgatgactctcctgcggaggcacgagcgcagccatccagagctcagacccttcccatgcacacaatgtggcaagagtttctctgatcgtgcggggcttagaaaacatagcaggacacactcctccgtgagaccgtatacttgccctcactgcccaaaagcctttctctcagcctcagatctgcggaaacacgaacgcacccaccccgttcctatgggcacgccaacgcctcttgagcccttagtggcactgctcggaatgcctgaagaaggaccagcctag

SEQ ID NO: 343418 - DNA, 1860 bp, Artificial Sequence
  derived and/or modified sequence
atggaggttgaggcggcagaggcacgctcccctgcgccaggctataagcggtcaggaaggcgctataagtgtgtgtcatgcactaaaacttttccgaacgctcctagggccgctcgccacgctgccacccacggaccggctgactgtagcgaagaagtcgcggaagtaaagccaaaacctgaaaccgaggcgaaagctgaagaagccagtggcgaaaaagttagtggttcagccgctaagccaagaccatacgcctgccctctctgtccaaaagcatataagaccgcacctgagctccggagccatggccgatctcatacaggggagaagccctttccgtgtcctgaatgcggccgtcggttcatgcaaccagtgtgcctgagagtgcatttagcatcccatgcaggcgagctgccattccgatgcgcccattgtccaaaggcttatggagcactgtccaaactgaagatacatcaacgtgggcatacaggagaaagaccttatgcttgcgcagattgtggaaagagcttcgcagatcctagcgtgtttaggaaacatcgacgcactcatgccggactgcggccatattcctgcgaaagatgcggaaaggcatacgctgagctgaaagacctcaggaaccatgagcgctcccatacgggggagaggcccttcctctgctctgaatgtggcaagagcttcagtcgttcctctagcctcacttgccaccagcgtatccacgctgctcaaaagccttatagatgtcccgcttgtggcaaggggttcacccaactgagctcttaccagagtcacgaacgcactcattcaggagaaaaacctttcctgtgtccacgctgtggaaggatgttttcagatccttcctcattcagacgccatcaacgtgctcacgaaggtgtgaagccctaccactgtgagaagtgcggcaaggacttcagacagcccgcagacctggctatgcatcgcagagtgcacaccggggatcgtcctttcaagtgcctgcagtgcgataagacttttgtggcctcatgggatctgaagagacacgccttagtacactccggacagcgacccttccggtgcgaggaatgcggtcgcgctttcgctgagagggcttcattgaccaagcactcaagagtgcactctggggaaaggcccttccactgcaacgcatgcgggaagtcattcgtagtcagtagttccctccgcaagcacgagcgtactcatagaagtagcgaggccgctggggtgccacccgcacaagaattggtagtgggactcgctttaccagtgggggtagcgggagaatcgtccgcagcgccagcagctggcgctggcttgggggatcccccagccggtcttctggggcttcctcccgagtccggaggagtgatggccacccagtggcaagttgttggaatgaccgtggagcatgtcgaatgccaggacgctggagtgcgcgaagcccctggcccattagagggcgcaggcgaagcagggggtgaggaggctgacgagaaaccccctcaattcgtgtgcagagaatgcaaggaaactttttcaactatgaccctactcagacgccacgaacgctcccatcccgagttgcgccctttcccttgtactcagtgtggcaagagcttctcagatcgtgccggactccgtaagcattcccgtactcattcttcagtccggccttacacatgcccgcactgccctaaagcttttttaagcgcctcggacttgagaaaacatgagcgcactcaccctgttcccatgggcactcctacgccactggagccactcgtagctctcctaggcatgccggaggaaggcccagcttag

SEQ ID NO: 343419 - DNA, 1860 bp, Artificial Sequence
  derived and/or modified sequence
atggaggtcgaggctgctgaggcccgaagcccagcacccggatacaaaagatcagggagaagatataagtgtgtgtcctgtaccaagacgttcccgaatgcaccccgtgcggctcggcacgcggctacccacgggccagccgactgttcagaagaagtggccgaagtgaagccaaagcccgagacagaagctaaagcagaggaggcatccggcgagaaagtgtcaggctcagccgctaaacctcgcccttatgcctgccctctatgcccaaaggcttacaaaacagctcccgagttgcgctcccacggcagaagtcacaccggggagaaacccttcccctgccccgaatgtggtagaaggtttatgcaacccgtctgcctcagggtgcacctggcatcacatgccggagaactgccattcagatgtgcccactgtccaaaagcctacggggcactctctaaactgaaaatccaccaacgaggtcacactggcgagcgtccttatgcatgcgctgactgcggcaagtctttcgcagatccttctgtgtttaggaagcacaggcgaacccatgctggactccggccttacagttgtgaaagatgtggaaaagcctatgcagaactgaaggatctcaggaaccacgaacggtcccacaccggcgaacgaccttttctgtgtagtgagtgtgggaaatcattctccagaagttcttctctgacatgtcatcagcggatccacgctgcccagaagccctacaggtgccctgcatgcgggaaaggctttacccagcttagtagctaccagtctcacgagcggacgcatagtggagaaaaaccatttctgtgccccagatgtggcagaatgttttctgacccctcttcatttagacgacaccagagagctcatgaaggcgtgaagccctaccattgcgagaagtgtggtaaagattttagacaacctgctgatttggcgatgcatcgcagagtgcacacaggggataggccctttaagtgtctacagtgcgacaaaacttttgtcgccagctgggatctaaagcgacatgcattggtacattcaggtcaacggccttttcgatgcgaggagtgcgggagggctttcgccgaaagagcctcgctaaccaagcacagccgagtgcatagcggggagcggccttttcactgcaatgcttgcggaaaatcatttgtggtgtccagttccctgcggaagcacgaacgcactcaccggtcttcggaagcagctggtgtccctccagcccaggaactggtggttgggctcgcactgccagtgggggtggctggggagtcctctgccgctccagccgcaggcgctgggctgggcgatcccccagccggattattggggctgccgccagagagcggaggagtaatggccactcaatggcaggttgtcggtatgacagtcgagcatgttgagtgccaagacgctggtgtgcgggaagccccagggcctctagaaggcgctggcgaagcaggcggagaagaagctgatgaaaaaccaccgcagtttgtttgtcgagagtgtaaggaaaccttcagtacaatgaccttactgagacgccacgaacgatcccacccagaactgcggccattcccttgcacccaatgtggcaaaagtttttctgaccgcgctggcttgcgcaaacacagcaggacccactccagtgtgcgaccatacacctgtccacactgccctaaggctttcctgtctgcatcagacctccgcaaacacgagcgcactcatcctgtaccgatgggtacgccgactcctcttgaacccctagtcgctctcctgggtatgcccgaggaggggcctgcctag

SEQ ID NO: 343420 - DNA, 1860 bp, Artificial Sequence
  derived and/or modified sequence
atggaggtcgaggccgcagaggcacgatctccagcacccggatacaaacggagtggcagacggtacaaatgcgtttcatgtaccaagacttttcccaatgcccctcgagctgcgaggcatgccgctacccatggtccagccgattgctctgaggaggttgccgaggtgaagcctaaacccgaaactgaggccaaagcggaggaagcatccggcgaaaaggtgagcgggagcgctgctaaaccgcgaccctacgcatgcccactgtgtccgaaagcgtataaaaccgctccagagttacggagccacgggagaagccacacaggagaaaaacccttcccttgccctgagtgtggacgacgcttcatgcagcccgtgtgtctgcgggtacacctggctagccatgccggagagctgcccttcaggtgcgcccactgcccaaaggcatatggggcactgagcaagctgaagatacatcagcgtggacacactggcgagaggccttacgcatgtgcagattgcggcaaaagttttgccgatccatccgtcttcagaaaacacagacgtacacatgccggtctccgaccctattcctgcgagaggtgtgggaaagcttacgctgaacttaaagatttacggaatcatgagaggtctcatacaggagaaagaccatttctgtgctctgagtgcggcaaatcctttagcagaagcagtagtttaacgtgtcaccagcggattcacgcagcccagaagccatatcgttgcccggcatgcgggaagggctttacccagttgtcttcttaccaaagccatgaacgtacgcattcgggagaaaagccatttctctgtcccagatgtggtagaatgtttagcgatccttcttccttccgtcggcaccaaagagcccacgagggcgtcaagccttatcactgcgaaaaatgcggcaaggactttcgacaaccagcggatcttgccatgcaccgacgggtgcatacaggcgatcggcctttcaaatgtctccagtgcgacaagacctttgttgcttcctgggatcttaagcgccatgcattagtgcactctggacagcgaccctttagatgtgaggaatgcggcagggcatttgcagagagggcctcccttaccaagcattcaagagtgcattctggcgaaagaccgtttcattgcaatgcctgcgggaagagcttcgttgtgtcttcctctctgaggaagcatgagcggacccacagatctagcgaggcagctggcgttccacccgctcaagagctcgtggtcggcttagcgctgcccgttggcgttgcaggtgaatcctctgcagcacctgcagctggcgctgggttgggggatcccccagctgggcttctggggctgccacctgaaagcggaggcgtgatggcaacgcagtggcaggtggtcggaatgacagtcgagcatgtcgaatgtcaggatgccggtgtgcgtgaggctcccggaccgctggagggcgcaggcgaggctggcggtgaggaggcagacgaaaagcctccacagtttgtgtgccgcgaatgtaaagagacatttagcaccatgactctgctaagaagacatgagcgatcacaccccgaactcaggccttttccatgcactcagtgcggcaagagtttttccgatagagctggactgcggaagcactccagaactcactcaagcgtccgcccttacacttgccctcactgtcctaaagccttcctgtctgcgtcggacctgcggaagcatgagagaactcaccctgtacccatgggcacccctacaccactggagcctctagtggctttactgggcatgcccgaggagggcccagcatag

SEQ ID NO: 343421 - DNA, 1860 bp, Artificial Sequence
  derived and/or modified sequence
atggaggtcgaggccgctgaagctcggtcccccgctccaggctacaagagatcaggccgtagatacaagtgcgtgtcatgtaccaaaacctttccaaacgcccctcgcgctgcaagacatgcagctactcacggacctgccgactgtagcgaagaggtcgccgaagtgaagccaaagcccgaaactgaggcgaaggccgaggaggccagtggggagaaagtctccggcagtgccgcaaagccacggccatatgcgtgtcccctctgccctaaggcttataagaccgccccagaacttcgctctcacggccgttcacataccggagaaaaaccatttccctgtccagaatgcggccgacgcttcatgcaaccagtttgcctgagagtccacctcgcgtcgcatgccggagaattgccatttcgatgcgctcattgtccaaaagcgtacggggctctgagcaagctgaaaatacaccagcgaggtcatacaggcgagcggccatatgcgtgcgccgactgcggaaaatctttcgccgatcctagcgtttttcgtaagcacaggcggacccacgccggactcagaccctactcctgcgagcggtgcgggaaggcatatgcagaactcaaagatctccggaaccacgaaagaagccacaccggagaacgccctttcctatgttctgaatgtggcaagagtttctcccgctcaagttccctgacctgtcaccagcggatccacgcggctcagaaaccttataggtgccctgcttgcgggaaaggcttcacacagctatcttcgtaccaatcccacgagaggacgcactctggggaaaaacctttcctttgtcctcgctgcggacgtatgttttccgatcccagctcttttcggcgacatcagagagcgcatgaaggcgtaaagccttatcattgtgagaagtgcgggaaggactttcggcagccagccgacttagcgatgcatagaagggtacacactggggacagaccctttaagtgcctccagtgcgacaagacatttgtcgcttcctgggatctcaagagacacgcgcttgtacacagtggacagcgacctttccgatgcgaggagtgtggcagggcttttgctgagcgcgcatcgcttacaaagcacagccgggtgcacagtggagaacgcccttttcactgcaatgcctgtggaaaatcattcgtcgtttctagctccctgcgtaaacatgaacgcacccaccggtcttccgaggcggctggcgtgccgccagcgcaggagctggtcgtaggcctcgctctccccgtgggtgtggccggagagagtagtgctgctcccgcagcaggtgccggactgggggaccctcccgcagggcttctaggcctgccgccagagtcgggaggagtcatggctactcaatggcaggttgttggcatgaccgttgaacacgttgaatgccaagatgccggagtgagagaggcgcctggcccactcgagggggctggcgaggccggtggcgaagaagctgacgagaaacccccacaatttgtctgccgtgagtgcaaggagaccttcagcaccatgacacttctgcggagacatgagaggagtcatcccgaactgagacccttcccctgcacacagtgcgggaagagcttctcagatagggctggtctgaggaaacactcccgtactcatagttccgtgaggccttatacctgcccacattgtcctaaggcctttctctcagctagtgatttgcgcaaacacgagcgaacccatcctgttcctatgggcaccccaaccccgttagaacccctggtggctctgctggggatgcccgaagaaggaccagcctag

SEQ ID NO: 343422 - DNA, 1929 bp, Artificial Sequence
  derived and/or modified sequence
atgtctgaacctgggatgcttggacgtaaggacgtgtgggttccaagagagaccccctttaccaaagccatggaagtagaggccgctgaggcaagaagccccgcaccgggttacaagcgcagtggaagaaggtacaaatgcgtgtcgtgcactaaaactttccctaatgcccctagggccgctcgccatgcagccacacacggacctgctgactgctcagaggaggtggctgaagtgaagccaaaaccagaaacagaggcaaaggccgaggaggccagcggggagaaagtcagcggatccgctgccaagcctcgtccttatgcatgcccactgtgcccaaaagcttacaaaacggcgccagagctgcgatcacatgggcgttctcacacaggggagaagccctttccgtgtccagaatgcggacgcagatttatgcagccggtgtgtctaagggttcatcttgctagccacgcgggagagctgccgttccgctgtgcccactgtcctaaagcatatggtgcactgagtaaacttaagatccaccagcggggacacactggagaaagaccctatgcatgcgccgactgcgggaaaagcttcgcggatccgagcgttttcagaaagcatcggcgaacccacgctggcctgcgcccttacagttgcgagcggtgcggaaaagcctacgctgaactgaaggatctacgtaaccatgaaaggagtcacacaggggagcgcccttttctctgcagtgagtgtggcaagtcattctctcgcagctcctccttgacctgccatcagaggatccacgcggcacagaagccttataggtgcccagcttgtggcaaaggcttcacgcaactaagctcttatcaatcccacgagaggacccattctggagaaaaaccatttctctgccctaggtgtggcaggatgttttccgatccttcctcattccggcgtcaccagagagctcacgaaggggtgaagccatatcattgcgagaagtgcggcaaagactttagacagcctgccgacctcgccatgcacagaagagtccacacgggggaccggccattcaagtgtctgcagtgtgacaagacgtttgtggcgtcctgggacttgaaaagacacgccctggtccatagcgggcagagaccgttcaggtgcgaggagtgcggcagagccttcgccgagcgggcatccctgacgaagcactctcgtgtgcattccggagaaaggccgttccactgcaatgcatgtgggaaatcttttgtggtttcttctagtctgcgaaagcacgaacgcacacatcggtccagcgaggccgctggagttcccccagctcaggagctcgttgttgggctcgccttacctgtcggcgtcgcaggcgaatctagtgctgcccctgccgcaggggcagggctgggagatccaccagccggactgctgggtctcccacctgagagtggtggggtcatggctacgcagtggcaagtcgtgggaatgacagtcgagcatgtcgagtgccaggacgccggagttagagaagcgccagggcctctagagggtgcgggagaagccggaggcgaggaagctgatgagaaacccccacaattcgtttgtcgggagtgtaaagaaacctttagcacaatgaccctcttaaggagacatgagcgctcccatcccgagctgcggccttttccctgtacacagtgtggcaagtctttcagcgacagagccggtttacggaaacacagccgtacccattcatctgtacgtccgtacacgtgcccccactgtcctaaagcctttctttcagctagtgaccttcggaaacatgagcgtacccatccagtgcctatgggaaccccaactccactggagcccctggtggcgctactagggatgccagaggaggggcctgcatag

SEQ ID NO: 343423 - DNA, 2698 bp, Artificial Sequence
  derived and/or modified sequence
ctttgcacgctaagctagccacacttccggcaagagcagctagaatcgttccggtgcatattgaataggcgcagaaagggagaaaaagattctacagccctggccacagtactttggtgacacttttcgtggggctctctggaggacttttcccaaggcagatggagaaaacttcgtgaaacccactccttgctattaaaggaaatgttgtggaatataattggacttaggttttgcagagcttgagcatggcctttttgtcctcccaccttctggttcttgaagacattgccggtgacctggccccagactaacacaaggcgggcgtataccgtcagcctgcctggcgtccccttgcctcagcacacacagagacctcttgcaagatgcttctctgccgccataggctggaggttccccgggaactttcccttccttcctagctgaggaagatccctcacttccgctcgccgcgccaccggtcccacctccccgccccccgctgggtcctagcgccggcccctgtttggcagggtccgggctccgtcggtgcgaggagccgacgccgacgccacggagtcagcacaagtctcatcagagaaaccccgttcaccaaggccatggaagtggaggctgcagaggcccggtccccagcccccggctacaagcgctcgggccgccgctacaagtgcgtgtcctgtaccaagacatttccaaacgcgcccagggcagcgcgccacgctgccacacatgggccggcagactgctctgaagaggtggccgaggtgaagccaaagccagagacagaagctaaggcagaggaagccagtggggagaaggtgtcaggctccgcggccaagcctaggccctatgcgtgtccgctatgccccaaggcctacaagacggcacccgagctgcgcagccacgggcgcagccacacgggggagaagccctttccgtgccccgagtgcggccgccgcttcatgcagcccgtgtgcctgcgcgtgcacctggcctcgcacgctggcgaactgcccttccgctgtgcgcactgcccgaaggcctatggcgcgctctccaagctcaagatccaccagcgtggccacacaggcgagcggccttacgcctgcgccgactgcggcaagagctttgctgacccttcagtgttccgcaagcaccggcgtactcacgctggcctgcggccctacagctgtgagcgttgcggcaaagcctatgcggagctcaaggacctccgcaaccatgagcggtcccacaccggcgagcgccccttcctctgctccgagtgcgggaagagcttctcccgctcatcctcgctcacgtgccaccagcgcatccacgcggcacagaagccctaccgctgcccggcctgcggcaagggcttcacgcagctcagttcctaccagagccacgagcgcacgcactcgggggagaagcccttcctgtgcccgcgctgcggccgcatgttctccgacccctcgagcttccgtcgccaccagcgcgcccatgaaggggtgaagccataccactgcgagaagtgcggcaaggacttccggcagccggcggacctggccatgcaccggcgtgtgcacacaggcgaccggccgttcaagtgcctgcaatgtgacaagacgttcgtggcgtcctgggacctcaagcggcacgcgctggtgcactctggccagcggcccttccgctgtgaggagtgcgggcgagccttcgccgagcgtgccagcctcacgaagcatagccgggtgcactcgggggagcgccccttccactgtaacgcatgtgggaaatcctttgtggtgtcgtcgagcctgaggaagcacgagcggacccatcgaagcagtgaggccgcgggtgtgccccctgcacaggagctggtggtggggttggcgctgcctgtgggcgtggcaggtgagagttcagccgccccggcagcaggggcggggctgggggaccctccagcagggctgctagggctgcccccggagtcaggtggtgtgatggccacacagtggcaggtggtgggcatgacggtggagcatgtggaatgccaagatgctggtgtccgggaggctcctggtcccttggaaggggcaggcgaggcggggggtgaggaggctgacgagaagcccccccagtttgtgtgccgagagtgcaaggagaccttctccacaatgacgctgctgcgtcggcacgagcgctcacacccggagctccggcccttcccctgcacccagtgcggcaagagcttctctgaccgggctgggctgcgcaaacacagccgcactcacagctcagtgcgcccctacacctgcccccattgtcccaaggccttcttgagtgccagcgacttgcgcaagcatgaacgcacccaccctgtgcccatggggacccccacacccctggagcccctggtggctttgctaggaatgcctgaagaggggccggcctgaagcccatgaccccccagcaccacactccgggagcccagcccccatcgggggcttcctgtacctccttttgcctggctctgctctttagactccagatccctacccctcagcaactagctcccctgtcggccagctaagagagctgggacagtggaggctggcagaagctgagacgtgactgtctaggagtaacactcattaaagctttcattttggca

SEQ ID NO: 343424 - DNA, 2468 bp, Artificial Sequence
  derived and/or modified sequence
ctttgtccctcattcggccttccgtccattcatttgttcatctcctcatccttcgttcagtcctccttgccacgtcctccgaagccacgttttctgaggcttataaccggggtcctgccctccaggggctgcctggctggcgggggcgccgcgtacagacggttgcgaggagcgaggagctccgggtttctgcaactctcggctcctcggcgcgcttcgtaggccccaccgcccttcaaactcccacaaacttaagggaccccattttactgatgaggaaactgaggtccagagcggcgtggggcccttacctctctactgccataaagtattcctgagggcactagggaagggggttcttgaaggatagaaaccccgttcaccaaggccatggaagtggaggctgcagaggcccggtccccagcccccggctacaagcgctcgggccgccgctacaagtgcgtgtcctgtaccaagacatttccaaacgcgcccagggcagcgcgccacgctgccacacatgggccggcagactgctctgaagaggtggccgaggtgaagccaaagccagagacagaagctaaggcagaggaagccagtggggagaaggtgtcaggctccgcggccaagcctaggccctatgcgtgtccgctatgccccaaggcctacaagacggcacccgagctgcgcagccacgggcgcagccacacgggggagaagccctttccgtgccccgagtgcggccgccgcttcatgcagcccgtgtgcctgcgcgtgcacctggcctcgcacgctggcgaactgcccttccgctgtgcgcactgcccgaaggcctatggcgcgctctccaagctcaagatccaccagcgtggccacacaggcgagcggccttacgcctgcgccgactgcggcaagagctttgctgacccttcagtgttccgcaagcaccggcgtactcacgctggcctgcggccctacagctgtgagcgttgcggcaaagcctatgcggagctcaaggacctccgcaaccatgagcggtcccacaccggcgagcgccccttcctctgctccgagtgcgggaagagcttctcccgctcatcctcgctcacgtgccaccagcgcatccacgcggcacagaagccctaccgctgcccggcctgcggcaagggcttcacgcagctcagttcctaccagagccacgagcgcacgcactcgggggagaagcccttcctgtgcccgcgctgcggccgcatgttctccgacccctcgagcttccgtcgccaccagcgcgcccatgaaggggtgaagccataccactgcgagaagtgcggcaaggacttccggcagccggcggacctggccatgcaccggcgtgtgcacacaggcgaccggccgttcaagtgcctgcaatgtgacaagacgttcgtggcgtcctgggacctcaagcggcacgcgctggtgcactctggccagcggcccttccgctgtgaggagtgcgggcgagccttcgccgagcgtgccagcctcacgaagcatagccgggtgcactcgggggagcgccccttccactgtaacgcatgtgggaaatcctttgtggtgtcgtcgagcctgaggaagcacgagcggacccatcgaagcagtgaggccgcgggtgtgccccctgcacaggagctggtggtggggttggcgctgcctgtgggcgtggcaggtgagagttcagccgccccggcagcaggggcggggctgggggaccctccagcagggctgctagggctgcccccggagtcaggtggtgtgatggccacacagtggcaggtggtgggcatgacggtggagcatgtggaatgccaagatgctggtgtccgggaggctcctggtcccttggaaggggcaggcgaggcggggggtgaggaggctgacgagaagcccccccagtttgtgtgccgagagtgcaaggagaccttctccacaatgacgctgctgcgtcggcacgagcgctcacacccggagctccggcccttcccctgcacccagtgcggcaagagcttctctgaccgggctgggctgcgcaaacacagccgcactcacagctcagtgcgcccctacacctgcccccattgtcccaaggccttcttgagtgccagcgacttgcgcaagcatgaacgcacccaccctgtgcccatggggacccccacacccctggagcccctggtggctttgctaggaatgcctgaagaggggccggcctgaagcccatgaccccccagcaccacactccgggagcccagcccccatcgggggcttcctgtacctccttttgcctggctctgctctttagactccagatccctacccctcagcaactagctcccctgtcggccagctaagagagctgggacagtggaggctggcagaagctgagacgtgactgtctaggagtaacactcattaaagctttcattttggca

SEQ ID NO: 343425 - DNA, 400 bp, Artificial Sequence
  derived and/or modified sequence
cgtcggtgcgaggagccgacgccgacgccacggagtcagcacaagtctcatcagagaaaccccgttcaccaaggccatggaagtggaggctgcagaggcccggtccccagcccccggctacaagcgctcgggccgccgctacaagtgcgtgtcctgtaccaagacatttccaaacgcgcccagggcagcgcgccacgctgccacacatgggccggcagactgctctgaagaggtggccgaggtcccacaccggcgagcgccccttcctctgctccgagtgcgggaagagcttctcccgctcatcctcgctcacgtgccaccagcgcatccacgcggcacagaagccctaccgctgcccggcctgcggcaagggcttcacgcagctcagttcctaccagag

SEQ ID NO: 343426 - DNA, 386 bp, Artificial Sequence
  derived and/or modified sequence
catctagaggtggaggattgagaattgtggctggaggttcggtcgctgccgggaggaggactctgtcgctggagctgaggctggaaaaagaaaccccgttcaccaaggccatggaagtggaggctgcagaggcccggtccccagcccccggctacaagcgctcgggccgccgctacaagtgcgtgtcctgtaccaagacatttccaaacgcgcccagggcagcgcgccacgctgccacacatgggccggcagactgctctgaagaggtggccgaggtgaagccaaagccagagacagaagctaaggcagaggaagccagtggggagaaggtgtcaggctccgcggccaagcctaggccctatgcgtgtccgctatgccccaaggcc

SEQ ID NO: 343427 - DNA, 431 bp, Artificial Sequence
  derived and/or modified sequence
ctgtcacttccagacagtgccagctaccagatttagcccattggctcagcccttttctggtcccagtggctctgcggacacttggtccaactcctttcttcaatgagcagatcagggaggaaacgaacgcaggatgtcagagccaggaatgctgggcaggaaggatgtgtgggttccgagagaaaccccgttcaccaaggccatggaagtggaggctgcagaggcccggtccccagcccccggctacaagcgctcgggccgccgctacaagtgcgtgtcctgtaccaagacatttccaaacgcgcccagggcagcgcgccacgctgccacacatgggccggcagactgctctgaagaggtggccgaggtgaagccaaagccagagacagaagctaaggcagaggaagccagtggggagaaggtgtcaggct

SEQ ID NO: 343428 - DNA, 562 bp, Artificial Sequence
  derived and/or modified sequence
agttgctgtctctgaggactaaccatccagaggaggaaagaaaacacaaatgctggggacctgtcacttccagacagtgccagctaccagatttagcccattggctcagcccttttctggtcccaggtctgtcttttctgggcgcttggagaccttcaggccaggcccacgtctgggtacactctttatcctggcatagttcttggacactgagctgaagaaggaagatgagaaaccccgttcaccaaggccatggaagtggaggctgcagaggcccggtccccagcccccggctacaagcgctcgggccgccgctacaagtgcgtgtcctgtaccaagacatttccaaacgcgcccagggcagcgcgccacgctgccacacatgggccggcagactgctctgaagaggtggccgaggtgaagccaaagccagagacagaagctaaggcagaggaagccagtggggagaaggtgtcaggctccgcggccaagcctaggccctatgcgtgtccgctatgccccaaggcctacaagacggcacccgagctgcgcagccacgggc

SEQ ID NO: 343429 - DNA, 2396 bp, Artificial Sequence
  derived and/or modified sequence
agattccagtctggggcggaggcccgtacagctgtgcaaggccagaattctgtgtgaacagttgctgtctctgaggactaaccatccagaggaggaaagaaaacacaaatgctggggacctgtcacttccagacagtgccagctaccagatttagcccattggctcagcccttttctggtcccaggtctgtcttttctgggcgcttggagaccttcaggccaggcccacgtctgggtacactctttatcctggcatagttcttggacactgagctgaagaaggaagatgagaaaccccgttcaccaaggccatggaagtggaggctgcagaggcccggtccccagcccccggctacaagcgctcgggccgccgctacaagtgcgtgtcctgtaccaagacatttccaaacgcgcccagggcagcgcgccacgctgccacacatgggccggcagactgctctgaagaggtggccgaggtgaagccaaagccagagacagaagctaaggcagaggaagccagtggggagaaggtgtcaggctccgcggccaagcctaggccctatgcgtgtccgctatgccccaaggcctacaagacggcacccgagctgcgcagccacgggcgcagccacacgggggagaagccctttccgtgccccgagtgcggccgccgcttcatgcagcccgtgtgcctgcgcgtgcacctggcctcgcacgctggcgaactgcccttccgctgtgcgcactgcccgaaggcctatggcgcgctctccaagctcaagatccaccagcgtggccacacaggcgagcggccttacgcctgcgccgactgcggcaagagctttgctgacccttcagtgttccgcaagcaccggcgtactcacgctggcctgcggccctacagctgtgagcgttgcggcaaagcctatgcggagctcaaggacctccgcaaccatgagcggtcccacaccggcgagcgccccttcctctgctccgagtgcgggaagagcttctcccgctcatcctcgctcacgtgccaccagcgcatccacgcggcacagaagccctaccgctgcccggcctgcggcaagggcttcacgcagctcagttcctaccagagccacgagcgcacgcactcgggggagaagcccttcctgtgcccgcgctgcggccgcatgttctccgacccctcgagcttccgtcgccaccagcgcgcccatgaaggggtgaagccataccactgcgagaagtgcggcaaggacttccggcagccggcggacctggccatgcaccggcgtgtgcacacaggcgaccggccgttcaagtgcctgcaatgtgacaagacgttcgtggcgtcctgggacctcaagcggcacgcgctggtgcactctggccagcggcccttccgctgtgaggagtgcgggcgagccttcgccgagcgtgccagcctcacgaagcatagccgggtgcactcgggggagcgccccttccactgtaacgcatgtgggaaatcctttgtggtgtcgtcgagcctgaggaagcacgagcggacccatcgaagcagtgaggccgcgggtgtgccccctgcacaggagctggtggtggggttggcgctgcctgtgggcgtggcaggtgagagttcagccgccccggcagcaggggcggggctgggggaccctccagcagggctgctagggctgcccccggagtcaggtggtgtgatggccacacagtggcaggtggtgggcatgacggtggagcatgtggaatgccaagatgctggtgtccgggaggctcctggtcccttggaaggggcaggcgaggcggggggtgaggaggctgacgagaagcccccccagtttgtgtgccgagagtgcaaggagaccttctccacaatgacgctgctgcgtcggcacgagcgctcacacccggagctccggcccttcccctgcacccagtgcggcaagagcttctctgaccgggctgggctgcgcaaacacagccgcactcacagctcagtgcgcccctacacctgcccccattgtcccaaggccttcttgagtgccagcgacttgcgcaagcatgaacgcacccaccctgtgcccatggggacccccacacccctggagcccctggtggctttgctaggaatgcctgaagaggggccggcctgaagcccatgaccccccagcaccacactccgggagcccagcccccatcgggggcttcctgtacctccttttgcctggctctgctctttagactccagatccctacccctcagcaactagctcccctgtcggccagctaagagagctgggacagtggaggctggcagaagctgagacgtgactgtctaggagtaacactcattaaagctttcattttggcaccaggtc

SEQ ID NO: 343430 - DNA, 2865 bp, Artificial Sequence
  derived and/or modified sequence
attgcgggcccagcaggtcctagaacccgccggctgtctccgcggttctgggctgcggacacccaggctcggcccgcgcggctgctggcccggcgcggtgtggtcccgggggtcctagagcccgccatgttttgggtttttgtcccggtcgcgtggcccgcgctgcaagatcccaggcgccggcggccccctcccctgctgaggcccggccaccactcccgcggtcctagagaacgccatcttgcaagcctttgtccctcattcggccttccgtccattcatttgttcatctcctcatccttcgttcagtcctccttgccacgtcctccgaagccacgttttctgaggcttataaccggggtcctgccctccaggggctgcctggctggcgggggcgccgcgtacagacggttgcgaggagcgaggagctccgggtttctgcaactctcggctcctcggcgcgcttcgtaggccccaccgcccttcaaactcccacaaacttaagggaccccattttactgatgaggaaactgaggtccagagcggcgtggggcccttacctctctactgccataaagtattcctgagggcactagggaagggggttcttgaaggatgtaaaggggctttcccgttggagaaggcaggcaagggctccccgagcccaggaaactgcatctagaggtggaggattgagaattgtggctggaggttcggtcgctgccgggaggaggactctgtcgctggagctgaggctggaaaaagaaaccccgttcaccaaggccatggaagtggaggctgcagaggcccggtccccagcccccggctacaagcgctcgggccgccgctacaagtgcgtgtcctgtaccaagacatttccaaacgcgcccagggcagcgcgccacgctgccacacatgggccggcagactgctctgaagaggtggccgaggtgaagccaaagccagagacagaagctaaggcagaggaagccagtggggagaaggtgtcaggctccgcggccaagcctaggccctatgcgtgtccgctatgccccaaggcctacaagacggcacccgagctgcgcagccacgggcgcagccacacgggggagaagccctttccgtgccccgagtgcggccgccgcttcatgcagcccgtgtgcctgcgcgtgcacctggcctcgcacgctggcgaactgcccttccgctgtgcgcactgcccgaaggcctatggcgcgctctccaagctcaagatccaccagcgtggccacacaggcgagcggccttacgcctgcgccgactgcggcaagagctttgctgacccttcagtgttccgcaagcaccggcgtactcacgctggcctgcggccctacagctgtgagcgttgcggcaaagcctatgcggagctcaaggacctccgcaaccatgagcggtcccacaccggcgagcgccccttcctctgctccgagtgcgggaagagcttctcccgctcatcctcgctcacgtgccaccagcgcatccacgcggcacagaagccctaccgctgcccggcctgcggcaagggcttcacgcagctcagttcctaccagagccacgagcgcacgcactcgggggagaagcccttcctgtgcccgcgctgcggccgcatgttctccgacccctcgagcttccgtcgccaccagcgcgcccatgaaggggtgaagccataccactgcgagaagtgcggcaaggacttccggcagccggcggacctggccatgcaccggcgtgtgcacacaggcgaccggccgttcaagtgcctgcaatgtgacaagacgttcgtggcgtcctgggacctcaagcggcacgcgctggtgcactctggccagcggcccttccgctgtgaggagtgcgggcgagccttcgccgagcgtgccagcctcacgaagcatagccgggtgcactcgggggagcgccccttccactgtaacgcatgtgggaaatcctttgtggtgtcgtcgagcctgaggaagcacgagcggacccatcgaagcagtgaggccgcgggtgtgccccctgcacaggagctggtggtggggttggcgctgcctgtgggcgtggcaggtgagagttcagccgccccggcagcaggggcggggctgggggaccctccagcagggctgctagggctgcccccggagtcaggtggtgtgatggccacacagtggcaggtggtgggcatgacggtggagcatgtggaatgccaagatgctggtgtccgggaggctcctggtcccttggaaggggcaggcgaggcggggggtgaggaggctgacgagaagcccccccagtttgtgtgccgagagtgcaaggagaccttctccacaatgacgctgctgcgtcggcacgagcgctcacacccggagctccggcccttcccctgcacccagtgcggcaagagcttctctgaccgggctgggctgcgcaaacacagccgcactcacagctcagtgcgcccctacacctgcccccattgtcccaaggccttcttgagtgccagcgacttgcgcaagcatgaacgcacccaccctgtgcccatggggacccccacacccctggagcccctggtggctttgctaggaatgcctgaagaggggccggcctgaagcccatgaccccccagcaccacactccgggagcccagcccccatcgggggcttcctgtacctccttttgcctggctctgctctttagactccagatccctacccctcagcaactagctcccctgtcggccagctaagagagctgggacagtggaggctggcagaagctgagacgtgactgtctaggagtaacactcattaaagctttcattttggcacc

SEQ ID NO: 343431 - DNA, 2510 bp, Artificial Sequence
  derived and/or modified sequence
agattccagtctggggcggaggcccgtacagctgtgcaaggccagaattctgtgtgaacagttgctgtctctgaggactaaccatccagaggaggaaagaaaacacaaatgctggggacctgtcacttccagacagtgccagctaccagatttagcccattggctcagcccttttctggtcccaggtctgtcttttctgggcgcttggagaccttcaggccaggcccacgtctgggtacactctttatcctggcatagttcttggacactgagctgaagaaggaagatgtggctctgcggacacttggtccaactcctttcttcaatgagcagatcagggaggaaacgaacgcaggatgtcagagccaggaatgctgggcaggaaggatgtgtgggttccgagagaaaccccgttcaccaaggccatggaagtggaggctgcagaggcccggtccccagcccccggctacaagcgctcgggccgccgctacaagtgcgtgtcctgtaccaagacatttccaaacgcgcccagggcagcgcgccacgctgccacacatgggccggcagactgctctgaagaggtggccgaggtgaagccaaagccagagacagaagctaaggcagaggaagccagtggggagaaggtgtcaggctccgcggccaagcctaggccctatgcgtgtccgctatgccccaaggcctacaagacggcacccgagctgcgcagccacgggcgcagccacacgggggagaagccctttccgtgccccgagtgcggccgccgcttcatgcagcccgtgtgcctgcgcgtgcacctggcctcgcacgctggcgaactgcccttccgctgtgcgcactgcccgaaggcctatggcgcgctctccaagctcaagatccaccagcgtggccacacaggcgagcggccttacgcctgcgccgactgcggcaagagctttgctgacccttcagtgttccgcaagcaccggcgtactcacgctggcctgcggccctacagctgtgagcgttgcggcaaagcctatgcggagctcaaggacctccgcaaccatgagcggtcccacaccggcgagcgccccttcctctgctccgagtgcgggaagagcttctcccgctcatcctcgctcacgtgccaccagcgcatccacgcggcacagaagccctaccgctgcccggcctgcggcaagggcttcacgcagctcagttcctaccagagccacgagcgcacgcactcgggggagaagcccttcctgtgcccgcgctgcggccgcatgttctccgacccctcgagcttccgtcgccaccagcgcgcccatgaaggggtgaagccataccactgcgagaagtgcggcaaggacttccggcagccggcggacctggccatgcaccggcgtgtgcacacaggcgaccggccgttcaagtgcctgcaatgtgacaagacgttcgtggcgtcctgggacctcaagcggcacgcgctggtgcactctggccagcggcccttccgctgtgaggagtgcgggcgagccttcgccgagcgtgccagcctcacgaagcatagccgggtgcactcgggggagcgccccttccactgtaacgcatgtgggaaatcctttgtggtgtcgtcgagcctgaggaagcacgagcggacccatcgaagcagtgaggccgcgggtgtgccccctgcacaggagctggtggtggggttggcgctgcctgtgggcgtggcaggtgagagttcagccgccccggcagcaggggcggggctgggggaccctccagcagggctgctagggctgcccccggagtcaggtggtgtgatggccacacagtggcaggtggtgggcatgacggtggagcatgtggaatgccaagatgctggtgtccgggaggctcctggtcccttggaaggggcaggcgaggcggggggtgaggaggctgacgagaagcccccccagtttgtgtgccgagagtgcaaggagaccttctccacaatgacgctgctgcgtcggcacgagcgctcacacccggagctccggcccttcccctgcacccagtgcggcaagagcttctctgaccgggctgggctgcgcaaacacagccgcactcacagctcagtgcgcccctacacctgcccccattgtcccaaggccttcttgagtgccagcgacttgcgcaagcatgaacgcacccaccctgtgcccatggggacccccacacccctggagcccctggtggctttgctaggaatgcctgaagaggggccggcctgaagcccatgaccccccagcaccacactccgggagcccagcccccatcgggggcttcctgtacctccttttgcctggctctgctctttagactccagatccctacccctcagcaactagctcccctgtcggccagctaagagagctgggacagtggaggctggcagaagctgagacgtgactgtctaggagtaacactcattaaagctttcattttggcaccaggtc

SEQ ID NO: 343432 - protein, 400 aa, Artificial Sequence
  derived and/or modified sequence
MRGRRGDRMTINIQEHMAINVCPGPIRPIRQISDYFPRGPGPEGGGGGGGEAPAHLVPLALAPPAALLGATTPEDGAEVDSYDSDDATALGTLEFDLLYDRASCTLHCSILRAKGLKPMDFNGLADPYVKLHLLPGACKANKLKTKTQRNTLNPVWNEDLTYSGITDDDITHKVLRIAVCDEDKLSHNEFIGEIRVPLRRLKPSQKKHFNICLERQVPLASPSSMSAALRGISCYLKELEQAEQGQGLLEERGRILLSLSYSSRRRGLLVGILRCAHLAAMDVNGYSDPYVKTYLRPDVDKKSKHKTCVKKKTLNPEFNEEFFYEIELSTLATKTLEVTVWDYDIGKSNDFIGGVSLGPGARGEARKHWSDCLQQPDAALERWHTLTSELPPAAGALSSA

SEQ ID NO: 343433 - DNA, 1203 bp, Artificial Sequence
  derived and/or modified sequence
atgaggggccgacggggggaccgaatgacaataaatattcaggagcatatggcaatcaatgtttgtcccggtccaatccggcctattcgtcagatctctgattacttcccccgagggccgggccccgagggggggggaggagggggcggagaagccccagcccatctggtgccgctggccttggccccgccagcagccttgctcggcgctaccacaccagaggatggcgccgaggttgatagttacgatagcgacgatgcaacagctctcggtaccctggagtttgatttgttatatgatcgcgcttcttgcacgctgcattgcagtattctgagggctaaaggtctcaaacctatggattttaatggtcttgccgacccatatgtaaagcttcacctcttgcctggcgcttgcaaggccaacaaactgaagacgaagacacagaggaatactctcaaccctgtgtggaatgaagatttaacatattctggtattacagatgacgatatcacacacaaagtgctgcggattgcagtgtgtgacgaggacaagctctctcataacgagttcatcggcgaaatccgtgtccctctgcggagacttaagccttcccagaagaaacacttcaacatttgcctggagcgccaggtgcctctcgccagtccttccagcatgtccgctgcgctaagagggatttcttgttatctcaaagaactggaacaggcggaacaggggcaaggactgctcgaggagcggggaaggatcttgctctccctcagttatagcagccgcagacgcggtcttcttgtgggcatactgcgatgcgcccatttagcggcaatggacgtgaatggctactctgacccatatgtcaagacatacctgcggccagacgttgacaagaaatctaaacacaagacctgtgtcaagaagaagaccctgaatcctgaatttaacgaggaattcttttatgagatcgagctctctacgctggccactaagacgcttgaggtaaccgtgtgggactacgacattggaaagtccaatgattttattggcggagttagtctggggccaggagcccggggcgaggcgcgtaaacattggagcgattgtctccaacagcctgacgctgcgctagagcgatggcacactctgacctctgaattgcccccagccgcaggagccttgtcttccgcctag

SEQ ID NO: 343434 - DNA, 1203 bp, Artificial Sequence
  derived and/or modified sequence
atgaggggccggcggggggacaggatgaccatcaacatccaggagcacatggccatcaacgtgtgccccggccccatccggcccatccggcagatcagtgactacttcccccggggccctggccctgagggcggcggcggcggcggcggggaggccccagcccacctggtgcccctggccctggcccctcctgctgccctgctgggcgccaccaccccagaagatggagctgaggtggacagctatgacagtgatgatgccacagccctgggcaccctggagtttgacctgctgtatgaccgggccagctgcaccctgcactgcagcatcctgcgggccaagggcctgaagcccatggacttcaacggcctggccgacccctacgtgaagctgcacctgctgcccggggcctgcaaggccaacaagctgaagaccaagacccagaggaacaccctgaaccctgtgtggaatgaagacctgacctacagcggcatcacagatgatgacatcacccacaaggtgctgagaattgctgtgtgtgatgaggacaagctgagccacaatgagttcatcggggagatccgggtgcccctgcggcggctgaagcccagccagaagaagcacttcaacatctgcctggagcggcaggtgcccctggccagccccagctccatgtctgctgccctgcggggcatcagctgctacctgaaggagctggagcaggccgagcagggccagggcctgctggaggagcggggccgcatcctgctgagcctgagctacagcagcagaagaagaggcctgctggtgggcatcctgcgctgtgcccacctggccgccatggatgtgaatggctacagcgacccctacgtgaagacctacctgcggccagatgtggacaagaagagcaagcacaagacctgtgtgaagaagaagaccctgaaccctgagttcaatgaggagttcttctatgaaattgagctgagcaccctggccaccaagaccctggaggtgacagtgtgggactatgacatcggcaagagcaatgacttcatcggcggcgtgtccctgggccctggggcccggggggaggccaggaagcactggagcgactgcctgcagcagccagatgctgccctggagcgctggcacaccctgaccagcgagctgcccccagctgctggggccctgagcagcgcctag

SEQ ID NO: 343435 - DNA, 1203 bp, Artificial Sequence
  derived and/or modified sequence
atgcggggccggcggggcgaccggatgaccatcaacatccaggagcatatggctataaacgtgtgtcccggtcccatccgtccaattagacaaatcagcgattacttcccacgggggcctggcccagagggcggaggcgggggcggtggtgaggccccagctcacctggtgccgctggctctggcacctcccgcggctctgctgggcgccaccaccccagaagatggcgctgaggtggacagctacgacagtgacgatgccacagctctggggacactggagtttgatctgctgtacgaccgggcttcctgcactctgcattgttcaatcctaagagccaagggcctgaaaccaatggacttcaatggcctcgctgacccgtacgtcaagctgcaccttctccctggagcatgcaaggccaataagctgaagacgaagactcaacggaacaccctaaatcccgtctggaacgaagatcttacgtatagcggaattacagatgatgatattacccacaaggtgctccgcatcgcagtgtgcgatgaggacaaactcagtcacaacgagttcatcggcgaaatacgggttcctctccgtaggcttaaacccagccaaaagaagcactttaacatatgcttggaaagacaagtccccctggcttccccatctagcatgagcgcagccctgcgaggaattagctgctacctcaaggagctcgagcaggccgagcagggccagggcttactagaggaacgagggaggattcttctcagtctgagctattctagcagaagaagaggattacttgttggaattttgaggtgtgcgcatcttgctgccatggacgttaacggctacagcgacccttatgtcaaaacttacttaagaccggatgttgataaaaagagcaaacacaagacatgcgttaaaaaaaagacacttaaccccgagtttaacgaggagttcttctatgagatcgaacttagcactctagcaacaaagacgttagaggtgacagtgtgggactacgatatcgggaaaagcaatgactttataggcggcgtgtcccttggccccggggccagaggcgaagcaaggaaacattggagcgactgtctacagcagccagacgccgcgctggaacgttggcacacacttaccagtgaactgccacctgctgccggtgctttgtctagcgcctag

SEQ ID NO: 343436 - DNA, 1203 bp, Artificial Sequence
  derived and/or modified sequence
atgcgcggacgcaggggtgaccgaatgactataaacattcaggaacatatggccattaacgtatgccctggaccaattcgccctatcaggcagatttcagactacttccccagaggacccggtcctgaaggtgggggtggaggaggcggagaagctcccgctcaccttgttccgctagctctggctccccctgctgcgctgctgggagccactaccccagaagatggggctgaggtggacagctatgatagtgatgacgcaacagctctgggcaccctggaattcgatctgctctatgacagggcgtcttgcacgctgcactgcagcattctgcgcgctaagggcttgaagccaatggactttaacggcctggcagacccgtacgtcaagctgcacctactgcccggagcttgcaaggcgaacaagctcaagactaaaacgcaacgcaataccctgaaccccgtgtggaatgaagatctgacttacagcgggatcaccgacgatgatattacgcacaaggtgttacggattgcagtgtgcgatgaagacaaactcagccacaacgaatttatcggagagattcgcgtccctctccggcgattaaaaccgtcccagaagaagcatttcaacatctgtttggaaagacaagtccccctcgctagtccatcttcaatgtccgctgcacttagaggcatcagctgttatttaaaagaacttgaacaagccgagcagggccagggtctgctggaagagagaggacgcatactcctctctctcagctatagctctcgcagacggggactcctcgtcggtatcctgcgatgcgctcacctggcggctatggacgttaatgggtacagcgatccctacgtgaaaacctatctgagaccggacgtcgacaaaaagtctaaacacaagacgtgtgtaaagaaaaagactctgaacccggaattcaatgaggaattcttctacgaaatagagctctcaactttagccactaagaccctggaggttacagtctgggattacgatattggaaagtccaatgattttattggaggagtttctcttggtcctggggcacgaggtgaggccaggaagcattggagcgattgtctccaacagccagacgcagccctcgaacgttggcacaccttgactagcgaacttccaccggctgccggtgcactgagctcagcctag

SEQ ID NO: 343437 - DNA, 1203 bp, Artificial Sequence
  derived and/or modified sequence
atgagaggcagaagaggcgacagaatgaccatcaacatccaggagcacatggccatcaacgtgtgccccggccccatcagacccatcagacagatcagcgactacttccccagaggccccggccccgagggcggcggcggcggcggcggcgaggcccccgcccacctggtgcccctggccctggccccccccgccgccctgctgggcgccaccacccccgaggacggcgccgaggtggacagctacgacagcgacgacgccaccgccctgggcaccctggagttcgacctgctgtacgacagagccagctgcaccctgcactgcagcatcctgagagccaagggcctgaagcccatggacttcaacggcctggccgacccctacgtgaagctgcacctgctgcccggcgcctgcaaggccaacaagctgaagaccaagacccagagaaacaccctgaaccccgtgtggaacgaggacctgacctacagcggcatcaccgacgacgacatcacccacaaggtgctgagaatcgccgtgtgcgacgaggacaagctgagccacaacgagttcatcggcgagatcagagtgcccctgagaagactgaagcccagccagaagaagcacttcaacatctgcctggagagacaggtgcccctggccagccccagcagcatgagcgccgccctgagaggcatcagctgctacctgaaggagctggagcaggccgagcagggccagggcctgctggaggagagaggcagaatcctgctgagcctgagctacagcagcagaagaagaggcctgctggtgggcatcctgagatgcgcccacctggccgccatggacgtgaacggctacagcgacccctacgtgaagacctacctgagacccgacgtggacaagaagagcaagcacaagacctgcgtgaagaagaagaccctgaaccccgagttcaacgaggagttcttctacgagatcgagctgagcaccctggccaccaagaccctggaggtgaccgtgtgggactacgacatcggcaagagcaacgacttcatcggcggcgtgagcctgggccccggcgccagaggcgaggccagaaagcactggagcgactgcctgcagcagcccgacgccgccctggagagatggcacaccctgaccagcgagctgccccccgccgccggcgccctgagcagcgcctag

SEQ ID NO: 343438 - DNA, 2066 bp, Artificial Sequence
  derived and/or modified sequence
cgccgccgcgccggctgcatcctcgcctccacctcgctcaccccctcctccccgcactttctcggcgctccctccctctcggctcgcacagctcgactccgcgctctcctcgccggccgccgccgcccagcctgcgcccgccgtccccccagtgcctgggcacctgttggaggcagagccaggggtgctgcatgaggggccgcaggggcgatcgcatgaccatcaacatccaggagcacatggccatcaacgtgtgccccgggcccatccggcccatccgccagatctctgactacttcccccggggaccaggacctgaagggggcggcgggggcggcggggaggcccccgcccatctggtccccctggctctggccccccctgcagccctccttggggccaccacgcctgaggatggtgcggaggtggacagctatgactcggatgatgccaccgccctaggcacgctggagtttgaccttctctacgaccgggcctcctgcactctgcactgtagcatcctcagggccaagggcctcaagcccatggatttcaatggcctcgccgacccctacgtcaagctgcacttgctgcctggagcctgtaaggccaataagctaaaaacgaagactcagaggaacacactgaatcccgtgtggaatgaggacctgacttacagcgggatcacagatgacgacatcacgcacaaggtgctcaggatcgccgtctgtgatgaggacaagctgagtcacaatgagtttattggggagatccgcgtgcccctccgccgcctcaagccttcgcagaagaagcattttaacatctgcctcgagcgccaggtcccgctggcgtccccctcttccatgtcagcggcgctgaggggcatctcctgttatctgaaggagttggagcaggcggagcaggggcaggggctgctggaggagcgtggccgcatcctgctgagtctcagctacagctcgcggcgccggggactgctggtaggcatcttgcgctgcgcccatctggctgccatggacgtcaacggttactcggacccctacgtcaagacgtacctgaggcccgatgtggacaagaaatccaagcataagacgtgtgtgaagaagaagactctcaacccagaatttaacgaggagtttttctacgagatagagctctccactctggccaccaagaccctggaagtcaccgtctgggactatgacattggcaaatccaatgacttcattggtggcgtgtccctggggccaggtgcccgaggcgaggctcggaagcactggagtgactgcctgcagcagccggacgcagccctggagcgctggcacaccctgaccagtgagctgccccctgcggccggggctctgtcctcagcctgagtggacagcagtgtcccggcacaggcccatcgagccgggtccagtacccaaccttcgcacgagtgtgttgcacgtttacacagggtgggctgcccccaccctgcactacctatttttgtgagtctccgtgacccgggtctgtctgctcatgaggggctgcggagttctatattcacatatgcaaacctcctgcctgactcgctagtccctgcaaatatgcaaaccccccatcatctgcacacccgggcagtgctcagagcccggccccaggcccccgcgctcctcactcctgcctctccacgctgccccgtccctctcccccaacagggaggaggtcggattaggggaggttcagaggaggagaatgtctcaaaaaaaaaggacaaaaaacaaacccagagccactcctttaatacagaaacttcattgaaaaaacctagccctgtacagctgcccttttaaagaggtggccattgcagggtctctgcctccccagcaggtggcagatgctcccggccactcgtttaaataactgtcccctggagggggccggggtttgaaggcagggcccctgccaccctcctgggggacacccgtgcatgtttacgccttttctggttgtgtcagtggccggagcatggcagctgggcatcaataaacacctccgaggaa

SEQ ID NO: 343439 - protein, 755 aa, Artificial Sequence
  derived and/or modified sequence
MPAGGRAGSLKDPDVAELFFKDDPEKLFSDLREIGHGSFGAVYFARDVRNSEVVAIKKMSYSGKQSNEKWQDIIKEVRFLQKLRHPNTIQYRGCYLREHTAWLVMEYCLGSASDLLEVHKKPLQEVEIAAVTHGALQGLAYLHSHNMIHRDVKAGNILLSEPGLVKLGDFGSASIMAPANSFVGTPYWMAPEVILAMDEGQYDGKVDVWSLGITCIELAERKPPLFNMNAMSALYHIAQNESPVLQSGHWSEYFRNFVDSCLQKIPQDRPTSEVLLKHRFVLRERPPTVIMDLIQRTKDAVRELDNLQYRKMKKILFQEAPNGPGAEAPEEEEEAEPYMHRAGTLTSLESSHSVPSMSISASSQSSSVNSLADASDNEEEEEEEEEEEEEEEGPEAREMAMMQEGEHTVTSHSSIIHRLPGSDNLYDDPYQPEITPSPLQPPAAPAPTSTTSSARRRAYCRNRDHFATIRTASLVSRQIQEHEQDSALREQLSGYKRMRRQHQKQLLALESRLRGEREEHSARLQRELEAQRAGFGAEAEKLARRHQAIGEKEARAAQAEERKFQQHILGQQKKELAALLEAQKRTYKLRKEQLKEELQENPSTPKREKAEWLLRQKEQLQQCQAEEEAGLLRRQRQYFELQCRQYKRKMLLARHSLDQDLLREDLNKKQTQKDLECALLLRQHEATRELELRQLQAVQRTRAELTRLQHQTELGNQLEYNKRREQELRQKHAAQVRQQPKSLKKKTNTNKISER

SEQ ID NO: 343440 - DNA, 2268 bp, Artificial Sequence
  derived and/or modified sequence
atgcccgccggcggcagagccggcagcctgaaggaccccgacgtggccgagctgttcttcaaggacgaccccgagaagctgttcagcgacctgagagagatcggccacggcagcttcggcgccgtgtacttcgccagagacgtgagaaacagcgaggtggtggccatcaagaagatgagctacagcggcaagcagagcaacgagaagtggcaggacatcatcaaggaggtgagattcctgcagaagctgagacaccccaacaccatccagtacagaggctgctacctgagagagcacaccgcctggctggtgatggagtactgcctgggcagcgccagcgacctgctggaggtgcacaagaagcccctgcaggaggtggagatcgccgccgtgacccacggcgccctgcagggcctggcctacctgcacagccacaacatgatccacagagacgtgaaggccggcaacatcctgctgagcgagcccggcctggtgaagctgggcgacttcggcagcgccagcatcatggcccccgccaacagcttcgtgggcaccccctactggatggcccccgaggtgatcctggccatggacgagggccagtacgacggcaaggtggacgtgtggagcctgggcatcacctgcatcgagctggccgagagaaagccccccctgttcaacatgaacgccatgagcgccctgtaccacatcgcccagaacgagagccccgtgctgcagagcggccactggagcgagtacttcagaaacttcgtggacagctgcctgcagaagatcccccaggacagacccaccagcgaggtgctgctgaagcacagattcgtgctgagagagagaccccccaccgtgatcatggacctgatccagagaaccaaggacgccgtgagagagctggacaacctgcagtacagaaagatgaagaagatcctgttccaggaggcccccaacggccccggcgccgaggcccccgaggaggaggaggaggccgagccctacatgcacagagccggcaccctgaccagcctggagagcagccacagcgtgcccagcatgagcatcagcgccagcagccagagcagcagcgtgaacagcctggccgacgccagcgacaacgaggaggaggaggaggaggaggaggaggaggaggaggaggaggagggccccgaggccagagagatggccatgatgcaggagggcgagcacaccgtgaccagccacagcagcatcatccacagactgcccggcagcgacaacctgtacgacgacccctaccagcccgagatcacccccagccccctgcagccccccgccgcccccgcccccaccagcaccaccagcagcgccagaagaagagcctactgcagaaacagagaccacttcgccaccatcagaaccgccagcctggtgagcagacagatccaggagcacgagcaggacagcgccctgagagagcagctgagcggctacaagagaatgagaagacagcaccagaagcagctgctggccctggagagcagactgagaggcgagagagaggagcacagcgccagactgcagagagagctggaggcccagagagccggcttcggcgccgaggccgagaagctggccagaagacaccaggccatcggcgagaaggaggccagagccgcccaggccgaggagagaaagttccagcagcacatcctgggccagcagaagaaggagctggccgccctgctggaggcccagaagagaacctacaagctgagaaaggagcagctgaaggaggagctgcaggagaaccccagcacccccaagagagagaaggccgagtggctgctgagacagaaggagcagctgcagcagtgccaggccgaggaggaggccggcctgctgagaagacagagacagtacttcgagctgcagtgcagacagtacaagagaaagatgctgctggccagacacagcctggaccaggacctgctgagagaggacctgaacaagaagcagacccagaaggacctggagtgcgccctgctgctgagacagcacgaggccaccagagagctggagctgagacagctgcaggccgtgcagagaaccagagccgagctgaccagactgcagcaccagaccgagctgggcaaccagctggagtacaacaagagaagagagcaggagctgagacagaagcacgccgcccaggtgagacagcagcccaagagcctgaagaagaagaccaacaccaacaagatcagcgagagatag

SEQ ID NO: 343441 - DNA, 2268 bp, Artificial Sequence
  derived and/or modified sequence
atgcccgctggaggccgtgcaggatcccttaaggatcccgacgtcgctgagctttttttcaaagatgatcctgagaaactcttctcagatctgagagagataggacacggcagcttcggagccgtctactttgcccgcgacgtcagaaatagcgaggtggtggctattaaaaagatgtcatactcaggcaagcagtcgaatgaaaagtggcaggacataatcaaagaggttaggttcttacagaaactgcgacatccaaataccatccagtaccggggctgttatctcagggaacacaccgcctggctggtcatggaatattgtctcggtagcgcaagtgatttgctggaggtccataaaaagccactgcaggaggtggaaatagcggctgtgactcatggcgctcttcagggcctggcctacctgcactcccataatatgattcaccgtgacgtcaaagcaggcaacatcctcctctccgagcccggcctggtgaaacttggggattttggtagcgctagcatcatggcccctgctaactcttttgtcggcaccccttactggatggcacccgaggtgattttagcaatggatgagggacagtatgacggcaaagtggatgtttggtccctcggcataacgtgtattgaactcgcggagaggaagccccctctgtttaacatgaatgctatgagtgccctgtaccatatcgctcagaacgaatctccagtgctccagtctgggcactggtccgagtacttcaggaacttcgtggacagctgcctgcagaaaatcccccaggatcggccaacgagcgaggtgctactcaagcacagattcgttctgagagaaagacccccgacagtcattatggatctgatccaacgaacgaaggacgctgtgagggaactggataatttgcagtacagaaagatgaaaaagatcttgtttcaggaagccccgaatgggcccggggcggaggcccccgaagaggaagaagaggcagagccatacatgcatcgtgctggaactctcacttcgttggaaagtagtcatagcgttccttctatgtccatcagcgctagctcacaatccagctctgtgaacagccttgctgacgcaagcgacaacgaagaggaagaggaggaggaggaggaggaggaggaagaggaggagggacccgaagcccgtgagatggccatgatgcaggaaggcgagcacacagtgacctcccattcgagtattatacacagactgcccgggagtgacaatctgtacgatgatccctaccaacctgagattactcccagtccattgcaaccccctgctgcacccgctcccactagtaccacctcttcggctagacgtcgcgcctactgccgtaatcgggaccacttcgctactatccgaaccgcctcattagtgagtcgccagatccaggagcatgaacaggactccgccctgcgtgaacagctctcggggtataaaagaatgcggcggcagcatcagaaacagctgctggcactggagagcagactgaggggtgagagggaggagcactccgctaggctgcagagggaactggaggcccaacgcgcaggctttggggcagaggccgaaaagctcgcacggcgccatcaagccattggagaaaaggaggctcgagccgcccaggcagaggaaaggaaatttcagcagcacatcctcggccaacagaaaaaggagctcgccgcccttcttgaggcccagaaacgaacttataaattgaggaaggaacagctcaaagaagaactccaggaaaacccttcaacacccaagagagaaaaggcagagtggttgctgagacaaaaggagcagttacagcagtgccaggccgaggaggaggccggattgctgcggagacaacgtcagtactttgaactgcagtgcaggcagtacaagaggaagatgcttcttgcccgtcacagccttgaccaggacctgctgcgggaggacctgaacaaaaagcaaacacagaaggacctagagtgtgccctgctactgagacagcacgaggcaactagagaattggagcttcggcaattgcaagctgtccagaggactcgtgcggagctaacaaggttgcaacatcaaactgaattgggtaatcagctggaatataacaaaaggcgtgagcaggaactgagacagaagcacgcggctcaggtgagacaacagcctaaaagccttaagaaaaagaccaatacaaacaaaatttccgaacgctag

SEQ ID NO: 343442 - DNA, 2268 bp, Artificial Sequence
  derived and/or modified sequence
atgcctgctgggggccgggccggcagcctgaaggaccctgatgtggccgagctgttcttcaaggatgatcctgagaagctgttcagtgacctgcgggagatcggccacggcagctttggagctgtgtactttgccagagatgtgagaaattctgaggtggtggccatcaagaagatgagctacagcggcaagcagagcaatgagaagtggcaggacatcatcaaggaggtgcgcttcctgcagaagctgcggcaccccaacaccatccagtaccggggctgctacctgcgggagcacacagcctggctggtgatggagtactgcctgggcagcgccagtgacctgctggaggtgcacaagaagcccctgcaggaggtggagattgctgctgtgacccatggagccctgcagggcctggcctacctgcacagccacaacatgatccacagagatgtgaaggccggcaacatcctgctgtctgagcccggcctggtgaagctgggggactttggcagcgccagcatcatggccccagccaacagctttgtgggcaccccctactggatggcccctgaggtgatcctggccatggatgagggccagtatgatggcaaggtggatgtgtggagcctgggcatcacctgcatcgagctggccgagaggaagcccccactcttcaacatgaatgccatgtctgccctgtaccacatcgcccagaatgaaagccctgtgctgcagagcggccactggagcgagtacttcaggaactttgtggacagctgcctgcagaagatcccccaggaccggcccaccagcgaggtgctgctgaagcacagatttgtgctgcgggagcggccccccaccgtcatcatggacctgatccagaggaccaaggatgctgtgcgggagctggacaacctgcagtacaggaagatgaagaagatcctcttccaggaggcccccaacggccctggagctgaggcccctgaggaggaggaggaggccgagccctacatgcaccgggccggcaccctgaccagcctggagagcagccacagcgtgcccagcatgagcatcagcgccagcagccagagcagctctgtgaacagcctggctgatgccagtgacaatgaggaggaggaggaggaggaggaggaggaggaggaggaggaggagggccctgaggcccgggagatggccatgatgcaggagggggagcacacagtgaccagccacagcagcatcatccaccggctgcccggcagtgacaacctgtatgatgacccctaccagcctgagatcacccccagccccctgcagcccccagctgccccagcccccaccagcaccaccagcagcgcccggcggcgggcctactgcaggaacagagaccactttgccaccatcagaacagccagcctggtgtcccggcagatccaggagcacgagcaggacagcgccctgcgggagcagctgagcggctacaagaggatgaggcggcagcaccagaagcagctgctggccctggagagccggctgcggggggagcgggaggagcacagcgcccggctgcagcgggagctggaggcccagagagctggctttggagctgaggccgagaagctggcccggcggcaccaggccatcggggagaaggaggcccgggccgcccaggccgaggagaggaagttccagcagcacatcctgggccagcagaagaaggagctggccgccctgctggaggcccagaagaggacctacaagctgaggaaggagcagctgaaggaggagctgcaggagaaccccagcacccccaagcgggagaaggccgagtggctgctgcggcagaaggagcagctgcagcagtgccaggccgaggaggaggccggcctgctgcggcggcagaggcagtactttgagctgcagtgccggcagtacaagaggaagatgctgctggcccggcacagcctggaccaggacctgctgcgggaggacctgaacaagaagcagacccagaaggacctggagtgtgccctgctgctgcggcagcacgaggccacccgggagctggagctgcggcagctgcaggccgtgcagaggaccagggctgagctgacccggctgcagcaccagacagagctgggcaaccagctggagtacaacaagagaagagagcaggagctgcggcagaagcatgctgcccaggtgcggcagcagcccaagagcctgaagaagaagaccaacaccaacaagatcagcgagaggtag

SEQ ID NO: 343443 - DNA, 2268 bp, Artificial Sequence
  derived and/or modified sequence
atgcccgccggcggccgggccggcagcctgaaggaccccgacgtggccgagctattttttaaggacgatcccgaaaaactttttagcgacctaagggagattgggcacgggtctttcggtgctgtttatttcgctcgagatgttagaaacagcgaggtggttgccatcaagaaaatgagttattctggcaaacagtccaacgaaaagtggcaggatattataaaagaggttagatttctgcaaaagttgcgtcatccgaatacaatacagtacagaggctgctacctgcgggagcatactgcatggctggtgatggagtattgtttgggctcggctagtgacctgctagaggtgcacaaaaaaccattacaggaagtggaaatcgcagcagttacccatggcgcattgcagggtctggcatatctacactcccacaacatgatccaccgagacgtgaaggccggaaacattttacttagcgaaccgggcctcgtcaaactaggtgacttcggctccgcctcaataatggcccccgccaacagcttcgtgggaacgccctactggatggccccagaagtgatattagccatggacgaaggtcagtatgacggcaaggtcgatgtgtggtcccttggaataacctgcatagaactcgcggagcggaagcctcccctattcaatatgaacgccatgtctgccctttatcacattgcgcagaatgagagcccggtactccagagcgggcattggagcgagtacttccggaacttcgtagatagctgcctccagaagatcccccaggaccggcctacctcggaggtgctcctgaagcacagattcgtcttgagagagcggccacccacagtcatcatggatctaattcagcgtacgaaagacgccgttcgtgaactggataacctccagtatcgaaagatgaaaaaaatactgtttcaggaagctcccaacggccccggcgccgaggccccagaagaagaagaggaggcagaaccatacatgcatcgggccggaacacttaccagcctcgagtcttctcacagtgtgcccagcatgtcaatatctgcctcctcgcagagttcttctgtgaacagcctggccgacgcctcagacaacgaggaagaggaagaagaggaagaggaggaagaggaggaggaggaaggacctgaagcacgtgagatggctatgatgcaggagggggaacatacggtgacttctcactcgagcattatccacaggctgccgggttcagataacctatatgacgatccctatcagcccgaaatcaccccttctcctctccagccgccagccgctcccgcacccacttctaccacatctagtgcacgtcggagagcctattgccgcaatcgcgaccacttcgctaccattcgcaccgcctccctggtgtcacgccaaatacaggagcatgagcaggatagcgcgttacgtgagcaactcagcggttacaagaggatgcgtcggcagcaccagaaacagctgcttgccctggaaagtagactccgaggggagagggaggagcactccgcccggttgcagcgggagctagaagcacagcgcgccggctttggtgcagaagccgaaaaactggcacgccggcaccaagccatcggggagaaggaagcgagggctgcccaggcagaagagcgtaaattccagcagcatattctgggtcaacagaagaaggagcttgctgcattattagaggcccagaagagaacttataagctgaggaaggagcaattaaaggaagaacttcaggagaacccctcaacacctaaacgcgagaaggctgagtggctgctgcgccagaaagagcagctacagcagtgccaagccgaggaagaagcaggcttactccggagacagcggcaatatttcgagctgcagtgcaggcagtataagcgaaagatgctgcttgcacggcattccctcgaccaggatttgctgcgtgaagacctgaacaagaagcagacacagaaggatctcgaatgcgcgctgcttcttcggcagcatgaagcaacgcgggagctggagctccggcagcttcaggctgtgcagaggacccgcgcggaactgacacgcctgcagcaccaaaccgaactgggaaaccaactggaatataataaacgtcgggaacaggagctacgacagaagcacgctgcccaggttaggcaacagcctaagagtttaaagaagaaaaccaatacgaacaaaatctccgagcgatag

SEQ ID NO: 343444 - DNA, 2268 bp, Artificial Sequence
  derived and/or modified sequence
atgcctgcaggcggtagggctggatctctgaaagacccagatgtcgcggagctcttctttaaggacgacccagagaagttattttccgacttacgcgaaataggccacgggagcttcggggcagtgtactttgcaagggatgtgaggaacagcgaggtcgtagctataaaaaagatgtcatattctggaaaacagagtaatgaaaagtggcaagacataattaaagaggtccgttttctgcagaaacttaggcatcctaatacgattcagtaccgcggatgttatctccgcgaacacaccgcttggctcgtcatggaatattgtctgggctctgcaagtgacctactggaagtccataaaaagcccctgcaggaagttgagatcgccgctgtcacacatggagccctgcagggcttagcctatctgcacagtcacaacatgattcaccgggatgtgaaagctgggaatatattactcagcgagcccggacttgttaaacttggagatttcgggtccgcaagtatcatggctcctgctaatagttttgtgggtacaccatattggatggcacccgaagtgatactggctatggatgaagggcaatacgacggaaaagtggacgtgtggtcactgggaatcacgtgtatcgaactggcggaaaggaaaccacctctctttaacatgaacgctatgagcgcgctgtatcatatcgcccagaatgagagccccgttctccagtctggccactggtctgagtacttcagaaacttcgtagacagctgccttcagaagatcccacaggacagaccgacttccgaggtcctgctgaagcatcggttcgtactgagagagcgaccccctacggtgatcatggacctcatacagagaacaaaggatgccgtgagggagctggataacctgcagtatcgaaagatgaagaaaatcctgtttcaggaggctcccaacggcccaggggctgaagcccctgaggaggaggaggaagccgagccatatatgcatcgcgcagggacactcacttccctggaaagctcacactctgtaccatctatgtcaattagcgctagtagtcagagctcctcggtgaatagtctggccgatgcaagcgacaacgaggaggaagaggaggaggaggaagaagaggaggaggaggaggaggggccagaggccagagagatggctatgatgcaagagggagaacataccgtgaccagtcacagttcaatcattcatcggctgcccggatccgataacctctacgacgatccctaccagccagaaattacaccgtccccactgcagccaccagccgctccagctcctacatcaacgacatccagcgcccgacggcgagcttattgtaggaaccgcgatcattttgctacaattcgtacggcatcccttgtcagccggcagattcaagaacacgagcaagactctgcattacgggaacaactgtccggctacaaacgaatgcggagacagcaccagaagcagcttctcgcactagaatcacgcctgcgtggcgagcgggaggaacattctgccaggctacagagggaactggaagcccaacgcgctggtttcggagcagaggccgaaaaactggcacggaggcaccaggcgatcggagaaaaagaggcgagggccgctcaggccgaggagagaaagttccagcagcatatactgggacagcagaagaaagaacttgccgcacttctggaagcgcagaaaaggacctataagttgagaaaggagcaactcaaagaggaattgcaggagaatccaagcactccaaagagggagaaggctgaatggttgctacgacagaaagagcagttacagcagtgccaagcagaggaggaggcagggcttcttcgtcggcagagacagtacttcgaactgcagtgcaggcaatacaagaggaagatgctcctcgcaaggcacagccttgatcaggacctcctgcgggaagatttgaataagaagcagactcagaaggacttggaatgtgcgttactactacgccagcacgaggccacgagggagttggagttgcgccagctgcaggctgtgcagcgtacccgggctgagcttaccagattacagcaccagacagagcttggaaatcagttagagtataataaacgccgtgagcaggagcttcggcagaaacacgccgcacaggtgcggcagcagcccaagagcttaaagaaaaagaccaacacaaataaaattagcgaacggtag

SEQ ID NO: 343445 - DNA, 3048 bp, Artificial Sequence
  derived and/or modified sequence
gagaccgggacgagaccggggctgtggtgcggagagaggctgagacggagaagaggagaggcagagagggcgcggggaccgtcagcagcaccttagctacaatcgttcagctattctcggaagagagaagggagagggaggaggccggggcgggagtgggggctgtcaccctcggaccccggcgtgagaggggccgtgcggccggacgtcctcggggtgggcccccagtcggtggccgaagacctacagctcaggcccctgggtcccaaatttccaggctttgcccctcctcctttctcagatacccgggtaacagtcctcatagtccagatatccgggactcgggtcccaacctctctaaacctgggtctctgtttcatagaatttcaaatatcaggttcaggcccctgcgtgcaccagtatccggggttcattccccgggcgttcaaatatcggattcagtctccatcccgttcagatattcggggttcagaccccacaatcagaaatccggaattcggcagctgtcgccctcgacgagggggaggactggaccgcgaggtcagattaggttgtcaccccctcccctccaggggaggcttcccgggcccgcccctcaggaagggcgaaagccgaggaagaggtggcaaggggaaaggtctccttgcccctctccctgcttggcagagccgctggaggaccccaggcggaagcggaggcgctggggcaccatagtgacccctaccaggccaggccccactctcagggcccccaggggccaccatgccagctgggggccgggccgggagcctgaaggacccagatgtggctgagctcttcttcaaggatgacccagaaaagctcttctctgacctccgggaaattggccatggcagctttggagccgtatactttgcccgggatgtccggaatagtgaggtggtggccatcaagaagatgtcctacagtgggaagcagtccaatgagaaatggcaagacatcatcaaggaggtgcggttcttacagaagctccggcatcccaacaccattcagtaccggggctgttacctgagggagcacacggcttggctggtaatggagtattgcctgggctcagcttctgaccttctagaagtgcacaagaaaccccttcaggaggtagagatcgcagctgtgacccacggggcgcttcagggcctggcatatctgcactcccacaacatgatccatagggatgtgaaggctggaaacatcctgctgtcagagccagggttagtgaagctaggggactttggttctgcgtccatcatggcacctgccaactccttcgtgggcaccccatactggatggcacccgaggtgatcctggccatggatgaggggcagtacgatggcaaagtggacgtctggtccttggggataacctgcatcgagctggctgaacggaaaccaccgctctttaacatgaatgcgatgagtgccttataccacattgcacagaacgaatcccccgtgctccagtcaggacactggtctgagtacttccggaattttgtcgactcctgtcttcagaaaatccctcaagacagaccaacctcagaggttctcctgaagcaccgctttgtgctccgggagcggccacccacagtcatcatggacctgatccagaggaccaaggatgccgtgcgggagctggacaacctgcagtaccgcaagatgaagaagatcctgttccaagaggcacccaacggccctggtgccgaggccccagaggaggaagaggaggccgagccctacatgcaccgggccgggactctgaccagcctcgagagtagccactcagtgcccagcatgtccatcagcgcctccagccagagcagctccgtcaacagcctagcagatgcctcagacaacgaggaagaggaggaggaggaggaggaagaggaggaggaggaagaaggccctgaagcccgggagatggccatgatgcaggagggggagcacacagtcacctctcacagctccattatccaccggctgccgggctctgacaacctatatgatgacccctaccagccagagataacccccagccctctccagccgcctgcagccccagctcccacttccaccacctcttccgcccgccgccgggcctactgccgtaaccgagaccactttgccaccatccgaaccgcctccctggtcagccgtcagatccaggagcatgagcaggactctgcgctgcgggagcagctgagcggctataagcggatgcgacgacagcaccagaagcagctgctggccctggagtcacggctgaggggtgaacgggaggagcacagtgcacggctgcagcgggagcttgaggcgcagcgggctggctttggggcagaggcagaaaagctggcccggcggcaccaggccataggtgagaaggaggcacgagctgcccaggccgaggagcggaagttccagcagcacatccttgggcagcagaagaaggagctggctgccctgctggaggcacagaagcggacctacaaacttcgcaaggaacagctgaaggaggagctccaggagaaccccagcactcccaagcgggagaaggccgagtggctgctgcggcagaaggagcagctccagcagtgccaggcggaggaggaagcagggctgctgcggcggcagcgccagtactttgagctgcagtgtcgccagtacaagcgcaagatgttgctggctcggcacagcctggaccaggacctgctgcgggaggacctgaacaagaagcagacccagaaggacttggagtgtgcactgctgcttcggcagcacgaggccacgcgggagctggagctgcggcagctccaggccgtgcagcgcacgcgggctgagctcacccgcctgcagcaccagacggagctgggcaaccagctggagtacaacaagcggcgtgagcaagagttgcggcagaagcatgcggcccaggttcgccagcagcccaagagcctcaaaaaaaagacaaacacaaataaaatatctgagcgg

SEQ ID NO: 343446 - protein, 1012 aa, Artificial Sequence
  derived and/or modified sequence
MEEYEKFCEKSLARIQEASLSTESFLPAQSESISLIRFHGVAILSPLLNIEKRKEMQQEKQKALDVEARKQVNRKKALLTRVQEILDNVQVRKAPNASDFDQWEMETVYSNSEVRNLNVPATFPNSFPSHTEHSTAAKLDKIAGILPLDNEDQCKTDGIDLARDSEGFNSPKQCDSSNISHVENEAFPKTSSATPQETLISDGPFSVNEQQDLPLLAEVIPDPYVMSLQNLMKKSKEYIEREQSRRSLRGSINRIVNESHLDKEHDAVEVADCVKEKGQLTGKHCVSVIPDKPSLNKSNVLLQGASTQASSMSMPVLASFSKVDIPIRTGHPTVLESNSDFKVIPTFVTENNVIKSLTGSYAKLPSPEPSMSPKMHRRRSRTSSACHILINNPINACELSPKGKEQAMDLIIQDTDENTNVPEIMPKLPTDLAGVCSSKVYVGKNTSEVKEDVVLGKSNQVCQSSGNHLENKVTHGLVTVEGQLTSDERGAHIMNSTCAAMPKLHEPYASSQCIASPNFGTVSGLKPASMLEKNCSLQTELNKSYDVKNPSPLLMQNQNTRQQMDTPMVSCGNEQFLDNSFEKVKRRLDLDIDGLQKENCPYVITSGITEQERQHLPEKRYPKGSGFVNKNKMLGTSSKESEELLKSKMLAFEEMRKRLEEQHAQQLSLLIAEQEREQERLQKEIEEQEKMLKEKKAMTAEASELDINNAVELEWRKISDSSLLETMLSQADSLHTSNSNSSGFTNSAMQYSFVSANEAPFYLWGSSTSGLTKLSVTRPFGRAKTRWSQVFSLEIQAKFNKITAVAKGFLTRRLMQTDKLKQLRQTVKDTMEFIRSFQSEAPLKRGIVSAQDASLQERVLAQLRAALYGIHDIFFVMDAAERMSILHHDREVRKEKMLRQMDKMKSPRVALSAATQKSLDRKKYMKAAEMGMPNKKFLVKQNPSETRVLQPNQGQNAPVHRLLSRQGTPKTSVKGVVQNRQKPSQSRVPNRVPVSGVYAGKIQRKRPNVATI

SEQ ID NO: 343447 - DNA, 3039 bp, Artificial Sequence
  derived and/or modified sequence
atggaggagtacgagaagttctgcgagaagagcctggccagaatccaggaggccagcctgagcaccgagagcttcctgcccgcccagagcgagagcatcagcctgatcagattccacggcgtggccatcctgagccccctgctgaacatcgagaagagaaaggagatgcagcaggagaagcagaaggccctggacgtggaggccagaaagcaggtgaacagaaagaaggccctgctgaccagagtgcaggagatcctggacaacgtgcaggtgagaaaggcccccaacgccagcgacttcgaccagtgggagatggagaccgtgtacagcaacagcgaggtgagaaacctgaacgtgcccgccaccttccccaacagcttccccagccacaccgagcacagcaccgccgccaagctggacaagatcgccggcatcctgcccctggacaacgaggaccagtgcaagaccgacggcatcgacctggccagagacagcgagggcttcaacagccccaagcagtgcgacagcagcaacatcagccacgtggagaacgaggccttccccaagaccagcagcgccaccccccaggagaccctgatcagcgacggccccttcagcgtgaacgagcagcaggacctgcccctgctggccgaggtgatccccgacccctacgtgatgagcctgcagaacctgatgaagaagagcaaggagtacatcgagagagagcagagcagaagaagcctgagaggcagcatcaacagaatcgtgaacgagagccacctggacaaggagcacgacgccgtggaggtggccgactgcgtgaaggagaagggccagctgaccggcaagcactgcgtgagcgtgatccccgacaagcccagcctgaacaagagcaacgtgctgctgcagggcgccagcacccaggccagcagcatgagcatgcccgtgctggccagcttcagcaaggtggacatccccatcagaaccggccaccccaccgtgctggagagcaacagcgacttcaaggtgatccccaccttcgtgaccgagaacaacgtgatcaagagcctgaccggcagctacgccaagctgcccagccccgagcccagcatgagccccaagatgcacagaagaagaagcagaaccagcagcgcctgccacatcctgatcaacaaccccatcaacgcctgcgagctgagccccaagggcaaggagcaggccatggacctgatcatccaggacaccgacgagaacaccaacgtgcccgagatcatgcccaagctgcccaccgacctggccggcgtgtgcagcagcaaggtgtacgtgggcaagaacaccagcgaggtgaaggaggacgtggtgctgggcaagagcaaccaggtgtgccagagcagcggcaaccacctggagaacaaggtgacccacggcctggtgaccgtggagggccagctgaccagcgacgagagaggcgcccacatcatgaacagcacctgcgccgccatgcccaagctgcacgagccctacgccagcagccagtgcatcgccagccccaacttcggcaccgtgagcggcctgaagcccgccagcatgctggagaagaactgcagcctgcagaccgagctgaacaagagctacgacgtgaagaaccccagccccctgctgatgcagaaccagaacaccagacagcagatggacacccccatggtgagctgcggcaacgagcagttcctggacaacagcttcgagaaggtgaagagaagactggacctggacatcgacggcctgcagaaggagaactgcccctacgtgatcaccagcggcatcaccgagcaggagagacagcacctgcccgagaagagataccccaagggcagcggcttcgtgaacaagaacaagatgctgggcaccagcagcaaggagagcgaggagctgctgaagagcaagatgctggccttcgaggagatgagaaagagactggaggagcagcacgcccagcagctgagcctgctgatcgccgagcaggagagagagcaggagagactgcagaaggagatcgaggagcaggagaagatgctgaaggagaagaaggccatgaccgccgaggccagcgagctggacatcaacaacgccgtggagctggagtggagaaagatcagcgacagcagcctgctggagaccatgctgagccaggccgacagcctgcacaccagcaacagcaacagcagcggcttcaccaacagcgccatgcagtacagcttcgtgagcgccaacgaggcccccttctacctgtggggcagcagcaccagcggcctgaccaagctgagcgtgaccagacccttcggcagagccaagaccagatggagccaggtgttcagcctggagatccaggccaagttcaacaagatcaccgccgtggccaagggcttcctgaccagaagactgatgcagaccgacaagctgaagcagctgagacagaccgtgaaggacaccatggagttcatcagaagcttccagagcgaggcccccctgaagagaggcatcgtgagcgcccaggacgccagcctgcaggagagagtgctggcccagctgagagccgccctgtacggcatccacgacatcttcttcgtgatggacgccgccgagagaatgagcatcctgcaccacgacagagaggtgagaaaggagaagatgctgagacagatggacaagatgaagagccccagagtggccctgagcgccgccacccagaagagcctggacagaaagaagtacatgaaggccgccgagatgggcatgcccaacaagaagttcctggtgaagcagaaccccagcgagaccagagtgctgcagcccaaccagggccagaacgcccccgtgcacagactgctgagcagacagggcacccccaagaccagcgtgaagggcgtggtgcagaacagacagaagcccagccagagcagagtgcccaacagagtgcccgtgagcggcgtgtacgccggcaagatccagagaaagagacccaacgtggccaccatctag

SEQ ID NO: 343448 - DNA, 3039 bp, Artificial Sequence
  derived and/or modified sequence
atggaggaatacgagaagttctgcgagaaaagcctcgccaggatacaggaagcatccctgagtactgagtcatttctgccagcccagtctgagtccatcagcctaattagatttcacggcgtggctatcctatcaccgctgcttaatatagagaagaggaaggagatgcaacaggaaaagcaaaaggctctggatgtggaagcgagaaagcaagtcaaccgcaagaaggccctgttaactcgagtgcaagaaatcctggacaatgtgcaggtgcggaaagctcctaatgcaagcgactttgaccagtgggaaatggaaactgtctactctaatagcgaggtccggaacctgaacgtgcccgcaacctttccgaattccttcccatcccataccgagcactcaacagccgccaagctcgacaaaatcgccggcattttacctctggacaatgaggatcagtgtaagacagacggcatcgacctggcccgcgactcagaaggctttaactccccgaagcagtgcgactcatcaaatatttcccatgtggaaaacgaggcatttccgaaaacttcctctgctacaccacaggagactctcatttccgatggcccattcagtgtaaatgaacagcaagaccttcccctcttggcagaggtcatcccagatccctatgtgatgtctttacagaacttaatgaagaaatccaaggagtatatagaacgcgagcagagtcgccgctctctcaggggctcaatcaatcgcattgtcaacgagtctcacctggataaggagcacgatgctgtggaggtagccgattgcgtgaaagaaaaaggccagctcacaggtaagcactgcgtatctgtgattcctgacaagcctagcctgaacaagtccaacgtgctcctccagggggcttctacccaggcttcaagtatgtcaatgccagtgctggcctctttttctaaggtagacatccccatcaggaccgggcatcctactgttcttgagtccaattcagactttaaggtgatcccgacatttgtgaccgagaataacgttattaaaagcctgaccggaagttatgcaaaactgcccagccccgaaccttcgatgagccctaagatgcaccggcgcagatcaaggaccagctccgcctgccacatcctgatcaataaccccatcaacgcgtgtgaactgtcaccaaaggggaaagaacaggctatggatttaataatccaagatacggacgagaacaccaacgtccctgaaatcatgcccaagctgccaactgacctcgcaggcgtgtgtagctccaaagtgtacgttggcaaaaacacatccgaggtgaaagaggacgtggtcctcggtaagtcaaatcaggtgtgtcaaagctcaggtaatcacttggaaaacaaggtcactcatggcctggtgacagtagaggggcagctgacatccgatgagcgtggtgctcatattatgaatagtacttgtgctgccatgccaaagctgcatgagccttatgcgtcgtcacagtgtattgcctctccgaattttggcacggtgtctgggttaaagccagcctctatgctcgagaagaattgttcacttcaaacggagctaaacaaaagctatgatgtgaagaatccctctcctcttttgatgcagaatcagaatacccggcagcaaatggacacacctatggtcagctgcgggaatgagcagttcctggataacagcttcgagaaagtaaaacgccggttggacctggacatcgacgggcttcagaaggaaaactgcccttatgtgattaccagtggcatcacagagcaggaaaggcagcacctgcccgaaaagcgatacccgaagggctccggcttcgtgaacaagaataaaatgctaggcacctccagtaaagaatccgaggagctgctcaaatctaagatgctggctttcgaagagatgcggaaaagattagaggagcaacatgcacaacagttgtctctgctgatagctgaacaagaaagggaacaagaaagactgcagaaggaaatcgaagagcaggaaaagatgttgaaagagaagaaggcaatgaccgcagaggcttccgagctggatatcaataacgccgttgagctggagtggcgaaagatatcagactcatcacttttggagacaatgctgtcacaggccgactcactgcatacatccaatagcaactcaagcgggtttacaaatagcgcaatgcagtacagttttgtgagtgcaaatgaggctcctttttatttgtggggttcttctaccagcggtctaaccaagctgtctgtgacacgaccctttggacgcgccaaaacgagatggtcccaggttttttctttggagatccaagcaaaattcaataagatcacagccgtggccaaaggcttccttacaagacggctgatgcagaccgacaaactgaagcagctccggcagacagtcaaagatactatggagttcatcagatcgtttcagagcgaggcccccctcaagcgcggcattgtctccgctcaagatgccagtttacaagaaagggtcctggcccagctgcgagccgccctgtatgggatccatgatatcttttttgtgatggacgctgctgagcggatgagtattctgcaccacgatagagaggtgagaaaggagaaaatgctgcgccagatggataagatgaaatcacctagagtggcactttcagcggcaactcaaaaaagtctggatagaaagaaatatatgaaggcggctgagatgggtatgccgaataagaagtttctggtcaagcagaatccatccgagacgagggtgctgcagccaaaccaagggcagaatgcccctgtgcacaggctactaagccgccagggaacgccaaagaccagtgtgaagggtgtcgttcagaaccgtcagaaaccctcacagtcccgtgtcccaaatagagtgcctgttagcggcgtatatgcgggcaagatccagagaaaacgccctaatgtggcgacaatttag

SEQ ID NO: 343449 - DNA, 3039 bp, Artificial Sequence
  derived and/or modified sequence
atggaggagtatgagaagttctgtgagaagagcctggcccgcatccaggaggccagcctgagcacagagagcttcctgcctgcccagagcgagagcatcagcctcatccgcttccatggagtggccatcctgagccccctgctgaacatcgagaagaggaaggagatgcagcaggagaagcagaaggccctggatgtggaggccaggaagcaggtgaacaggaagaaggccctgctgaccagggtgcaggagatcctggacaacgtgcaggtgaggaaggccccaaatgccagtgactttgaccagtgggagatggagaccgtgtacagcaacagcgaggtgaggaacctgaatgtgcctgccaccttccccaacagcttccccagccacacagagcacagcacagctgccaagctggacaagattgctggcatcctgcccctggacaatgaagaccagtgcaagacagatggcatcgacctggcccgggacagcgagggcttcaacagccccaagcagtgtgacagcagcaacatcagccacgtggagaatgaggccttccccaagaccagcagcgccaccccccaggagaccctcatcagtgatggccccttctctgtgaatgagcagcaggacctgcccctgctggccgaggtgatcccagacccctacgtgatgagcctgcagaacctgatgaagaagagcaaggagtacatcgagcgggagcagagcagaagaagcctgcggggcagcatcaacagaattgtgaatgaaagccacctggacaaggagcatgatgctgtggaggtggccgactgtgtgaaggagaagggccagctgaccgggaagcactgtgtgtctgtcatcccagacaagcccagcctgaacaagagcaatgtgctgctgcagggcgccagcacccaggccagctccatgtccatgcctgtgctggccagcttcagcaaggtggacatccccatcagaacaggccaccccaccgtgctggagagcaacagcgacttcaaggtgatccccacctttgtgacagagaacaacgtcatcaagagcctgaccggcagctatgccaagctgcccagccctgagcccagcatgagccccaagatgcacagaagaagaagcaggaccagcagcgcctgccacatcctgatcaacaaccccatcaatgcctgtgagctgagccccaagggcaaggagcaggccatggacctgatcatccaggacacagatgagaacaccaacgtgcctgagatcatgcccaagctgcccacagacctggccggcgtgtgcagcagcaaggtgtatgtgggcaagaacaccagcgaggtgaaggaggatgtggtgctgggcaagagcaaccaggtgtgccagagcagcggcaaccacctggagaacaaggtgacccacggcctggtgacagtggagggccagctgaccagtgatgagcggggggcccacatcatgaacagcacctgtgccgccatgcccaagctgcacgagccctatgccagcagccagtgcatcgccagccccaactttggaacagtgtctggcctgaagccagcctccatgctggagaagaactgcagcctgcagacagagctgaacaagagctatgatgtgaagaaccccagccccctgctgatgcagaaccagaacacccggcagcagatggacacccccatggtgtcctgtggaaatgagcagttcctggacaacagctttgagaaggtgaagaggcggctggacctggacattgatggcctgcagaaggagaactgcccctacgtgatcaccagcggcatcacagagcaggagcggcagcacctgcctgagaagcgctaccccaagggcagcggctttgtgaacaagaacaagatgctgggcaccagcagcaaggagagcgaggagctgctgaagagcaagatgctggcctttgaggagatgaggaagaggctggaggagcagcacgcccagcagctgagcctgctgattgctgagcaggagcgggagcaggagcggctgcagaaggagattgaggagcaggagaagatgctgaaggagaagaaggccatgacagctgaggccagcgagctggacatcaacaatgctgtggagctggagtggaggaagatcagtgacagcagcctgctggagaccatgctgagccaggccgacagcctgcacaccagcaacagcaacagcagcggcttcaccaacagcgccatgcagtacagctttgtgtctgccaatgaggcccccttctacctgtggggcagcagcaccagcggcctgaccaagctgtctgtgacccggcccttcggccgggccaagacccgctggagccaggtgttcagcctggagatccaggccaagttcaacaagatcacagctgtggccaagggcttcctgacccggcggctgatgcagacagacaagctgaagcagctgcggcagacagtgaaggacaccatggagttcatccgctccttccagagcgaggcccccctgaagaggggcatcgtgtctgcccaggatgccagcctgcaggagcgggtgctggcccagctgcgggccgccctgtatggcatccatgacatcttctttgtgatggatgctgctgagaggatgagcatcctgcaccacgaccgggaggtgaggaaggagaagatgctgcggcagatggacaagatgaagagcccccgggtggccctgtctgctgccacccagaagagcctggacaggaagaagtacatgaaggctgctgagatgggcatgcccaacaagaagttcctggtgaagcagaaccccagcgagaccagggtgctgcagcccaaccagggccagaatgcccctgtgcaccggctgctgagccggcagggcacccccaagacctctgtgaagggcgtggtgcagaaccggcagaagcccagccagagccgggtgcccaacagagtgcctgtgtctggagtgtatgccggcaagatccagaggaagaggcccaacgtggccaccatctag

SEQ ID NO: 343450 - DNA, 5404 bp, Artificial Sequence
  derived and/or modified sequence
ggagtcggggtggcagcggcggcggttgccaggagcccgcgttgcagcctgagatccgtaatatggcggggaggaggaggagaaggcggcggcggaccgagctgcgctctgtcagtaccatttgagccattcgcttcctgacaaggcccgtggcgaggggagaggagctgaaggggccgtgggggatcagtgtgactgtgggaagatggaggagtatgagaagttctgtgaaaaaagtcttgccagaatacaagaagcatcactatccacagagagctttctccctgctcagtctgaaagtatctcacttattcgctttcatggagtggctatcctttctccactgcttaacattgagaaaagaaaggaaatgcaacaagaaaagcagaaagcacttgatgtagaagcaagaaagcaggttaacaggaagaaagctttactgactcgtgtccaggagattcttgacaatgttcaggttagaaaagcacctaatgccagtgattttgatcagtgggagatggaaacagtttactctaattcagaagtcagaaacttgaatgttcctgctacatttccaaatagctttccaagccatacggaacactctactgcagcaaagcttgataagatagctgggattttgccattggataatgaggaccaatgtaaaactgatggaatagacttagctagagattcagaaggatttaattctccgaagcaatgtgatagttccaatattagtcatgtagaaaatgaagcttttccaaagacctcttcagcaaccccacaagaaactcttatttctgatggtcccttctcagtaaatgaacaacaggatctaccacttttggcagaagtcatcccagatccctatgtaatgagtcttcagaatctgatgaaaaagtcaaaggaatatatagaaagagaacaatctagacgcagtctgagaggtagtatcaacagaattgttaatgagagtcatttagacaaagaacatgatgctgttgaagtggctgactgtgtaaaagagaaaggccagttgacaggcaaacactgtgtctcagttattcctgacaaaccaagccttaataaatcaaatgttcttctccaaggtgcttccactcaagcaagcagcatgagtatgccagttttagctagcttttcgaaagtggacatacctatacgaactggccatcccactgttctagagtctaattctgattttaaagttattcccacttttgttaccgaaaataatgttatcaaaagtcttacaggttcatatgccaaattacctagtccagagccaagtatgagtcctaaaatgcaccgaagacgttccaggacatcatcagcgtgtcatatacttataaataacccaataaatgcctgtgaattaagccctaaaggaaaagaacaggcaatggacttaattattcaagatactgatgaaaacacaaatgtgcccgaaattatgccaaagttaccaactgatttagcgggagtttgttcaagcaaggtttatgtgggcaaaaatacatctgaagtcaaagaagatgtggttttaggtaaatcaaatcaggtatgtcaatcttcaggaaatcatttagaaaataaagttactcatggacttgttactgtggaaggtcagttaacatccgatgagagaggcgcacacataatgaacagtacctgtgctgcgatgccaaagctgcatgaaccatatgccagcagtcagtgtatagcaagtccaaactttggaactgtgagtggactcaagccagccagtatgttagagaaaaactgcagtttgcaaacagaactgaataagtcttatgatgtaaaaaacccttctcctttattgatgcaaaaccagaatacgagacagcagatggacacacctatggtgtcctgtggaaatgaacaatttttggataacagttttgagaaagttaaacggagacttgatttagatattgatggtttgcaaaaagaaaactgcccttatgtcataacaagtggaataactgaacaagaaaggcaacatttgccagaaaaaagataccctaagggatctggcttcgttaacaagaataaaatgttaggaactagttccaaagaaagcgaggagttactaaaaagcaagatgttagcttttgaagaaatgcggaagagactagaagaacagcacgcccagcaattatcactactcatagctgagcaggaaagggaacaagaaagactgcaaaaggaaatagaagagcaggagaaaatgttaaaagagaagaaggcaatgacagcggaagcctctgagttggacattaacaatgcagtggaattagaatggagaaaaataagtgactctagtttgctggaaacaatgctgtctcaagcggactcactccatacttcaaattcaaatagttctggtttcacaaattctgccatgcaatatagctttgtttctgcaaacgaagcaccattctacctctggggatcatcaactagtggcttgaccaaactctcagtaacaaggccttttggaagagccaaaactagatggtctcaagtttttagtctggaaatacaagcaaaatttaacaaaataactgcagtggcaaaaggatttcttactcgtagacttatgcagacagataagctgaagcaacttcgacaaactgtaaaagatactatggaattcataagaagttttcagtcagaagcaccattaaagagaggcattgtttcagctcaagatgcttcacttcaggaaagagtgttagctcagttgcgagctgccttgtacggtattcatgacatattctttgtaatggatgcagctgaaagaatgtctattctacatcatgatcgagaagttcgcaaagagaaaatgctcaggcaaatggataaaatgaaaagtccacgagtggctctttcagctgcaacacagaagtctcttgataggaagaaatacatgaaagctgctgaaatgggaatgccaaataagaaatttctggttaaacaaaatccttctgaaacaagagtccttcagccaaaccaaggacagaatgcacctgttcataggctacttagtagacaaggaacccctaagacatcagtgaagggggttgtgcaaaatagacagaagccttcacagagcagagtgcctaacagagtgcctgtttcaggagtatatgcaggaaaaatccaaagaaagcggccaaatgttgcgacaatttaagaagacaacattcattaggataaaatggggggaaggattattattcatgttattttccctgcccaagactttatttaaccctggactccgtttacacagacaaagtgacatcagaaggctgagcacttatctggatcatttggtcagtttggtaattcctgctccacacccctattttcctcttaataatacgtttgggtgaagacaaattagtgtttagtaattgcatcatctctgtgcttacctatacaaacataagtttattttatatgcccagatgtctacagagaccctttttgtaaatgtcaaggacatttggatttacttttacagaatattgaaaagataagacaaattataaataagttctaaaacataaatttaattcatctctgcatagtgatttttgaatttgattcaaagggaaattattgcagaagaatgcctttccctcattttataactttaaaaacttggattaaccactcaatgtccactttctttgacttacagtataaccatgtagccaattgtggcccactaaaatctacagaagttaatgtgggtcaccattttggtcagaagcatacattcctgtcagacaactagttgtctgacagaaatgttaggcttcatgtatgttaccccagtactgttagaaacatttgtactaggttataagatctttctgtgacaggtaacaaatttggggaagacagcacaatcttcttgaatgtagctcttgggaatgcattattacatccatttctgtaacataataatatgttgcatgcagttatattttctatttagtctgtatattttgttcttcatagtctgttttttctagcatgcttgatttaggagagaataaagggctatataataataaatccagatttccggataagaatattgcctggttaaaattctgcattgcttaaagacacccatgtttaagatttttcatcactaacatatccattaaaagtatcaactggccaggcagggtggctcacgcctgtactcccagcattttgtgaggccaaggtgggtggatcacctgaggtcaggagtttgagaccagcctgaccaaacatggcgaaaccccatctgtactgaaaatacaaaaattaggcatggtggtgcatgcctgtagttccagctacttgggaggctgagacaggcgaattgcttgaacctgggaggcagaggttgcagtgagctgagactgtgccattgcactccagtcgggttaacagagcaagacactgtctcaaaaaaaaaaaaaaaaaaaagtatcaaccaacaaatgttaccaagataacgtgacttcatgagggagaatgtcactattaatttatcataccatttccaaaaagggctttgtgcttttcacataaaattgagacagtgtatatttaatctaatttaaattttaaagagatactggtattttgaaaatgcaacctatatatattcttaatatccttttaagaatatggagatgaagattgttttctccaattttctgtgccattttaaatttaactttgacatccagctatagacagaaataataagccaccctgggtgtaaacttgattttctttattgagatgtatcatgtattgaatgagtgaaccagaaaattagaagatggtcaaaaaaagtccaagttaccaattttttaaaatttataggcaaagtatcaaattgtcttcttaatatgataaactgtgctttatcattctgaaaactcaggatacagcttattcatagcattgtgggtctctccagtaagaaagatgctaaaagttttgtgcactttttgtgtgtgtaatgcaaattagttaaaacaaatagttttggagaaagttaaaactagctttagagtaaggatgagaaacttgagtgtttttaatttaaagataaaagcctgtgttttacacattcttttttggtgttcatagcttcttctcatacaggtgccagacactgtttgtgcttttgatggatttttatttatatactttttttgcttatttttactttgagtggaatgttcattaatgtaaattgtatttatttttatacttttattttcactagttttgcttctaggcaaaaagcaaaataaacttttcatcttaaagaaaa

SEQ ID NO: 343451 - DNA, 3039 bp, Artificial Sequence
  derived and/or modified sequence
atggaggagtacgagaagttctgcgagaagagcctggcccggatccaggaagcttcgctgtcaacagagtcgtttttgccagctcagtccgaaagcatttctttgattcgctttcacggcgtggccattctgtccccactactaaatatcgagaaacggaaggagatgcagcaagaaaagcagaaagccttagacgttgaggcaagaaaacaggttaaccggaagaaggcactgctaactcgcgtgcaggaaattctggacaacgttcaggtgagaaaggccccaaatgccagcgactttgatcagtgggagatggaaacagtgtattccaactccgaggttcgtaatttgaatgtccctgccacctttccaaatagtttcccttcccacactgagcatagcaccgccgccaagctggacaagattgcgggaattctaccactggataatgaagaccagtgtaagaccgacggcatagatctggcgcgagactctgagggtttcaactctcccaagcagtgtgattcttccaacatcagtcacgtggaaaacgaagccttccctaagacaagcagtgctactccacaagagaccctgatttcagacggtccttttagtgtgaatgaacagcaagaccttccattacttgctgaagttattcccgatccctatgtgatgtctctccagaacctgatgaagaaaagtaaagaatacatagaacgcgaacagtcccgtaggtccctccggggttccattaatcgcattgtcaacgaaagtcacctggacaaggagcacgatgccgtggaggttgcagattgcgtgaaggagaaaggtcagctgaccgggaaacattgcgttagcgttattcctgacaagccgtccctgaacaaaagtaacgtccttttgcagggtgcttctacacaggcctcctccatgagtatgcccgtgctcgcctcttttagtaaagtcgatatccccattaggacagggcaccccaccgtgcttgagtcgaattccgacttcaaagtaattccaaccttcgtgaccgaaaacaacgtgattaagtccttaactggtagctatgcaaagctcccttctcccgaaccatccatgtcgccgaagatgcaccgcaggagatctcgaacctccagcgcgtgtcacatactgataaacaacccgatcaacgcctgcgaattgagcccaaaaggcaaggaacaagctatggatttgatcattcaggacactgacgagaataccaacgtgcctgaaattatgcctaagttgcctactgacctggccggtgtttgctccagcaaggtatacgtgggtaagaacaccagtgaggtaaaggaggatgtggtgcttggaaaaagcaaccaggtgtgtcagtcctccggcaaccatttggagaataaagtgacccacgggctcgttacagtggaaggccagctgacaagtgatgagcggggagctcacataatgaactctacgtgcgcggccatgccgaagttacacgagccgtatgcctcatcccagtgtattgctagccccaacttcggtaccgtgagtgggctaaagcctgcctctatgctggagaaaaattgtagtcttcagacggagctgaataaatcgtatgatgtcaagaatcccagccctcttctgatgcagaatcagaatactcgtcagcagatggacaccccaatggtctcgtgcgggaacgagcagttcctagacaacagttttgagaaggtcaagagacgactggacttagacattgacgggctgcagaaagagaactgtccctatgtaataacctccgggattaccgagcaggagaggcaacacctccccgagaagagatatccaaaaggctccggatttgtcaacaaaaataagatgctggggacttcttctaaggagtcagaagagctacttaaatctaagatgctcgctttcgaggagatgcgtaagagactggaggaacaacacgcccagcagctgtcccttcttatcgcggaacaggagagggagcaggaaagactccagaaagagattgaagagcaggaaaaaatgctgaaggagaaaaaggcaatgacagctgaggccagtgagctagatattaataacgccgtcgagctggagtggcggaaaattagcgattcatctttgctggagactatgctgtcgcaggccgatagtctccacacctctaattcaaactcatcaggcttcacaaacagtgccatgcagtactcctttgtatccgcaaacgaggctcccttttacctgtggggatctagcacatctggactgacaaaactctctgtgactcggccttttggcagggctaaaactcggtggtcacaggtgtttagcttggaaatacaggcaaaatttaataagatcacagccgtagccaaaggatttctaaccagacggctcatgcagacggataagctgaagcagctgcggcagaccgtaaaagacactatggagttcatcagaagtttccaaagcgaagctccactgaaaagaggtatcgtttccgcgcaggacgcaagcctgcaggagagagtactagcccaactgagagccgctctctatggaattcacgacattttttttgtcatggacgcggccgagcgaatgtcgattttacatcacgaccgggaagttagaaaagaaaaaatgctgagacaaatggataagatgaaaagccctcgggtagccctgtccgctgcgacccagaaaagccttgaccgtaaaaagtatatgaaagcagctgagatgggaatgcccaacaaaaaattcctggtgaaacagaaccccagcgagacaagggtactccagcctaaccaaggacagaacgcacctgtacatagacttctgagcaggcaggggaccccaaagacctccgtgaagggcgtagtacagaatagacagaagccttcccaaagccgagtacccaacagggttccagtttctggcgtgtatgcagggaaaattcaacgcaagagacccaatgtcgccactatctag

SEQ ID NO: 343452 - DNA, 3039 bp, Artificial Sequence
  derived and/or modified sequence
atggaagaatatgaaaagttctgcgagaagtccctggcgaggatccaggaggcctccctgagtaccgagagctttctccccgcacagtccgagtccatctctctcatccgcttccacggagttgcaatcctctcccctctgttaaacatcgaaaaaagaaaggagatgcagcaggagaagcagaaagcactggatgtggaggctcggaagcaggtaaatcggaagaaagctctcctaacgagggtccaggagattctagataacgtccaggttaggaaggctcctaatgcatctgattttgatcaatgggagatggagacagtgtactcaaacagcgaagtgcgcaatttaaacgtgcccgctacttttccaaactccttcccgtcgcacactgagcacagtactgccgcaaaacttgacaaaattgccggaatcctgcctctagacaacgaagaccaatgtaagaccgatgggattgatttagcgcgagattccgaaggatttaactcgccgaaacagtgcgattccagcaatatatctcacgtggaaaatgaggcttttcctaaaacctcgagcgcgactccacaggaaaccctaatcagcgatgggccattctccgttaatgagcagcaggatctaccattgctagcagaggtgatacctgacccgtatgtgatgagcctgcagaacttgatgaaaaagtctaaggaatacattgagcgggaacagtccagacgatctctgaggggaagtattaacagaatcgttaatgaatcccacctggacaaagagcacgacgcagtggaagtggctgactgcgtgaaagagaagggccagctaaccggcaagcattgcgtatcggtgattcccgataaaccttcactcaacaagtcaaatgtgcttcttcagggcgctagcacccaggctagctccatgagcatgcctgtgctcgcgtctttcagcaaggttgatatacctattagaacaggacatcccaccgtgctggaaagcaactccgactttaaggtcatcccaacattcgtgaccgaaaacaatgtgattaagagtctgactggaagttatgcaaagctgccgagccctgagcccagtatgtcacccaaaatgcacaggcgtaggtccaggacctctagtgcctgtcacatattaattaacaatcccataaatgcttgcgagttatcccctaagggtaaggaacaggcgatggacttaattatccaggacactgatgaaaataccaacgttccggaaattatgccgaagttaccaacagatctggctggggtgtgtagctcaaaagtttatgtgggaaagaacacgagtgaggtgaaggaagacgtggtactggggaagtcaaatcaagtctgccaaagctcaggcaatcatttggagaataaggtgacacacggcctagtcactgtggagggtcaactcacatcggacgaaaggggtgctcatattatgaattcaacttgcgctgctatgcctaaacttcatgaaccatacgctagttcccagtgtattgcctccccaaacttcggcacagtgtccggattaaagccagcatccatgctagagaagaattgtagtctgcaaactgagctgaataagtcttatgacgtgaagaaccctagccctcttcttatgcagaatcaaaacacaagacaacagatggatacgcctatggttagctgcgggaacgaacagttcttggataatagcttcgagaaggtgaaaaggcgattggatttggacattgatgggcttcagaaggagaattgtccttacgtcattaccagcggcatcaccgagcaggaaagacaacacctgccagagaaaagataccctaagggatctggttttgtgaacaaaaataagatgctcggcacttcatcaaaagaatccgaggagctcctgaagtcaaagatgcttgcttttgaggagatgagaaagagacttgaggagcaacacgcgcagcagttatccttgttgatagcagaacaagaacgcgaacaggagaggctgcagaaagagatcgaagagcaggaaaagatgctgaaagagaagaaagccatgaccgcagaggcttctgagctggacataaacaacgcagtggagctcgagtggcgtaagatcagcgattcaagtctgctcgagactatgctgagccaggccgacagtctccacacttctaactccaacagtagcggctttactaactctgctatgcagtatagttttgtaagtgctaacgaagcccctttttacctgtggggatcttcgaccagtggacttacaaaactgagcgtcacgcgtccgttcgggagggcgaaaactagatggagccaggtcttcagcctggaaatccaggccaaattcaacaagatcactgctgtagcaaaagggtttcttacgagacggctgatgcagaccgataaactcaaacaacttcgccagaccgttaaagacactatggagttcatacggtcatttcaatcagaggccccacttaaaagaggtattgtgtccgcacaggacgcttccctgcaggagcgagtcttggcccagctgcgtgccgcactgtacggaattcacgacatcttctttgtgatggacgctgcagagcggatgtctatcctgcaccacgatagggaggtaagaaaagagaagatgttaaggcaaatggataagatgaagtctccgcgagtggcattgagcgcggctacccagaagagcctggatcggaaaaaatacatgaaggccgctgaaatgggcatgcccaataaaaaattcttagttaagcagaacccaagtgaaactcgggtgttacagcctaaccagggtcagaacgccccagtccacagactgttatcccgacaggggactcccaaaacctccgtgaaaggagtggtgcagaatcggcagaaacctagccagtcaagagtgcccaatagggtccctgtatctggcgtctacgcagggaagattcagaggaaacggccaaacgtcgcaactatctag

SEQ ID NO: 343453 - protein, 307 aa, Artificial Sequence
  derived and/or modified sequence
MKLLLDMYKSAPKEQRDKVQLMAAERKAKAEVDELRSRIRELEERDRRESKKIADEDALRRIRQAEEQIEHLQRKLGATKQEEEALLSEMDVTGQAFEDMQEQNGRLLQQLREKDDANFKLMSERIKANQIHKLLREEKDELGEQVLGLKSQVDAQLLTVQKLEEKERALQGSLGGVEKELTLRSQALELNKRKAVEAAQLAEDLKVQLEHVQTRLREIQPCLAESRAAREKESFNLKRAQEDISRLRRKLEKQRKVEVYADADEILQEEIKEYKVGLWAKLCPIHLRIVDAGLLRLVESLGTLEVM

SEQ ID NO: 343454 - DNA, 693 bp, Artificial Sequence
  derived and/or modified sequence
atgcagctgagaccccccctgagcgagcccgccctggccttcgtggtggccctgggcgccagcagcagcgaggaggtggagctggagctgcagggcagaatggagttcagcaaggccgccgtgagcagagtggtggaggccagcgacagactgcagagaagagtggaggagctgtgccagagagtgtacagcagaggcgacagcgagcccctgagcgaggccgcccaggcccacaccagagagctgggcagagagaacagaagactgcaggacctggccacccagctgcaggagaagcaccacagaatcagcctggagtacagcgagctgcaggacaaggtgaccagcgccgagaccaaggtgctggagatggagaccaccgtggaggacctgcagtgggacatcgagaagctgagaaagagagagcagaagctgaacaagcacctggccgaggccctggagcagctgaacagcggctactacgtgagcggcagcagcagcggcttccagggcggccagatcaccctgagcatgcagaagttcgagatgctgaacgccgagctggaggagaaccaggagctggccaacagcagaatggccgagctggagaagctgcaggccgagctgcagggcgccgtgagaaccaacttccagagcttccagctggaggagctgccccccgacaccctgtag

SEQ ID NO: 343455 - DNA, 693 bp, Artificial Sequence
  derived and/or modified sequence
atgcagctccggccaccgctgtctgagcccgccctggctttcgtggtggcactaggggcgtcctcaagtgaagaagtcgaactagagctccaggggaggatggagtttagcaaggcagccgttagccgcgttgtggaagcgtcagacagactgcaacggagagtagaggagctgtgccagcgggtgtactccagaggtgattcggaacccctttctgaagcggcacaggcacacacacgcgagctgggcagagaaaacagacgactacaggacctggctactcagttacaagagaagcaccaccgtatcagcctcgagtacagtgagctgcaggataaggtgactagtgctgagacgaaggtgctggagatggagaccaccgtcgaggatctacagtgggacatcgagaagctgcgtaagcgcgaacagaaactgaataaacatctggctgaggccctggaacagctcaactctgggtattatgtcagcggatccagcagtggttttcagggcgggcagattaccctgtctatgcaaaaatttgagatgcttaatgccgagctagaagagaaccaagagctggccaatagtcgcatggccgaattggagaagttgcaggccgaactgcagggcgcagtgaggacaaacttccagtctttccagttggaggaattaccgccagataccctgtag

SEQ ID NO: 343456 - DNA, 693 bp, Artificial Sequence
  derived and/or modified sequence
atgcagctgcggccccccctgtctgagcccgccctggcctttgtggtggccctgggcgccagcagcagcgaggaggtggagctggagctgcagggccgcatggagttcagcaaggctgctgtgtcccgggtggtggaggccagtgaccggctgcagaggagagtggaggagctgtgccagagggtgtacagcagaggagacagcgagcccctgtctgaggccgcccaggcccacacccgggagctgggcagagaaaatagaaggctgcaggacctggccacccagctgcaggagaagcaccaccgcatcagcctggagtacagcgagctgcaggacaaggtgaccagcgctgagaccaaggtgctggagatggagaccaccgtggaggacctgcagtgggacatcgagaagctgaggaagcgggagcagaagctgaacaagcacctggccgaggccctggagcagctgaacagcggctactacgtgtctggcagcagcagcggcttccagggcggccagatcaccctgtccatgcagaagtttgagatgctgaatgctgagctggaggagaaccaggagctggccaacagcaggatggccgagctggagaagctgcaggccgagctgcagggcgctgtgaggaccaacttccagagcttccagctggaggagctgcccccagacaccctgtag

SEQ ID NO: 343457 - DNA, 693 bp, Artificial Sequence
  derived and/or modified sequence
atgcagctgcggccccccctgagcgagcccgccctggccttcgtggtcgccctaggggcgagttcaagcgaagaggtggaattagaactgcagggccgaatggagtttagcaaggctgctgtgtcccgtgtggtggaagcgtctgataggctccagcgccgggtggaggaactgtgtcaacgagtctattcgcggggagattctgaaccgctctcagaagccgctcaggcacacactcgggaactggggagagagaaccgaagactccaagatctcgccactcaattacaggaaaagcatcataggatcagtctggagtacagcgagctgcaggacaaagtcacatcagctgaaaccaaggtcttagaaatggaaacaacagtggaggacctgcaatgggatatagaaaagctgcggaaacgggagcaaaagctgaataaacatcttgctgaagcgttggagcagctgaatagcggatattatgtgtctgggtcttcaagcggctttcagggtggacagatcactctcagtatgcagaaattcgagatgttgaacgcggagctggaggagaaccaggaactggccaactccagaatggctgagttagagaaactgcaggcggaactccaaggggccgttaggaccaacttccaaagtttccaactagaggaactccccccggatactttgtag

SEQ ID NO: 343458 - DNA, 693 bp, Artificial Sequence
  derived and/or modified sequence
atgcagctccgtccaccactgagtgaaccagccttggcctttgtcgtcgctttgggggcttcctcaagtgaggaagtcgaactcgagctccaaggacgcatggagtttagtaaagcagccgtttctcgggtcgtggaagctagcgacagacttcagaggcgtgtggaggagctttgccagcgggtctactcacggggagacagcgaaccactctcagaagccgctcaggcccacactcgagagctggggcgagagaatcggcgactgcaagacctcgcgacacagctgcaagagaagcaccataggatcagtttggaatactccgagttgcaggacaaggtgacgtctgccgaaactaaagttctggagatggagacaaccgtcgaggacttgcaatgggatatcgagaaactgcgtaaaagggaacagaaactcaataagcacctggctgaggcccttgagcagttgaacagcggatattacgtttcaggaagttcgtctggattccaggggggtcaaatcaccttgagcatgcagaagtttgagatgctcaatgccgaactcgaagaaaaccaagaattagccaacagtcgtatggctgagctagagaagcttcaagcagagctccagggggctgtacgcactaactttcagtcattccagttggaagagctgcctccagacacgctgtag

SEQ ID NO: 343459 - DNA, 1161 bp, Artificial Sequence
  derived and/or modified sequence
ttcaagaacaagaaactggcagagcggctggaacaacggcaggcttgtgaagatgaactccgagaacgaattgagaagttggagaagcggcaggccacagatgatgccacactcctcatcgtcaatcgctactgggcccagctggatgaaactgtggaagcccttctccgatgccatgagagccagggggagctgtcttcagcgcctgaggcacctgggacccaggaggggccaacatgtgatgggactcctctcccagagccggggacatcagagctgagagaccccttgctgatgcagctgcggccccctctcagtgagccggccttggcttttgtggtggcactgggtgccagcagcagtgaggaggtggagctggagctgcaaggccgaatggagttctccaaggcagctgtgtctcgtgtggtagaggcctcagaccgcctacagcgccgggtggaggaactctgtcagcgagtgtacagccgaggggacagtgagcccctcagtgaggcggctcaggcacacacccgagagctgggccgtgagaaccggcgactgcaggacttggccactcagctgcaggagaaacaccaccgcatctcattggagtactccgagctccaggataaagtgacatcggcagagaccaaggtgctggagatggagacaacagtggaggacttgcagtgggacatcgagaagctgcggaagcgagagcaaaagctcaataagcacctggcagaggccttagagcagcttaactctggctactatgtatctgggagctcctcaggcttccaggggggccagatcacactcagcatgcagaagtttgagatgctgaatgcagagttagaggaaaaccaggaactggccaacagccgtatggcagagctggagaaactgcaggccgaacttcagggggctgtgcggaccaacttccaatcattccagctagaagagcttccccctgacaccctgtgactgagcctgtgtcctgtctgcctgcccagccatgctccatcggctgtgagggcagtgcccggagaggccagagggttggagctgcagggacccgtttggacccacagcctctgttctagagatgcttgtataggctgttaattgtgatgaataaacgttcaaccctcggcctgc

SEQ ID NO: 343460 - protein, 132 aa, Artificial Sequence
  derived and/or modified sequence
MRASPCISQPAASWHPRPSALRPTAGSGPDTRTPGTVEDGSAPCPAFRSPAVSPCGEEPCCFQISPAEETLELGRLVSPGNCDTLSPRAAGFYACHVRSLIPCRSTKGRWPLTASAAGLSRHAQCGPSLGLG

SEQ ID NO: 343461 - DNA, 399 bp, Artificial Sequence
  derived and/or modified sequence
atgagagccagcccctgcatcagccagcccgccgccagctggcaccccagacccagcgccctgagacccaccgccggcagcggccccgacaccagaacccccggcaccgtggaggacggcagcgccccctgccccgccttcagaagccccgccgtgagcccctgcggcgaggagccctgctgcttccagatcagccccgccgaggagaccctggagctgggcagactggtgagccccggcaactgcgacaccctgagccccagagccgccggcttctacgcctgccacgtgagaagcctgatcccctgcagaagcaccaagggcagatggcccctgaccgccagcgccgccggcctgagcagacacgcccagtgcggccccagcctgggcctgggctag

SEQ ID NO: 343462 - DNA, 399 bp, Artificial Sequence
  derived and/or modified sequence
atgagagcttcaccctgtatatcccagcccgcggcttcctggcatccgcgccccagtgccctgaggccgaccgcgggatccggacccgatacacgcacccccgggaccgtggaggacggctctgcaccctgtcccgctttcagatccccagccgtaagtccttgcggagaggagccttgttgctttcaaatcagcccagcggaagaaacccttgaactgggacgtctggtgagtcccggtaattgcgacacccttagtccccgagcggcgggcttttatgcctgtcatgtacggtccctcatcccttgtcgctccactaaaggccgctggccactgactgcatccgctgccggcttaagccgccatgcacagtgtgggcccagcctcggcctcggatag

SEQ ID NO: 343463 - DNA, 399 bp, Artificial Sequence
  derived and/or modified sequence
atgcgggcgtcgccttgtatcagccagcccgccgccagctggcacccacgtccaagtgctctgcggccaaccgccggttccgggccagacacccgcactcccgggacggtggaggatggcagcgctccctgtccagccttccgatctccagctgtgagcccttgtggcgaggaaccgtgttgcttccagatttctccggctgaagagaccctggaactgggtaggctcgtatcaccaggaaactgcgatactctttctccgcgggccgcgggattctatgcttgtcatgtgaggtcccttatcccctgtaggagtacgaaaggtcgatggccacttaccgccagtgctgcaggcctgtccagacacgcgcagtgcgggccctctctgggcttgggttag

SEQ ID NO: 343464 - DNA, 399 bp, Artificial Sequence
  derived and/or modified sequence
atgagagccagtccatgcatcagccaacccgccgcaagttggcatccgaggccgagtgcattgaggccgaccgccggctctggccccgatacccgtactcccggcacagtagaggatggatctgccccttgtccagcctttcgcagtccggccgtgagcccctgcggcgaggaaccttgctgctttcagatatctccagctgaagaaacactggagctcggaagactggtctcaccagggaactgcgacactctaagtccccgtgcagcaggattctacgcctgccacgtccgctctctgattccttgcagatctactaagggacgatggccccttaccgctagcgcagctgggctgtctcgccatgctcaatgcggacctagcctggggttggggtag

SEQ ID NO: 343465 - DNA, 399 bp, Artificial Sequence
  derived and/or modified sequence
atgagggccagcccctgcatcagccagcctgctgcctcctggcacccccggcccagcgccctgcggcccacagctggcagcggccctgacaccaggaccccaggcaccgtggaggatggcagcgccccctgcccagccttccgcagccctgctgtgagcccctgtggggaggagccctgctgcttccagatcagccctgctgaggagaccctggagctgggccgcctggtgtccccaggcaactgtgacaccctgagccccagggctgctggcttctacgcctgccacgtgcgcagcctcatcccctgccgcagcaccaagggccgctggcccctgacagccagcgctgctggcctgagcagacatgcccagtgtggccccagcctgggcctgggctag

SEQ ID NO: 343466 - DNA, 412 bp, Artificial Sequence
  derived and/or modified sequence
agtatgcaccgcgatgcgcgcctcaccctgcatctcccagcccgcagccagctggcatcctagaccctctgccctgcgaccaacagccgggagcggaccagacaccagaactcccggaacggttgaagacggttccgctccctgtcccgcctttcgcagcccagcagtttcgccctgcggagaggagccttgctgtttccaaatctctcctgctgaagagacattggagctagggcggctagtttcacctggtaattgtgacaccctgtctcctcgagctgcaggcttttatgcttgtcatgttcgaagtttgataccttgcagatcaacaaagggccggtggcctctcactgcctccgcggcagggttgtcaagacatgcgcagtgcggcccgtccctagggctgggttaa

SEQ ID NO: 343467 - DNA, 399 bp, Artificial Sequence
  derived and/or modified sequence
atgcgggccagcccctgcatcagccagcccgccgccagctggcaccctcggcccagcgccctgaggcctacagctggaagcggcccagacacccgcaccccaggcacagtcgaggacggtagtgctccctgccccgccttccgctctccagctgtttcaccttgcggggaggaaccttgttgttttcaaatttctcctgccgaggaaaccctggaacttggcaggctcgtctcccctggaaattgtgatacactctccccccgtgccgctgggttttatgcctgccacgtgcggagcctgatcccatgccgttccaccaagggccggtggcctctcactgcatccgcagcaggtctaagccggcacgctcagtgtggcccttctctcggattgggctag

SEQ ID NO: 343468 - DNA, 399 bp, Artificial Sequence
  derived and/or modified sequence
atgcgggccagcccctgcatcagccagcccgccgccagctggcaccccagacctagcgccctccggcctacggcgggctcaggaccagacacaagaaccccagggactgtcgaagacggttcagcaccttgtccggcgttcaggtctcctgcggtgtccccctgcggtgaagagccgtgttgcttccagatctcgcctgccgaggagacgctcgagctggggaggcttgtgtcacccggaaattgcgacactttgtcaccccgcgccgccggattctacgcctgccacgtaagatcacttatcccctgtcgttcaacgaaagggcggtggccattgacggcaagtgctgccggtctgtcccggcacgctcagtgcgggccctccttaggcctgggatag

SEQ ID NO: 343469 - DNA, 399 bp, Artificial Sequence
  derived and/or modified sequence
atgcgggccagcccctgcatcagccagcccgccgccagctggcaccctaggccatccgccttacgacctacagccggctctggccctgatacgcggacgcctgggacagtggaagacggctcagcaccctgtcccgcttttaggtctccagcagtctctccgtgcggcgaggagccatgttgcttccagatctcaccagcagaagaaaccttggagttaggccggctagtatcacctggaaattgtgatactttatctccccgggcggccggattctatgcttgtcatgtccgatctctgataccttgccgatccacaaaggggcgatggccattaactgcgagcgccgccggcctgagccggcacgcacaatgcggcccttccctggggctcgggtag

SEQ ID NO: 343470 - DNA, 399 bp, Artificial Sequence
  derived and/or modified sequence
atgagggcctctccgtgcataagccagccagcagcctcctggcatccgcgaccatccgcactccggccaactgctggatcaggccctgacacccgcacacctggaactgtcgaggacggctcagcaccctgccccgcttttagaagccccgctgtaagcccctgcggcgaggagccatgctgtttccagatttcccctgctgaggagacacttgaactggggagacttgtgtccccgggtaattgtgatacactatccccgcgagctgctggcttctatgcctgccatgtccggtctctgatcccctgccgctctactaaaggcagatggccactgactgcctcagctgctggactgagcaggcacgcacagtgcggccctagcttaggtctcggatag

SEQ ID NO: 343471 - DNA, 399 bp, Artificial Sequence
  derived and/or modified sequence
atgcgtgcctccccctgcatttctcagccagcagcctcatggcatccacgcccaagcgctttgcggccaaccgctggctccggaccagatacccggacacccggaactgtcgaggacggttcggcaccttgtcccgcttttcgatctcccgctgtttctccttgcggagaagagccctgttgctttcagatttccccagctgaagagacacttgagctgggaagactggtgtccccgggtaattgtgacacgctttctcccagagcggcaggattttacgcctgtcacgtcaggagcttgattccctgccggtcaacaaaaggcagatggcccctaacagccagcgctgccggattatcccggcacgcacaatgcgggccatctttaggcctggggtag

SEQ ID NO: 343472 - DNA, 399 bp, Artificial Sequence
  derived and/or modified sequence
atgcgcgctagcccgtgcatcagtcagcctgccgcttcttggcatccacggccatctgctctccgccctaccgccggatccgggcctgacactcgaaccccaggcacagtggaggatggatcggcaccctgtccagctttccgtagccctgctgtgagtccgtgtggagaggagccctgctgctttcagatctcacccgctgaagagacccttgagctgggccgtctggtgtctccagggaattgcgacaccctgtcgcccagggccgctgggttttatgcatgccacgttaggtccctgatcccgtgtcggtcaactaaagggagatggccactcacagctagtgccgcagggctcagccgacatgcacagtgcggacccagcttgggtctcggttag

SEQ ID NO: 343473 - protein, 551 aa, Artificial Sequence
  derived and/or modified sequence
MPSETPQAEVGPTGCPHRSGPHSAKGSLEKGSPEDKEAKEPLWIRPDAPSRCTWQLGRPASESPHHHTAPAKSPKILPDILKKIGDTPMVRINKIGKKFGLKCELLAKCEFFNAGGSVKDRISLRMIEDAERDGTLKPGDTIIEPTSGNTGIGLALAAAVRGYRCIIVMPEKMSSEKVDVLRALGAEIVRTPTNARFDSPESHVGVAWRLKNEIPNSHILDQYRNASNPLAHYDTTADEILQQCDGKLDMLVASVGTGGTITGIARKLKEKCPGCRIIGVDPEGSILAEPEELNQTEQTTYEVEGIGYDFIPTVLDRTVVDKWFKSNDEEAFTFARMLIAQEGLLCGGSAGSTVAVAVKAAQELQEGQRCVVILPDSVRNYMTKFLSDRWMLQKGFLKEEDLTEKKPWWWHLRVQELGLSAPLTVLPTITCGHTIEILREKGFDQAPVVDEAGVILGMVTLGNMLSSLLAGKVQPSDQVGKVIYKQFKQIRLTDTLGRLSHILEMDHFALVVHEQIQYHSTGKSSQRQMVFGVVTAIDLLNFVAAQERDQK

SEQ ID NO: 343474 - protein, 177 aa, Artificial Sequence
  derived and/or modified sequence
MPSETPQAEVGPTGCPHRSGPHSAKGSLEKGSPEDKEAKEPLWIRPDAPSRCTWQLGRPASESPHHHTAPAKSPKILPDILKKIGDTPMVRINKIGKKFGLKCELLAKCEFFNAGGSVKDRISLRMIEDAERDGTLKPGDTIIEPTSGNTGIGLALAAAVRGYRCIIVMPEKMSSEK

SEQ ID NO: 343475 - protein, 508 aa, Artificial Sequence
  derived and/or modified sequence
MPSETPQAEVGPTGCPHRSGPHHHTAPAKSPKILPDILKKIGDTPMVRINKIGKKFGLKCELLAKCEFFNAGGSVKDRISLRMIEDAERDGTLKPGDTIIEPTSGNTGIGLALAAAVRGYRCIIVMPEKMSSEKVDVLRALGAEIVRTPTNARFDSPESHVGVAWRLKNEIPNSHILDQYRNASNPLAHYDTTADEILQQCDGKLDMLVASVGTGGTITGIARKLKEKCPGCRIIGVDPEGSILAEPEELNQTEQTTYEVEGIGYDFIPTVLDRTVVDKWFKSNDEEAFTFARMLIAQEGLLCGGSAGSTVAVAVKAAQELQEGQRCVVILPDSVRNYMTKFLSDRWMLQKGFLKEEDLTEKKPWWWHLRVQELGLSAPLTVLPTITCGHTIEILREKGFDQAPVVDEAGVILGMVTLGNMLSSLLAGKVQPSDQVGKVIYKQFKQIRLTDTLGRLSHILEMDHFALVVHEQIQYHSTGKSSQRQMVFGVVTAIDLLNFVAAQERDQK

SEQ ID NO: 343476 - protein, 463 aa, Artificial Sequence [sequence omitted]

SEQ ID NO: 343477 - DNA, 1656 bp, Artificial Sequence
  derived and/or modified sequence
atgccttcggagactccacaggcagaggtcggtccaactggttgtccacataggagtggtcctcactcggcaaaaggcagtctagaaaaggggtctcctgaagacaaagaggcaaaggaacctctatggattcgccctgacgcgccttcacgctgcacttggcagctaggccgaccagctagcgaaagcccccaccaccacaccgctcctgccaaatcaccaaaaatccttccagatatcctcaaaaagatcggcgatactcccatggtccgtataaataaaattggcaaaaagttcggcctgaagtgcgaacttctggccaaatgcgaatttttcaacgccggaggatccgttaaagataggatcagtctgagaatgatcgaagatgctgagagagacggaacattgaagcccggcgatactataatcgaaccaacctccgggaataccggcatcgggctggccctggcagcggctgtgagaggctacaggtgcattatagtcatgcctgaaaagatgtcgagcgagaaggtggatgttttaagggccctgggcgctgaaattgttcggacccccacaaacgccaggtttgacagtcccgaatcacatgtgggggtagcctggcggctgaaaaatgagataccaaattcacatatactcgaccaatacagaaatgcttctaaccctttggcacactatgataccaccgccgacgagattttgcagcagtgcgacggtaaattagacatgctggtggcgtccgtgggcactggcgggaccattacagggatcgcgcggaagctgaaagagaaatgtcctgggtgccgcattattggagtcgatcccgaggggagtatccttgccgagcccgaggaattgaatcagacagagcagactacatacgaggtagaaggaattggatatgactttattcctacggtattggatcggacagttgtggataaatggtttaagagtaacgacgaggaagcctttacttttgccagaatgctgattgcgcaagagggtctgctctgtggaggatcagctggatccactgtggcagtggccgtcaaagccgcccaggagctgcaggaaggacaacgctgcgttgtcatcctgcctgactctgtgcggaactacatgacaaaatttctcagtgacagatggatgctccagaaggggttcttaaaggaggaggaccttacggagaaaaaaccatggtggtggcacctccgagtccaggagctgggcctatccgccccgctgactgtacttccaaccataacctgcggccataccattgaaatcttgagggaaaaaggcttcgaccaggctccggtcgtcgacgaagctggtgtcattttgggtatggtgaccctggggaacatgctgtcctcactgctcgctggaaaggttcagccctcggaccaggtgggaaaggtgatctacaaacagttcaagcagatacgactgaccgatactctagggcgactcagccatatactggagatggatcattttgccctcgtcgtacacgagcaaatccagtaccactcgaccggaaaatcaagtcagaggcagatggtctttggagtggttaccgctattgatctgctgaatttcgtggccgcccaggaaagggaccagaagtag

SEQ ID NO: 343478 - DNA, 1656 bp, Artificial Sequence
  derived and/or modified sequence
atgccatcagagacaccccaggctgaagtggggccaaccggatgtcctcatcgatctgggcctcactccgccaagggaagccttgaaaaggggtcccccgaggacaaggaggccaaggagcccctgtggattagaccagacgcaccatctcggtgcacatggcagctgggccgaccagcctccgagagtcctcatcaccatacagcgccagcaaaatcccctaagatcttacctgacattctcaaaaagattggtgatacgccaatggttcggatcaataaaatcgggaagaaatttgggttgaagtgtgagctcttagctaagtgcgaattcttcaacgctggagggtcggtcaaggataggatctcactcaggatgattgaagacgcagagcgggacggaacactgaagccgggagacactattatagaaccgacaagcggcaacactggaatcggattggcgttggccgctgctgtacgcggctatagatgcatcattgtcatgccggaaaaaatgtcgagcgagaaggtcgacgtcctgagggctctcggagccgagattgtgcgaaccccaacaaacgcccgctttgatagcccagagagccacgtgggagtggcctggagactcaagaacgaaattcccaactcacatatcctggaccagtataggaacgcgtctaaccctctcgctcactatgacaccacagcagacgaaattttgcagcagtgcgacggaaaacttgatatgctcgtcgcttctgtcggtactggcggaaccattacagggatagctcggaagctgaaagaaaagtgtcccggatgcagaatcatcggcgtcgaccccgagggcagtatccttgccgagccagaggagctgaaccagacagaacaaacaacttatgaggtagaagggatagggtatgacttcataccaacggtcctcgatcgcacggtcgtggataaatggttcaagagcaacgacgaggaagcttttaccttcgcgcggatgttgatcgcacaggaaggcctcctatgtggaggctcggctggaagtacagtggccgtcgcagtcaaggctgctcaggaactccaggagggccaacgctgtgttgtgatcctgcccgactccgttaggaattatatgaccaagtttctatctgaccggtggatgttacagaagggtttcttgaaagaggaagaccttactgaaaaaaagccctggtggtggcatctgcgggtccaggagctcggtctcagtgcgcctcttacagtgttacctactatcacttgtggacatactatcgaaattctgcgcgagaaaggctttgaccaagctcctgttgtggacgaagccggagtcattctgggcatggttaccctcggaaacatgctttcctcccttctggctgggaaagttcaaccctcagaccaggtgggtaaggtcatttacaaacaattcaagcagatccgcttaaccgacaccctgggcaggctgtcacatatccttgaaatggaccatttcgctctggtggtgcacgagcagatacaataccacagcaccgggaagagctcccaaagacaaatggttttcggggtggttacggcgatcgatctcctgaacttcgtggccgcacaggaaagagaccagaagtag

SEQ ID NO: 343479 - DNA, 1656 bp, Artificial Sequence
  derived and/or modified sequence
atgcccagtgagactccccaagctgaggttggtcctacgggatgcccgcaccggtccggtccgcactctgctaagggttccttagagaagggttcccctgaggacaaggaggcaaaggaacctctctggattcgccccgacgcgccgtccaggtgcacctggcagctcggtaggcctgcaagtgagagtccacaccatcacaccgctcccgctaagtcacctaagattctgcccgacatattgaaaaagatcggggacacccccatggtcaggatcaacaagattggcaagaaatttggtctcaaatgtgaactgttagcaaagtgcgagttctttaacgccggaggtagtgtcaaagataggatctcactgagaatgatcgaagacgccgagcgcgacggtactctgaagcccggcgatactatcatcgagccaacttctggaaacacaggaatcggccttgcacttgccgcggcagtgcgtggctaccgttgtatcattgtgatgcccgagaagatgagctccgaaaaagttgatgtacttagagcattgggagccgaaattgtgaggacacccactaatgctcgattcgacagtcctgagtcccatgtcggcgttgcctggcggctcaaaaacgaaatcccaaactcacacattctagaccaatatcgaaacgcctccaatccattagcacattatgataccacagctgacgagattctgcagcagtgcgatggaaagctagatatgctggtcgcttctgtaggaaccggcggaaccattacaggaattgcccgaaagttaaaggagaaatgccctggatgtaggattattggcgtcgaccccgagggttcaatactcgcagaacccgaagagctgaaccagaccgagcaaaccacatacgaggtggaagggattgggtacgactttatacctactgtgcttgatcgcaccgtggtggacaaatggtttaagtccaacgacgaagaggcattcacattcgcacgaatgttaattgcacaagaaggcctactgtgtggtggttctgccgggagcaccgttgccgtggcggtcaaggcagctcaagagctccaagaaggccaacgatgcgtcgtcattttacccgactctgtaagaaattatatgactaagtttctcagtgatcgatggatgctgcagaaagggttcctgaaggaagaggacctgacagagaagaaaccttggtggtggcacctcagggtgcaagaactgggtctcagcgccccattgactgtcttgcctacaatcacctgcggccacaccatcgagatccttcgtgaaaaaggtttcgaccaagccccagtggtcgatgaggctggggtcatcctgggtatggtcaccctcggtaatatgctctcaagcttattggctggaaaggtgcagccttcggaccaggtcggaaaggtcatatacaagcagttcaaacagatacgcttgacggacactttaggaaggctctcacatatcctggagatggaccattttgccctcgtggttcatgaacagatccagtaccacagcacgggcaagtcaagtcagcggcaaatggtatttggggtggttaccgcaattgaccttctgaatttcgtggccgcccaggagagagaccagaagtag

SEQ ID NO: 343480 - DNA, 1656 bp, Artificial Sequence
  derived and/or modified sequence
atgccttcggaaaccccacaggcagaggtgggcccaacagggtgtccccatcggtcagggccacactcagccaagggatcgcttgaaaaaggcagcccggaggataaagaagccaaagaacccctgtggatcaggcccgacgctccatctcgctgcacatggcaactgggaaggcctgcttctgagtcgccacatcaccacacagcgcctgctaaaagtccgaagatcctgccggacatactgaaaaagatcggagacacacccatggtcagaatcaacaagattggaaaaaagtttggtttaaagtgcgagcttttggctaaatgtgagttttttaatgcaggcggctcggtaaaagacagaatctccttgcgtatgatcgaagacgcggaaagggatggcactctgaagcccggagacactattattgagcctaccagcgggaatacggggattggcctggcattggccgcggcagtgcggggatacaggtgcatcattgtgatgcctgagaagatgagcagcgagaaggtcgacgtacttcgcgccttgggcgccgagatcgtacgcactcccacaaacgcccgctttgatagccctgagtctcacgtcggcgttgcatggcggttaaagaacgagatccccaatagtcatattcttgatcaatacagaaatgccagcaacccgcttgcccattatgacaccacagcagatgaaatccttcagcagtgcgatggtaaactggatatgctagtagccagtgtgggcacaggcggaactatcacgggcatagcccgaaagctgaaggaaaagtgccctggctgccggattataggagtggatccggagggtagcatcctcgccgaaccggaggaactgaatcagacagagcagaccacatacgaggtggagggtattggttacgacttcatacctactgtgcttgacagaactgtagtcgataaatggtttaagagcaacgacgaagaggcattcaccttcgccagaatgctgattgctcaggaggggttattatgtggtggctctgctgggagtactgtagctgtcgccgtgaaagctgcccaggaactccaggagggacaaaggtgcgtggtgatcctgccagatagtgtgcgcaactacatgaccaagttcctgagcgatcggtggatgctgcagaaaggattccttaaagaggaggaccttaccgagaaaaagccctggtggtggcaccttcgagttcaggagctgggattgtcagctccattaactgtgctacccaccatcacctgcggacacacgattgagatcttgcgtgagaagggcttcgatcaggcccccgtggttgacgaggctggtgttattctcggcatggtgaccctcggtaatatgctgagttctctgctcgcgggaaaggttcagccctcagaccaggtagggaaagtgatttataaacagttcaagcagatccgactgaccgatacactgggccgcttgtctcatattctagagatggaccatttcgcactggttgttcacgagcaaatccagtaccattcgaccggcaaaagcagccagcgccagatggtctttggtgtcgttacagcaatcgacctgctgaacttcgtggccgcgcaggagcgcgatcagaagtag

SEQ ID NO: 343481 - DNA, 534 bp, Artificial Sequence
  derived and/or modified sequence
atgccaagtgagacccctcaggcagaggtaggtcccacaggatgccctcaccggtctgggcctcactcagccaagggatcactcgaaaagggtagtccagaagataaagaagccaaggagccactgtggatacgccccgatgcgcccagccgttgcacctggcaactaggtagaccagcatctgaaagcccccatcaccacacggccccagccaaatcccccaaaattctgcctgacattcttaagaaaatcggggacacacccatggtgcggattaacaagatcggaaaaaagtttggcctgaaatgtgaattgcttgctaagtgtgagttcttcaatgccggtggttccgttaaagacagaatttcgctgaggatgatagaagacgccgaaagagatggtacactgaagccgggggacacgataatcgagcccacaagcggtaacactggaataggcttggccttagccgcagccgtcagaggctatagatgtatcattgtaatgccagagaaaatgtcatctgagaagtag

SEQ ID NO: 343482 - DNA, 1527 bp, Artificial Sequence
  derived and/or modified sequence
atgccttctgaaacacctcaggcggaggtaggcccaactgggtgtccccacagatccggcccccaccatcatacggccccagcaaagagcccgaaaatcttgcctgacatccttaaaaagatcggcgacaccccgatggttcggattaataagattggcaagaaatttggacttaaatgtgagctgctggctaagtgtgagtttttcaacgcagggggctctgtaaaggatagaatttccctgagaatgatcgaagatgccgagcgtgatggaactctgaagcctggtgacaccatcatcgaacctacctctggtaataccggaatcgggctcgctttagccgctgccgttcgcggctatcgctgtatcatcgtgatgccagagaaaatgtcatccgaaaaggtggatgtgttgcgtgcccttggcgctgagattgttagaacacccactaacgctcggtttgactcgccagagagccatgttggggtggcctggcggctgaaaaacgagatccctaactcccacatcctcgaccagtatcgaaacgcatctaaccctctggcccactacgacaccaccgcagatgaaatcctgcagcagtgcgacgggaagttggatatgcttgtcgcttcggtgggcactggtggcaccattaccggcatcgcaaggaaactgaaagaaaaatgccccggatgcaggatcatcggcgtcgaccctgaaggtagtatcctggcggaacccgaggagttgaaccaaacggaacaaactacctatgaggtggaaggaatcggttacgacttcataccgacagtgctagacagaaccgtggtggacaagtggttcaaatccaacgatgaggaagctttcaccttcgcccgcatgctcattgcacaggagggcctgctctgtggaggatccgcaggctccacagtggcagtagctgtaaaggccgcccaggagctgcaagagggacaacggtgtgttgtcatactgccagattccgttcgcaattatatgacaaagttcctcagtgatcgctggatgttacaaaaaggcttcctgaaggaggaagacttgacagaaaagaaaccctggtggtggcacttgcgcgtacaggagctcggcctctcagctcctctgacagtgctgcctactatcacttgtggccacactattgaaatccttcgtgagaaaggctttgatcaggctccagtggtcgacgaagccggagtgatccttggtatggtcacgttaggaaacatgctgagtagtctcctagcgggcaaagttcaacctagtgaccaggttggcaaggtcatatacaagcagtttaagcagattaggcttactgacacacttgggcggctgtcccatatactggagatggatcatttcgcgctggtggttcatgagcagattcagtatcactccaccggcaagtcttctcagagacagatggtctttggtgttgtcacggccatagatctactgaattttgtggctgctcaagaaagggaccaaaaatag

SEQ ID NO: 343483 - DNA, 1392 bp, Artificial Sequence
  derived and/or modified sequence
atggtgaggattaataagataggcaaaaagtttgggctgaaatgtgagctgctggcaaagtgtgaattcttcaacgccgggggctcagtcaaagacagaatctcattgcgcatgatcgaagatgcagagcgggacggcactctgaaacctggggacaccatcatagagcctacatcaggcaataccggaattggcttggcgctcgctgccgccgttagagggtatcgttgtatcatcgttatgcctgagaagatgtccagcgaaaaggtggacgtcctgcgtgcattgggcgctgagatcgtccgtaccccaactaacgctcgctttgactctcctgagtctcacgttggcgtggcctggcgactgaaaaacgaaatcccaaactcacatatactcgatcaataccgtaatgctagcaatccgctggcacactatgacactacagccgacgagatcctccagcagtgcgatggaaagctggatatgcttgtcgcatctgtgggaactggcggtactataacaggcattgcaaggaaactcaaagaaaaatgccctggctgtcggattataggcgtggatcctgagggaagcatcctggccgagcccgaggaactgaaccagactgaacagaccacctatgaagtggagggaatcgggtatgactttattcccactgttctggatcggaccgttgttgataagtggttcaagagcaacgatgaagaggcgttcacctttgcccggatgctcatcgcccaagagggccttttgtgtggcggaagcgcaggctctacagtcgcagtggcagtgaaggctgctcaggaactgcaggagggacaaagatgcgtagtcattcttcctgactctgtcaggaactacatgaccaagttcctgagcgacagatggatgcttcagaagggatttcttaaggaggaggacttgacagaaaagaaaccatggtggtggcatctgagagtgcaagaactagggctgtccgctcccctgacggtgctcccgaccatcacatgcgggcacactatcgagattctgcgcgaaaaaggctttgaccaggcaccagttgtagatgaggcaggtgtgatactggggatggtgacgcttgggaacatgctcagctctctcctggctggcaaagtccaaccctccgatcaggtggggaaggtaatctacaagcagttcaagcaaatccgcctgactgacacgttgggccgactgtctcatatcctcgagatggatcatttcgcactagttgtgcatgaacaaattcagtatcactctactgggaagtcgtcccagagacagatggtctttggagtggttactgcgattgacctgttaaactttgtggccgcacaagagcgggaccagaagtag

SEQ ID NO: 343484 - DNA, 1656 bp, Artificial Sequence
  derived and/or modified sequence
atgcccagcgagaccccccaggccgaggtgggccccaccggctgcccccacaggagcggcccccacagcgccaagggcagcctggagaagggcagccctgaggacaaggaggccaaggagcccctgtggatccggccagatgcccccagccgctgcacctggcagctgggccgcccagccagcgagagcccccaccaccacacagccccagccaagagccccaagatcctgcctgacatcctgaagaagatcggggacacccccatggtgcgcatcaacaagattggcaagaagtttggcctgaagtgtgagctgctggccaagtgtgagttcttcaatgctgggggctctgtgaaggaccgcatcagcctgaggatgattgaagatgctgagagagatggcaccctgaagccaggggacaccatcatcgagcccaccagcggcaacacaggcatcggcctggccctggccgctgctgtgcggggctaccgctgcatcatcgtgatgcctgagaagatgagcagcgagaaggtggatgtgctgcgggccctgggcgctgagatcgtgaggacccccaccaatgccaggtttgacagccctgagagccacgtgggcgtggcctggaggctgaagaatgagatccccaacagccacatcctggaccagtacagaaatgccagcaaccccctggcccactatgacaccacagcagatgagatcctgcagcagtgtgatggcaagctggacatgctggtggcctctgtgggcactggaggcaccatcaccggcatcgccaggaagctgaaggagaagtgccccggctgccgcatcatcggcgtggaccctgagggcagcatcctggccgagcctgaggagctgaaccagacagagcagaccacctatgaggtggagggcatcggctatgacttcatccccaccgtgctggacagaacagtggtggacaagtggttcaagagcaatgatgaggaggccttcacctttgccaggatgctgattgcccaggagggcctgctgtgtggcggcagcgctggcagcacagtggccgtggccgtgaaggccgcccaggagctgcaggagggccagagatgtgtggtgatcctgcctgattctgtgaggaactacatgaccaagttcctgagtgaccgctggatgctgcagaagggcttcctgaaggaggaggacctgacagagaagaagccctggtggtggcacctgcgggtgcaggagctgggcctgagcgcccccctgactgtgctgcccaccatcacctgtggccacaccatcgagatcctgcgggagaagggctttgaccaggcccctgtggtggatgaggccggggtcatcctgggcatggtgaccctgggcaacatgctgagcagcctgctggccggcaaggtgcagcccagcgaccaggtgggcaaggtgatctacaagcagttcaagcagatccggctgacagacaccctgggccgcctgagccacatcctggagatggaccactttgccctggtggtgcatgagcagatccagtaccacagcacaggcaagagcagccagaggcagatggtgtttggagtggtgacagccatcgacctgctgaactttgtggccgcccaggagcgggaccagaagtag

SEQ ID NO: 343485 - DNA, 534 bp, Artificial Sequence
  derived and/or modified sequence
atgcccagcgagaccccccaggccgaggtgggccccaccggctgcccccacaggagcggcccccacagcgccaagggcagcctggagaagggcagccctgaggacaaggaggccaaggagcccctgtggatccggccagatgcccccagccgctgcacctggcagctgggccgcccagccagcgagagcccccaccaccacacagccccagccaagagccccaagatcctgcctgacatcctgaagaagatcggggacacccccatggtgcgcatcaacaagattggcaagaagtttggcctgaagtgtgagctgctggccaagtgtgagttcttcaatgctgggggctctgtgaaggaccgcatcagcctgaggatgattgaagatgctgagagagatggcaccctgaagccaggggacaccatcatcgagcccaccagcggcaacacaggcatcggcctggccctggccgctgctgtgcggggctaccgctgcatcatcgtgatgcctgagaagatgagcagcgagaagtag

SEQ ID NO: 343486 - DNA, 1527 bp, Artificial Sequence
  derived and/or modified sequence
atgcccagcgagaccccccaggccgaggtgggccccaccggctgcccccacaggagcggcccccaccaccacacagccccagccaagagccccaagatcctgcctgacatcctgaagaagattggagacacccccatggtgcgcatcaacaagattggcaagaagtttggcctgaagtgtgagctgctggccaagtgtgagttcttcaatgccggcggctctgtgaaggaccgcatcagcctgaggatgattgaagatgctgagagagatggcaccctgaagccaggggacaccatcatcgagcccaccagcggcaacacaggaattggcctggccctggccgctgctgtgcggggctaccgctgcatcatcgtgatgcctgagaagatgagcagcgagaaggtggatgtgctgcgggccctgggcgctgagatcgtgaggacccccaccaatgccaggtttgacagccctgagagccacgtgggcgtggcctggaggctgaagaatgagatccccaacagccacatcctggaccagtacagaaatgccagcaaccccctggcccactatgacaccacagcagatgagatcctgcagcagtgtgatggcaagctggacatgctggtggcctctgtgggcaccggcggcaccatcactggaattgccaggaagctgaaggagaagtgccccggctgccgcatcattggagtggaccctgagggcagcatcctggccgagcctgaggagctgaaccagacagagcagaccacctatgaggtggagggcatcggctatgacttcatccccaccgtgctggacagaacagtggtggacaagtggttcaagagcaatgatgaggaggccttcacctttgccaggatgctgattgcccaggagggcctgctgtgtggcggcagcgctggcagcacagtggccgtggccgtgaaggccgcccaggagctgcaggagggccagagatgtgtggtgatcctgcctgacagcgtgaggaactacatgaccaagttcctgagtgaccgctggatgctgcagaagggcttcctgaaggaggaggacctgacagagaagaagccctggtggtggcacctgcgggtgcaggagctgggcctgagcgcccccctgactgtgctgcccaccatcacctgtggccacaccatcgagatcctgcgggagaagggctttgaccaggcccctgtggtggatgaagctggggtcatcctgggcatggtgaccctgggcaacatgctgagcagcctgctggccggcaaggtgcagcccagcgaccaggtgggcaaggtgatctacaagcagttcaagcagatccggctgacagacaccctgggccgcctgagccacatcctggagatggaccactttgccctggtggtgcatgagcagatccagtaccacagcacaggcaagagcagccagaggcagatggtgtttggagtggtgacagccatcgacctgctgaactttgtggccgcccaggagcgggaccagaagtag

SEQ ID NO: 343487 - DNA, 1392 bp, Artificial Sequence
  derived and/or modified sequence
atggtgcgcatcaacaagattggcaagaagtttggcctgaagtgtgagctgctggccaagtgtgagttcttcaatgctgggggctctgtgaaggaccgcatcagcctgaggatgattgaagatgctgagagagatggcaccctgaagccaggggacaccatcatcgagcccaccagcggcaacacaggcatcggcctggccctggccgctgctgtgcggggctaccgctgcatcatcgtgatgcctgagaagatgagcagcgagaaggtggatgtgctgcgggccctgggcgctgagatcgtgaggacccccaccaatgccaggtttgacagccctgagagccacgtgggcgtggcctggaggctgaagaatgagatccccaacagccacatcctggaccagtacagaaatgccagcaaccccctggcccactatgacaccacagcagatgagatcctgcagcagtgtgatggcaagctggacatgctggtggcctctgtgggcactggaggcaccatcaccggcatcgccaggaagctgaaggagaagtgccccggctgccgcatcatcggcgtggaccctgagggcagcatcctggccgagcctgaggagctgaaccagacagagcagaccacctatgaggtggagggcatcggctatgacttcatccccaccgtgctggacagaacagtggtggacaagtggttcaagagcaatgatgaggaggccttcacctttgccaggatgctgattgcccaggagggcctgctgtgtggcggcagcgctggcagcacagtggccgtggccgtgaaggccgcccaggagctgcaggagggccagagatgtgtggtgatcctgcctgattctgtgaggaactacatgaccaagttcctgagtgaccgctggatgctgcagaagggcttcctgaaggaggaggacctgacagagaagaagccctggtggtggcacctgcgggtgcaggagctgggcctgagcgcccccctgactgtgctgcccaccatcacctgtggccacaccatcgagatcctgcgggagaagggctttgaccaggcccctgtggtggatgaggccggggtcatcctgggcatggtgaccctgggcaacatgctgagcagcctgctggccggcaaggtgcagcccagcgaccaggtgggcaaggtgatctacaagcagttcaagcagatccggctgacagacaccctgggccgcctgagccacatcctggagatggaccactttgccctggtggtgcatgagcagatccagtaccacagcacaggcaagagcagccagaggcagatggtgtttggagtggtgacagccatcgacctgctgaactttgtggccgcccaggagcgggaccagaagtag

SEQ ID NO: 343488 - DNA, 1656 bp, Artificial Sequence
  derived and/or modified sequence
atgcccagcgagaccccccaggccgaggtgggccccaccggctgccctcataggagtggtccccattcagccaagggaagtctggagaaggggtccccagaagacaaagaggctaaggagcccctctggatcaggcccgacgctcccagtaggtgcacttggcaacttggcaggccggctagcgaatctccacatcaccacaccgcgcccgccaagtccccaaagatcctccctgacatcctaaagaaaattggagatacccctatggtgcggatcaacaagatcgggaaaaagtttggcttgaagtgcgagcttttggccaagtgcgagttcttcaacgctggcggatcagtaaaggaccggattagcctgaggatgatcgaggacgcagagcgggatggaactcttaaaccaggcgacacgattattgaacccacttctggtaacacaggaatcgggcttgctttggccgcagccgtgcggggatatagatgcatcattgtaatgccagagaagatgagctccgagaaggtagacgtattgagagcattgggtgccgagattgtgcgcacacccaccaacgctcgctttgatagccccgagtcccatgtgggcgtagcctggcgcttgaagaacgaaattcctaatagccacatcctggatcaatatcgcaatgcttctaatcctctggctcattatgacactaccgcagacgagattctgcagcaatgtgatggcaagttggatatgttggtagcaagcgtggggaccggtgggactatcacgggcatagcaaggaaactgaaggaaaaatgcccaggctgtagaattattggcgtggatcctgagggatcaatcctggccgagcctgaagaactgaaccagactgagcagacaacatacgaggtggaggggattggctatgatttcattccaaccgtgctggatcgtacggtggtggacaagtggtttaagtccaatgacgaggaggcctttacctttgctcgcatgcttatagcccaggaaggcttgctgtgcggtggtagcgcgggtagtaccgtcgccgtggccgtgaaagccgcccaggagttgcaggaagggcagagatgcgtcgtgattctgccagactcagtgcggaactatatgacgaagtttctctcagatcgttggatgctgcaaaagggctttctgaaggaggaagacctgacagaaaagaagccatggtggtggcacctccgggtgcaggagctgggattgagtgctcctctgactgtcctccctaccattacttgtggacacaccatagagatcctgagggaaaaggggtttgaccaggccccagttgtggatgaggccggagtaattttgggcatggtgacacttggaaatatgctatctagcctcctcgcgggcaaggtgcaaccctcagaccaggtgggtaaggtcatttataagcagttcaagcagatcagactgaccgataccctgggaaggctgagtcatatcctggaaatggatcacttcgcccttgtggtccacgagcagattcaataccattctacagggaaaagctctcagagacaaatggtcttcggagtagttacagccatcgatctgctgaatttcgtagcagcgcaagagcgggaccagaagtag

SEQ ID NO: 343489 - DNA, 1656 bp, Artificial Sequence
  derived and/or modified sequence
atgcccagcgagaccccccaggccgaggtgggccccaccggctgcccacaccgaagtggccctcatagcgcaaaaggctcacttgagaagggctcccctgaggataaggaagctaaggaaccactgtggattagacctgatgccccgtcccggtgtacctggcagttaggcagacctgcctcagagtccccgcaccaccacacagccccagctaagtcccccaaaatccttcctgacattctcaaaaagattggcgacacccctatggtgcggattaacaagattggcaagaaattcggactgaaatgcgaattattagccaagtgcgagtttttcaatgctggaggctctgtgaaagacaggattagccttcggatgattgaagacgccgagcgggatgggacactcaagcccggtgacactattatcgagcccacctcggggaacacaggcattgggttggccctcgccgccgcagttcgtggttacagatgcataatcgtcatgcctgagaaaatgagcagcgaaaaagtggacgtactgagagccttgggcgccgaaatagttcggacgcccaccaatgctagatttgactcacccgagtcgcacgtgggagtggcttggaggctgaagaacgagataccaaactctcacatcctcgaccagtaccgaaacgcgtctaacccgctggctcactacgataccacagcagatgaaattcttcagcagtgtgatggcaagctggatatgttggtggcttctgtcgggactggcggtacaataaccggaatagctcggaaactgaaggaaaaatgccctggatgccggataattggggttgatcctgaggggtctatcttggcagagcccgaagaactaaatcagactgagcagaccacatatgaagtggagggaattggatatgacttcattcccacagtgctggatcgtaccgtagtagataagtggtttaagagcaatgacgaggaggccttcacttttgccaggatgctgatcgctcaggaaggattattgtgtggcgggtctgcgggatctaccgtggctgtcgcagtgaaagccgctcaggagctccaggaaggccagcgttgcgtggtcattttgcccgatagtgtgagaaactacatgaccaaattccttagcgacaggtggatgctgcagaagggcttccttaaagaagaggacttgactgaaaagaaaccatggtggtggcacttacgtgttcaggagctaggcttgtctgcaccccttacggttctgccgacaattacatgtggtcacacgatcgagattctccgggagaagggatttgaccaggcccctgtcgtcgatgaggctggtgtgattctgggcatggtaaccctgggaaacatgctgtcaagtctgcttgccggtaaagtgcagcccagcgatcaagttgggaaggtgatctacaagcagtttaagcaaatacgcctgaccgatacgttagggcgcctatcccacattctggagatggaccactttgctctggtagttcatgagcagattcagtaccactccactggtaagagttctcagcgccaaatggtctttggggtggtgacggccattgacctcttaaattttgttgccgctcaggagagggaccagaagtag

SEQ ID NO: 343490 - DNA, 1656 bp, Artificial Sequence
  derived and/or modified sequence
atgcccagcgagaccccccaggccgaggtgggccccaccggctgcccccacagaagcggccctcatagcgctaaaggtagtctcgaaaagggttcgcccgaggacaaagaggccaaagaaccgctttggattagacccgatgcaccttctcgctgcacttggcagctgggtcgcccagccagtgaatcacctcaccatcacaccgcgcctgccaagtcacccaaaattctcccagacattctgaaaaagatcggcgacacccctatggtgcggattaataaaatcggtaagaagttcgggctaaaatgcgaattgctggccaagtgcgagttctttaatgccggggggagcgtgaaggacagaatttctctgaggatgatcgaggacgccgagcgcgatggaacccttaaacctggagatactattatcgaacctacgtcggggaataccggcatcggccttgccctagcagctgccgttagaggctatagatgcatcatcgtgatgcctgaaaagatgtctagcgaaaaggttgacgtgctcagggcactaggagcagaaattgttcggacacctaccaacgcccgctttgattcgccagaaagccatgtgggtgtggcttggaggttaaagaacgagataccaaactctcacattctcgaccagtatcgtaacgcttcaaatccattggctcactatgatactacagctgatgagatactgcaacagtgcgatggcaagctagacatgctggtggcaagtgtggggacaggcggcaccatcaccggcatcgcacggaaacttaaagagaaatgtccaggctgtaggattatcggcgtcgaccccgagggtagcatactggctgagccagaggagttgaaccaaaccgagcagaccacctatgaggtagaaggcatcgggtacgattttatccccaccgtcctcgacagaactgttgttgataagtggttcaagtcaaacgatgaagaagcttttacgttcgccagaatgcttattgcccaggagggactcttgtgtggtgggtctgcaggatcaactgtcgcggtggctgtcaaggcagcccaagagcttcaagagggccagaggtgcgtggtgattttgcccgacagtgtgaggaactacatgacaaaattcctcagcgaccgctggatgttgcagaaaggattcctgaaggaggaggacctcaccgagaagaagccttggtggtggcacctgcgagttcaggagctggggcttagcgctccgctcaccgtgctccctacgatcacctgtggacatacaattgagattctcagagagaagggttttgaccaagccccggtggttgatgaagccggagtgatcttaggcatggtgaccctcgggaatatgctcagctcattattggcaggcaaggtacagccttctgaccaagtcggcaaggtgatttataagcaatttaaacaaatcaggctgaccgatactcttggaaggctgtcacatatactagaaatggatcatttcgccctggtcgtgcatgaacaaatacaatatcacagcacaggaaaatcatcccaacggcagatggtttttggggtggtgacagccatcgatctgcttaactttgtggcagcccaggagagagatcagaagtag

SEQ ID NO: 343491 - DNA, 1656 bp, Artificial Sequence
  derived and/or modified sequence
atgcccagcgagaccccccaggccgaggtgggccccaccggctgcccccaccggagcggcccccactcagctaaaggctccctcgagaagggttcgccagaagataaagaagcgaaggagcccctatggatacgtcccgatgcacctagtagatgcacatggcaactagggaggcccgcttctgagagcccccaccatcacaccgcaccagccaaatcacctaagatcctgcctgatatcctgaaaaagattggcgacacgccaatggtgcggattaataaaatcggcaaaaagttcggtcttaaatgtgagctcttggccaaatgtgaattcttcaatgctggtggaagtgttaaggaccgcatttcgctgcggatgatcgaagatgcagaaagagatgggaccctcaaacctggtgacaccatcattgaacccacttctggcaacaccgggataggattggcattagccgcagcagtgcgaggatatagatgcattattgtcatgcctgaaaaaatgagctccgagaaggttgatgtcctcagagccttgggtgctgagattgtcaggacacccactaatgcgcgcttcgacagcccagagagtcacgtcggcgtagcttggaggctcaaaaacgagattccaaattctcacatcttagatcagtaccggaatgcgtccaaccccttagcccattatgacactacagctgatgagattctccagcaatgcgatggcaagctagacatgctggtcgcctctgtgggtacaggcgggactatcactggaatagcaaggaaactgaaagaaaagtgtcctgggtgtcggatcataggcgtcgaccctgagggaagcatcttggcagagcctgaagagctcaaccaaacagagcagaccacctacgaggtggagggaatcggctatgactttatccccaccgtgttggaccgcaccgttgtagataagtggttcaagtctaacgatgaagaagcattcaccttcgctcgaatgctgatcgcacaggagggactcctctgcggcggatctgcagggtccacagttgctgtggcggttaaggccgctcaagagcttcaggagggacagcgatgcgttgttatccttccagactccgtaaggaattacatgaccaaatttctcagcgatcgatggatgctccagaaggggttcctgaaggaggaagatctgactgaaaaaaaaccgtggtggtggcatctgagggtgcaggagctcggtttaagcgcccccctcaccgtcttacctactataacttgcggccataccatagaaatcctgcgggaaaaaggctttgaccaggctcccgtagtggacgaagctggagtgattttaggaatggtgacactgggcaatatgctaagtagtctgcttgctggaaaggtgcaaccgagcgatcaggtcggcaaagtgatttataagcaattcaaacagatccggctgaccgacacactgggccggctctcccatatactcgagatggaccattttgccctggtcgtacacgaacagatccagtaccactcaacagggaaaagctctcaacgccagatggttttcggagttgtgactgccatcgacctgttaaactttgttgccgcccaggagagagaccaaaagtag

SEQ ID NO: 343492 - DNA, 534 bp, Artificial Sequence
  derived and/or modified sequence
atgcccagcgagaccccccaggccgaggtgggccccaccggctgcccacaccggtctggcccgcattccgcaaaggggtctctcgagaagggctcaccagaagacaaggaggccaaagagccactgtggatccggcccgatgctccaagccggtgcacctggcagctgggcagacctgcgagtgaatcccctcaccatcatactgccccagccaaatcccctaaaattctgccggacatcctgaagaagatcggagatacgcccatggtccgaattaataaaatcggaaaaaaattcggtcttaaatgtgagctgctagccaagtgcgagttctttaacgccggcggctctgtaaaagatcgtatcagccttaggatgattgaagacgctgaacgggatggtaccctgaagcctggcgacacaattatcgagcccactagcggcaatacaggcatcggcctcgcacttgctgcggctgtgcgtgggtatcgttgcatcatcgttatgcccgagaaaatgtctagcgagaagtag

SEQ ID NO: 343493 - DNA, 1527 bp, Artificial Sequence
  derived and/or modified sequence
atgcccagcgagaccccccaggccgaggtgggccccaccggctgccctcacagatccggcccgcaccaccacaccgccccggcaaagagcccgaagatccttcccgatatactgaaaaagatcggggacacccctatggtgcgtatcaataaaattggcaaaaaattcggcctaaagtgcgaactgctggctaagtgtgaatttttcaatgccggggggtctgttaaggacaggatcagcctcaggatgattgaggatgcagaacgggatgggacacttaagcctggggacacaatcatcgaacccacttctggaaacaccggaattggccttgcgcttgccgcagcagtccgcggttatagatgtattatagtgatgccagaaaaaatgtcttcagaaaaggtcgatgtgttgagggccttgggggccgaaattgttcgaaccccaaccaacgctaggttcgactcaccggaatctcatgtaggagtcgcatggcggttgaagaatgaaattccaaatagccacatcttggatcagtaccgaaacgcaagcaatcctctggctcactatgacaccactgcggatgagatactgcagcagtgtgatggaaagcttgacatgttggtggctagtgtggggactggagggactattacaggaatcgcgcgcaagctgaaagaaaagtgcccaggttgtaggattattggagtcgatcccgaaggcagcatcctggcagaaccagaggagctaaaccagacagagcaaaccacgtacgaggtggagggaattggctacgacttcatacctaccgtgctggaccgcacagtggtggacaagtggttcaaatcaaatgatgaggaagcgttcaccttcgcaaggatgctgatagcccaagaaggactcctgtgtgggggaagtgcaggaagtacagtggccgttgcagtgaaggccgctcaggagttacaggaggggcaacggtgcgtggtcattctccctgattctgtgcggaactacatgacaaagttcctgtccgatcgctggatgcttcagaaaggatttctgaaagaagaggatctaaccgagaaaaaaccgtggtggtggcacttgcgcgttcaagaattgggtttgtctgctccgctgaccgtgctgcctactattacatgtgggcataccattgagattctcagagaaaagggattcgaccaggcccctgtggttgatgaggccggcgtaattctggggatggtgacccttgggaacatgctcagctcactcctcgcaggcaaagtacaacccagtgaccaggtgggtaaagttatatacaaacagttcaaacagataaggttgacggacacacttggaagactgtctcacatcctcgagatggaccatttcgccctagtcgtccacgagcaaatccagtaccacagtactgggaaatccagccagcgtcagatggtgtttggagtggtcaccgctatcgacttgctgaactttgtggcagctcaggagcgtgatcagaaatag

SEQ ID NO: 343494 - DNA, 1392 bp, Artificial Sequence
  derived and/or modified sequence
atggtgcggatcaacaagatcggcaagaagttcggcctgaagtgcgaattgctggccaagtgtgagtttttcaacgcaggcggctctgtgaaggacagaatatctcttaggatgattgaagacgcggagagagacgggaccctcaagccaggggataccatcatagagcccacttcgggcaataccggcatcggcctggcactagcggcggccgtaaggggataccgttgtataattgtcatgcccgagaagatgagctctgaaaaggtagacgtcttgcgcgccctcggcgccgaaattgtgcgcactccgaccaatgcgcggtttgactcccccgaatctcatgtgggcgtggcctggagactcaagaacgaaataccaaatagccatatcctagaccagtaccggaatgcatccaatcctctggcgcattatgatacaactgctgatgagatattacagcaatgcgatgggaagcttgatatgctcgttgcatctgttggcacgggcggtacaataacggggatagcgcggaaactgaaggaaaaatgtcccgggtgcagaatcattggtgtcgatcccgaagggtctatactcgctgagcctgaagaactgaaccaaaccgaacagacaacttacgaggtggaagggatcggttatgatttcatcccgaccgttctggatcggacagtggtggataagtggttcaagagcaatgatgaggaggcctttacattcgcccggatgttgatagctcaggagggattgctgtgcggtggatccgccggcagtacagtcgccgtggctgtgaaagctgcccaggaactccaggagggccagaggtgtgttgtcatactgcccgactctgtgagaaactatatgaccaaatttctgagcgaccggtggatgctgcagaagggctttctgaaagaagaagacctgacggagaagaagccatggtggtggcatcttcgggtccaagagctgggactttccgctcctctaacggttctgcccacaatcacttgtggacacactattgaaattcttcgtgagaaaggctttgaccaggcacctgtggttgacgaggctggggtcatcttgggcatggtcacgctgggaaacatgctgtcctccctcttggccggaaaggtccagccttccgatcaggtcgggaaggtcatttacaaacagttcaaacaaatccgtctcacagacactcttggaaggctgtcacacatcctcgaaatggatcactttgccctggtagtgcatgagcaaattcagtaccatagtaccggcaaatcttcacaacggcaaatggtgtttggcgttgtgacggctattgatctgcttaactttgtcgccgcacaggagcgggatcagaaatag

SEQ ID NO: 343495 - DNA, 1656 bp, Artificial Sequence
  derived and/or modified sequence
atgccctcagagacacctcaagcagaggtgggtcccactggttgtcctcacagaagcggcccacactcagctaagggtagtctggagaaggggtcccccgaggataaagaggcgaaggagcctctctggatccgtccagacgccccttcacgatgtacgtggcagttaggtcgaccagcaagcgagtcgccgcatcatcacaccgctccagccaagtccccgaaaattctgcctgatattttgaaaaagataggggacacacccatggtaaggattaacaagatcggcaagaaattcggcctcaaatgcgagctgctggctaaatgtgagttttttaacgctggaggtagcgttaaagaccggataagtctgaggatgattgaggatgccgaacgcgacggaacccttaaacctggagacacaattattgagcctacaagcggtaatacaggtattggactggcactcgctgctgcagtaagggggtaccggtgtattatagtcatgcccgaaaaaatgtcttcagagaaggttgacgtcctgagggcgctaggggcagagattgttagaacccccacgaatgctcgcttcgactcccccgaatcacacgtcggggttgcttggcgccttaagaacgagattcccaattcccacatcctggaccagtaccgcaacgcctctaaccctctggctcactatgacaccactgccgacgagatcctccagcagtgcgacggaaaactcgatatgctggtagcaagtgtcggaacggggggaactatcacaggtatcgctcgcaagctcaaggagaagtgccctgggtgccgcatcatcggagtggatcccgaagggtccatactagctgaacccgaagaactcaatcaaaccgaacaaactacatacgaagtagaaggcatcggctatgactttatccccaccgtgttagatcggacagtggtggataagtggtttaagtctaatgacgaagaggcttttacgttcgcaaggatgctgatagcacaggaagggctgctgtgcggaggctctgccggaagcacagtggccgttgccgtgaaggccgctcaggagctgcaggaaggtcaaagatgcgtcgttattctcccagactccgtcagaaactacatgacaaagtttctcagtgatcgatggatgttgcagaagggatttctgaaagaggaagatctaactgaaaagaagccatggtggtggcatttgcgggtgcaggagctgggactgtcagccccactgacagtgctccctactatcacatgcggccatactatcgaaattctgcgtgagaaggggtttgaccaggcgccagttgtggatgaggctggagtgatcctcggtatggttacccttggcaacatgttgagcagtctgctggctggtaaagtccagccctctgaccaagttggcaaggtgatctataagcagttcaagcaaataagactgactgacaccctcggtcgcttatcacacatcctggagatggatcacttcgctcttgtcgtccacgagcagattcaatatcatagcacaggcaagtcaagtcagcggcaaatggtgttcggcgtggtgaccgcgatcgacctgctgaacttcgtcgcagcccaggaaagagaccagaagtag

SEQ ID NO: 343496 - DNA, 1656 bp, Artificial Sequence
  derived and/or modified sequence
atgccgtccgagacgccacaagctgaagtaggacccactggctgcccacacagatccggccctcattccgcaaagggaagtctcgagaagggtagcccagaggacaaggaagctaaggaacccctgtggatccgcccagacgctccttcgcggtgtacatggcagctcggcagaccagcaagtgaatccccgcaccaccacacagcgccagccaaatcgccaaagattcttccagatattctgaaaaaaatcggggatactccaatggttaggattaataaaatcggcaaaaagttcggcctcaaatgcgagttacttgccaagtgcgagttcttcaacgcaggcggaagtgtgaaagatagaatcagcctgcgcatgatcgaagatgccgagcgtgatggaacattaaaaccaggtgataccattatcgaacctacatcggggaacacaggaatcggcctggcactcgccgcagcggtgcgtggctatcgatgcataattgtcatgccagagaagatgtccagcgagaaggtggacgttttaagagccctgggtgccgaaattgtgaggactcccaccaatgcccgatttgattctcccgaatcccatgtaggcgtcgcatggcgactgaagaacgagatccctaattctcacattttggaccagtatcgtaacgcttctaaccccctggcccactacgacacgactgcagacgaaatcctccagcagtgcgatggcaaacttgacatgctggtggcatcagtcggcactgggggtactataacgggcatagcgaggaaactgaaagaaaaatgcccaggttgtaggatcatcggcgtggatccagagggtagtatactggccgaacccgaagaacttaatcagacagagcaaaccacatacgaggtggagggcataggctacgacttcatcccaacagtgctggaccgaaccgtggttgataagtggttcaagagtaacgatgaggaagctttcacctttgcgcgaatgctcatcgcccaggagggactcttgtgcggaggatccgctggcagcaccgtcgccgtggccgttaaggcagctcaggagttgcaggagggccagcgatgcgtggtgatacttccagactcagtgcggaattacatgacgaaatttctatccgatagatggatgttacagaaaggatttcttaaggaagaggacctgacagagaaaaaaccttggtggtggcacctgagagtccaggagctcgggctctctgccccactcacggttctgcccacgattacatgtggacacaccatagagatcctaagagagaaaggttttgaccaggccccagtggtggatgaagccggtgtaatcctcggcatggttacactggggaatatgttgagcagtctgctggcaggcaaagtccagcctagtgaccaggtcggcaaggtcatttacaagcaatttaaacagatcaggctgacggacacactcggtaggctctcgcatatattggaaatggatcatttcgctctcgttgtgcacgagcagattcaataccacagtactggcaagtcgtctcaacgtcagatggttttcggcgtagtaacagcaattgacctgcttaacttcgtggctgcccaggaacgcgatcaaaagtag

SEQ ID NO: 343497 - DNA, 1656 bp, Artificial Sequence
  derived and/or modified sequence
atgcctagtgagactccacaggcagaggtgggaccaacaggttgcccacacaggagtggaccacatagcgccaagggtagcctagagaaagggtctcctgaagataaagaggctaaggagccactgtggattcgccctgacgccccatcacgatgcacttggcagctgggacggccagcatccgagagcccccaccatcacactgcacccgctaaatctccgaaaatcctcccagacatactcaagaaaattggggatacccccatggtccggatcaataaaatcggcaagaaattcggtctgaagtgcgagctactggctaaatgtgagttttttaatgctgggggttctgtcaaggaccggatatctctgcgtatgatcgaggacgccgaacgggacggcaccctgaagcccggagacactattattgagcccacttcaggcaacaccggaataggactggctctcgccgctgccgtgcgtggataccgatgtatcattgtaatgcccgaaaagatgagctcagagaaggtggacgttttgcgggctctgggggctgagattgtccggactcctactaatgctcggttcgattccccagaatcccacgtaggagtggcctggcggttgaagaacgagattccaaatagtcacattctcgatcagtaccggaatgcaagcaaccctctggcacattacgacaccacggctgacgaaatcttgcagcagtgcgacggcaagctggatatgctagtggcaagcgttggaaccggcggtactatcacagggatcgcccgaaaactgaaggagaagtgtcctggctgcaggatcataggagtcgatcctgaagggtccattcttgccgaacccgaggaacttaatcagacagagcaaacgacgtacgaggtagaagggataggttacgattttatcccgactgtgctcgacagaaccgtggtcgataagtggttcaaatctaacgacgaagaggcttttacattcgcacgaatgttaatagctcaggagggactgctctgtgggggtagtgccggaagcaccgtggccgtggcggtgaaggctgcccaggagctgcaggaggggcaacgctgcgtggtgatcctccctgacagcgtgcgcaattatatgactaagttcttgtcggatcgctggatgctacagaaggggttccttaaagaagaagatctcacggagaagaagccatggtggtggcacctacgggtgcaggaactaggtctcagcgccccactgaccgtgctcccgaccatcacttgcggccacaccatcgaaatcttaagagaaaaagggtttgaccaagcaccagtcgtcgacgaggctggagtgatcttgggtatggtcactctgggtaacatgctgtcatccctcctcgcaggaaaagtccagccatccgatcaggtaggtaaggtgatctacaagcagtttaagcaaattcgattgactgataccctgggcagactgtcacacatccttgaaatggaccatttcgcgctggtcgtccatgagcagattcagtaccatagcacgggaaaatctagccagcggcagatggtatttggcgtggttacggctatcgatctgctaaattttgtggcagcccaagagcgcgaccagaaatag

SEQ ID NO: 343498 - DNA, 1656 bp, Artificial Sequence
  derived and/or modified sequence
atgccttccgagactccgcaagccgaggttgggcctaccggatgtcctcaccgcagtggtccccattctgcgaaggggtctttagagaaagggtctcccgaagataaggaagcgaaggagcctctctggattagacctgacgcgccatctcggtgcacctggcagctcggtcggcctgcctctgagagcccacaccaccacacagcaccagccaagtctcccaaaattctgccagatatcctcaaaaagatcggcgacactccaatggtgagaatcaacaaaatcgggaagaagttcggattgaagtgcgagttgctggcaaagtgcgagttcttcaacgccggagggtccgtgaaggaccggatttccttgagaatgattgaagatgctgagagggatggcactctgaaaccaggggacacaattatagaaccaactagcggtaataccgggattggcctggctctggccgcagcggtcagagggtatcgctgtattatcgtgatgccagagaaaatgagcagtgagaaggtagacgtcctcagagcacttggcgcagagatcgtcaggacaccaactaatgcacgcttcgactctccagagagccatgtgggggtggcctggagattaaaaaacgagataccaaacagccacattctggaccagtacagaaatgcttctaaccctctggcacactacgatacaacggctgatgaaatcttacagcagtgcgatgggaaacttgacatgctggttgcgtccgtgggcaccgggggtactatcaccgggatcgccaggaagttaaaagagaaatgcccaggatgccgcatcatcggagtcgatccagaggggagtatcttggccgaacccgaagaattaaatcaaactgagcagaccacttatgaggtggaagggatagggtacgattttatccctactgtactcgataggactgtcgttgacaagtggtttaagagtaacgatgaggaggcctttaccttcgccagaatgctgatagcccaggaggggctgctctgtggcggatctgccggatccactgtggctgtagctgtaaaggcagctcaggagctgcaggaaggccagaggtgcgtcgtcattctccctgactcagttaggaattacatgaccaagtttctgagcgacagatggatgctgcaaaaaggattcctcaaagaggaggatctgaccgagaagaagccctggtggtggcacctgcgagttcaagaacttggcctaagtgctcctctcactgtgctacctactattacttgtggccacaccatcgaaatcctccgcgagaagggtttcgaccaggcacccgtggttgacgaggcaggcgttattctcgggatggttacccttggcaacatgctgtctagtctgttagcaggcaaggttcagccttctgaccaggttggtaaggtcatttataagcagttcaagcagataaggctgactgacactctggggcgtctgtcccacatacttgaaatggaccacttcgccctcgttgtacatgagcagatccagtatcactcaaccgggaagagctcccagagacaaatggttttcggcgtagtgaccgcgatcgacctcctgaattttgtagccgctcaggagagagaccagaaatag

SEQ ID NO: 343499 - DNA, 534 bp, Artificial Sequence
  derived and/or modified sequence
atgccaagcgaaactcctcaggccgaggttggaccaacaggctgcccccatcggtctggaccccatagcgccaaaggatcattggagaaggggtctcctgaagacaaagaggccaaagaacctctatggataagaccggatgcccctagtcgctgtacttggcaactcggaagaccggcatccgaatcccctcatcatcataccgcccctgcaaagtcccccaaaattctgcccgacatcttgaagaagataggagatacaccgatggttcgcatcaataaaattgggaagaaattcggcttaaagtgtgagttgctcgctaagtgtgaattttttaacgctggcggttccgtaaaagatcggatttccctcaggatgatcgaagatgccgagcgggacggcaccttgaagcctggtgacacaatcattgagcctaccagtggcaataccgggattggcctggcgctagctgcggctgtgcggggttatcgctgcattattgtaatgcccgaaaagatgtctagtgaaaagtag

SEQ ID NO: 343500 - DNA, 1527 bp, Artificial Sequence
  derived and/or modified sequence
atgcctagtgagacgccccaggctgaggtgggtcccacaggctgcccacaccggtccggcccacaccatcataccgcccctgcgaaatctccaaagatcttgccggacatactgaagaagatcggagacactccaatggtccgtataaacaagattggaaaaaagtttggcctcaaatgcgagcttctcgccaaatgtgagttctttaacgccggaggaagcgtcaaggatagaatctctctgcggatgatagaggatgccgagcgcgatggtacgttgaagccaggtgataccatcatcgagccgaccagcgggaacaccggtatcggacttgcgcttgctgctgccgtacgcggatacaggtgcataatcgttatgccggagaagatgagcagcgagaaagtggatgtgttgcgcgctctgggagccgagatagtcaggaccccaacaaacgcgcgattcgattctcccgagagccacgtgggagttgcctggcgtttaaagaacgaaatcccaaactctcacatcctcgaccagtaccgcaatgctagtaatcctcttgctcactacgataccaccgcagatgaaattttacagcagtgcgacgggaagctcgatatgttggtggctagtgtcggaacgggcggtacgattacagggattgctcggaaactgaaggagaaatgtcccggttgtcgaattattggcgtcgatcctgaagggtccatactagctgagcccgaagagctgaaccagacagagcagaccacatacgaagtcgagggaattggctatgattttattccaacggtgctcgacaggaccgtggtggacaaatggtttaaatccaatgatgaagaggcgtttactttcgccagaatgctgattgcccaggaggggttgttgtgcggaggttccgcaggcagcactgttgccgtggcggtgaaggccgcacaagagctgcaggagggacagcgctgtgtggtgatcctgcctgactctgttaggaattacatgaccaagttcctctctgaccgctggatgctgcagaagggcttcctcaaggaggaggacctcaccgagaaaaaaccttggtggtggcatctacgggtgcaggagctcggacttagcgccccactgaccgtgctgcctaccattacgtgcgggcatacaatagagattctcagggagaagggctttgaccaagcccctgttgtggatgaggcaggggtgatccttggcatggtaacactcggtaacatgttgtccagcctactggcaggcaaggtacaacctagcgatcaagttggaaaagtgatctataaacagttcaaacaaatccgcctgactgacaccttgggacggctgtctcacatactcgagatggaccattttgccttagtggtgcacgagcagatccagtaccactcaacaggaaaaagcagtcagcgtcagatggtcttcggcgtggtgaccgctatcgatcttcttaatttcgtagctgcccaggagcgggaccagaagtag

SEQ ID NO: 343501 - DNA, 1392 bp, Artificial Sequence
  derived and/or modified sequence
atggtccggataaacaagattggaaagaaattcgggcttaaatgcgagctgcttgcgaagtgcgagttttttaatgctggcggaagcgtgaaggacaggatctccttacggatgattgaagacgccgaaagagacggaaccctaaagcctggggacactataatcgagcctacatccggtaacacaggcataggactcgccctggcagctgccgtgcgtggctacaggtgtattattgtgatgcccgagaaaatgtcttcagagaaggtggatgtcctccgggcactaggagcagaaatagtcaggactcctacaaatgcccgattcgactctccagaatctcacgtcggtgttgcctggagactaaagaacgaaataccaaatagtcatatcctcgatcaataccgaaacgcctctaatcctctggcgcactatgacacaacggctgatgaaattctgcagcagtgcgacgggaaattggacatgctcgtggcatccgtagggactggaggcaccataacgggaatcgcgagaaaattgaaggaaaagtgtccagggtgccgaatcattggggtggaccccgaaggcagcattttagcagagcccgaagaattaaatcagaccgagcagactacttacgaggttgagggaatcggttacgatttcatcccgaccgtgttagatcggacagtggttgataagtggttcaagtctaatgatgaggaagcctttaccttcgccaggatgctgatcgcccaggagggtctgttgtgtggcggtagtgctgggtccacagtcgccgtggctgtgaaggcagcccaggaactccaggagggacagagatgcgtggttatcctcccggattctgtgcgcaattatatgacaaaatttctgtcagaccggtggatgctccaaaaggggttcctcaaggaggaggacctgacggagaaaaagccgtggtggtggcacctgcgggtccaggagcttggcctgagcgcccctcttaccgtgttgcctaccattacatgcgggcacactatcgaaatcctacgcgagaagggctttgaccaggcgccagtggtggatgaagccggtgtaatcctcggaatggtcaccctcggtaatatgctgtctagtctcctggcaggcaaggtgcaacctagcgaccaggttggcaaagttatttacaagcagttcaagcagataagactgacggatacacttggaagactgagccacattctggagatggatcacttcgcgctggttgtgcacgagcagatccaatatcacagcaccgggaagagcagccagcgtcagatggtgtttggcgtagtgacggccattgacctgctaaattttgttgctgcccaggagcgcgaccagaagtag

SEQ ID NO: 343502 - DNA, 2583 bp, Artificial Sequence
  derived and/or modified sequence
tcccgggcccgcgacacacgccctcggggtcggtcctcgaggacgcgcagggccccccacccaccaggacgcacgtttcaagctcatcagtaaaggttccttaaattcccgaagggcaagaagttaaccaagtaaaacagcatcggaacaccaggatcccatgacagattctgttgtcacgtctccttacagagtttgagcggtgctgaactgtcagcaccatctgtccggtcccagcatgccttctgagaccccccaggcagaagtggggcccacaggctgcccccaccgctcagggccacactcggcgaaggggagcctggagaaggggtccccagaggataaggaagccaaggagcccctgtggatccggcccgatgctccgagcaggtgcacctggcagctgggccggcctgcctccgagtccccacatcaccacactgccccggcaaaatctccaaaaatcttgccagatattctgaagaaaatcggggacacccctatggtcagaatcaacaagattgggaagaagttcggcctgaagtgtgagctcttggccaagtgtgagttcttcaacgcgggcgggagcgtgaaggaccgcatcagcctgcggatgattgaggatgctgagcgcgacgggacgctgaagcccggggacacgattatcgagccgacatccgggaacaccgggatcgggctggccctggctgcggcagtgaggggctatcgctgcatcatcgtgatgccagagaagatgagctccgagaaggtggacgtgctgcgggcactgggggctgagattgtgaggacgcccaccaatgccaggttcgactccccggagtcacacgtgggggtggcctggcggctgaagaacgaaatccccaattctcacatcctagaccagtaccgcaacgccagcaaccccctggctcactacgacaccaccgctgatgagatcctgcagcagtgtgatgggaagctggacatgctggtggcttcagtgggcacgggcggcaccatcacgggcattgccaggaagctgaaggagaagtgtcctggatgcaggatcattggggtggatcccgaagggtccatcctcgcagagccggaggagctgaaccagacggagcagacaacctacgaggtggaagggatcggctacgacttcatccccacggtgctggacaggacggtggtggacaagtggttcaagagcaacgatgaggaggcgttcacctttgcccgcatgctgatcgcgcaagaggggctgctgtgcggtggcagtgctggcagcacggtggcggtggccgtgaaggccgcgcaggagctgcaggagggccagcgctgcgtggtcattctgcccgactcagtgcggaactacatgaccaagttcctgagcgacaggtggatgctgcagaagggctttctgaaggaggaggacctcacggagaagaagccctggtggtggcacctccgtgttcaggagctgggcctgtcagccccgctgaccgtgctcccgaccatcacctgtgggcacaccatcgagatcctccgggagaagggcttcgaccaggcgcccgtggtggatgaggcgggggtaatcctgggaatggtgacgcttgggaacatgctctcgtccctgcttgccgggaaggtgcagccgtcagaccaagttggcaaagtcatctacaagcagttcaaacagatccgcctcacggacacgctgggcaggctctcgcacatcctggagatggaccacttcgccctggtggtgcacgagcagatccagtaccacagcaccgggaagtccagtcagcggcagatggtgttcggggtggtcaccgccattgacttgctgaacttcgtggccgcccaggagcgggaccagaagtgaagtccggagcgctgggcggtgcggagcgggcccgccacccttgcccacttctccttcgctttcctgagccctaaacacacgcgtgattggtaactgcctggcctggcaccgttatccctgcacacggcacagagcatccgtctcccctcgttaacacatggcttcctaaatggccctgtttacggcctatgagatgaaatatgtgattttctctaatgtaacttcctcttaggatgtttcaccaaggaaatattgagagagaagtcggccaggtaggatgaacacaggcaatgactgcgcagagtggattaaaggcaaaagagagaagagtccaggaaggggcggggagaagcctgggtggctcagcatcctccacgggctgcgccgtctgctcggggctgagctggcgggagcagtttgcgtgtttgggttttttaattgagatgaaattcaaataacctaaaaatcaatcacttgaaagtgaacaatcagcggcatttagtacatccagaaagttgtgtaggcaccacctctgtcacgttctggaacattctgtcatcaccccgtgaagcaatcatttcccctcccgtcttcctcctcccctggcaactgctgatcgactttgtgtctctgttgtctaaaataggttttccctgttctggacatttcatataaatggaatcacacaa

SEQ ID NO: 343503 - DNA, 2353 bp, Artificial Sequence
  derived and/or modified sequence
cacgccctcggggtcggtcctcgaggacgcgcagggccccccacccaccaggacgcacgtttcaagctcatcagtaaaggttccttaaattcccgaagggcaagaagttaaccaagtaaaacagcatcggaacaccaggatcccatgacagattctgttgtcacgtctccttacagagtttgagcggtgctgaactgtcagcaccatctgtccggtcccagcatgccttctgagaccccccaggcagaagtggggcccacaggctgcccccaccgctcagggccacactcggcgaaggggagcctggagaaggggtccccagaggataaggaagccaaggagcccctgtggatccggcccgatgctccgagcaggtgcacctggcagctgggccggcctgcctccgagtccccacatcaccacactgccccggcaaaatctccaaaaatcttgccagatattctgaagaaaatcggggacacccctatggtcagaatcaacaagattgggaagaagttcggcctgaagtgtgagctcttggccaagtgtgagttcttcaacgcgggcgggagcgtgaaggaccgcatcagcctgcggatgattgaggatgctgagcgcgacgggacgctgaagcccggggacacgattatcgagccgacatccgggaacaccgggatcgggctggccctggctgcggcagtgaggggctatcgctgcatcatcgtgatgccagagaagatgagctccgagaaggtggacgtgctgcgggcactgggggctgagattgtgaggacgcccaccaatgccaggttcgactccccggagtcacacgtgggggtggcctggcggctgaagaacgaaatccccaattctcacatcctagaccagtaccgcaacgccagcaaccccctggctcactacgacaccaccgctgatgagatcctgcagcagtgtgatgggaagctggacatgctggtggcttcagtgggcacgggcggcaccatcacgggcattgccaggaagctgaaggagaagtgtcctggatgcaggatcattggggtggatcccgaagggtccatcctcgcagagccggaggagctgaaccagacggagcagacaacctacgaggtggaagggatcggctacgacttcatccccacggtgctggacaggacggtggtggacaagtggttcaagagcaacgatgaggaggcgttcacctttgcccgcatgctgatcgcgcaagaggggctgctgtgcggtggcagtgctggcagcacggtggcggtggccgtgaaggccgcgcaggagctgcaggagggccagcgctgcgtggtcattctgcccgactcagtgcggaactacatgaccaagttcctgagcgacaggtggatgctgcagaagggctttctgaaggaggaggacctcacggagaagaagccctggtggtggcacctccgtgttcaggagctgggcctgtcagccccgctgaccgtgctcccgaccatcacctgtgggcacaccatcgagatcctccgggagaagggcttcgaccaggcgcccgtggtggatgaggcgggggtaatcctgggaatggtgacgcttgggaacatgctctcgtccctgcttgccgggaaggtgcagccgtcagaccaagttggcaaagtcatctacaagcagttcaaacagatccgcctcacggacacgctgggcaggctctcgcacatcctggagatggaccacttcgccctggtggtgcacgagcagatccagtaccacagcaccgggaagtccagtcagcggcagatggtgttcggggtggtcaccgccattgacttgctgaacttcgtggccgcccaggagcgggaccagaagtgaagtccggagcgctgggcggatgtttcaccaaggaaatattgagagagaagtcggccaggtaggatgaacacaggcaatgactgcgcagagtggattaaaggcaaaagagagaagagtccaggaaggggcggggagaagcctgggtggctcagcatcctccacgggctgcgccgtctgctcggggctgagctggcgggagcagtttgcgtgtttgggttttttaattgagatgaaattcaaataacctaaaaatcaatcacttgaaagtgaacaatcagcggcatttagtacatccagaaagttgtgtaggcaccacctctgtcacgttctggaacattctgtcatcaccccgtgaagcaatcatttcccctcccgtcttcctcctcccctggcaactgctgatcgactttgtgtctctgttgtctaaaataggttttccctgttctggacatttcatataaatggaatcacacaa

SEQ ID NO: 343504 - DNA, 2453 bp, Artificial Sequence
  derived and/or modified sequence
ccgtctccgcctcgccgcagtcggggcagccgctcgcccctcttttccatgtatccgtccagagtttgagcggtgctgaactgtcagcaccatctgtccggtcccagcatgccttctgagaccccccaggcagaagtggggcccacaggctgcccccaccgctcagggccacactcggcgaaggggagcctggagaaggggtccccagaggataaggaagccaaggagcccctgtggatccggcccgatgctccgagcaggtgcacctggcagctgggccggcctgcctccgagtccccacatcaccacactgccccggcaaaatctccaaaaatcttgccagatattctgaagaaaatcggggacacccctatggtcagaatcaacaagattgggaagaagttcggcctgaagtgtgagctcttggccaagtgtgagttcttcaacgcgggcgggagcgtgaaggaccgcatcagcctgcggatgattgaggatgctgagcgcgacgggacgctgaagcccggggacacgattatcgagccgacatccgggaacaccgggatcgggctggccctggctgcggcagtgaggggctatcgctgcatcatcgtgatgccagagaagatgagctccgagaaggtggacgtgctgcgggcactgggggctgagattgtgaggacgcccaccaatgccaggttcgactccccggagtcacacgtgggggtggcctggcggctgaagaacgaaatccccaattctcacatcctagaccagtaccgcaacgccagcaaccccctggctcactacgacaccaccgctgatgagatcctgcagcagtgtgatgggaagctggacatgctggtggcttcagtgggcacgggcggcaccatcacgggcattgccaggaagctgaaggagaagtgtcctggatgcaggatcattggggtggatcccgaagggtccatcctcgcagagccggaggagctgaaccagacggagcagacaacctacgaggtggaagggatcggctacgacttcatccccacggtgctggacaggacggtggtggacaagtggttcaagagcaacgatgaggaggcgttcacctttgcccgcatgctgatcgcgcaagaggggctgctgtgcggtggcagtgctggcagcacggtggcggtggccgtgaaggccgcgcaggagctgcaggagggccagcgctgcgtggtcattctgcccgactcagtgcggaactacatgaccaagttcctgagcgacaggtggatgctgcagaagggctttctgaaggaggaggacctcacggagaagaagccctggtggtggcacctccgtgttcaggagctgggcctgtcagccccgctgaccgtgctcccgaccatcacctgtgggcacaccatcgagatcctccgggagaagggcttcgaccaggcgcccgtggtggatgaggcgggggtaatcctgggaatggtgacgcttgggaacatgctctcgtccctgcttgccgggaaggtgcagccgtcagaccaagttggcaaagtcatctacaagcagttcaaacagatccgcctcacggacacgctgggcaggctctcgcacatcctggagatggaccacttcgccctggtggtgcacgagcagatccagtaccacagcaccgggaagtccagtcagcggcagatggtgttcggggtggtcaccgccattgacttgctgaacttcgtggccgcccaggagcgggaccagaagtgaagtccggagcgctgggcggtgcggagcgggcccgccacccttgcccacttctccttcgctttcctgagccctaaacacacgcgtgattggtaactgcctggcctggcaccgttatccctgcacacggcacagagcatccgtctcccctcgttaacacatggcttcctaaatggccctgtttacggcctatgagatgaaatatgtgattttctctaatgtaacttcctcttaggatgtttcaccaaggaaatattgagagagaagtcggccaggtaggatgaacacaggcaatgactgcgcagagtggattaaaggcaaaagagagaagagtccaggaaggggcggggagaagcctgggtggctcagcatcctccacgggctgcgccgtctgctcggggctgagctggcgggagcagtttgcgtgtttgggttttttaattgagatgaaattcaaataacctaaaaatcaatcacttgaaagtgaacaatcagcggcatttagtacatccagaaagttgtgtaggcaccacctctgtcacgttctggaacattctgtcatcaccccgtgaagcaatcatttcccctcccgtcttcctcctcccctggcaactgctgatcgactttgtgtctctgttgtctaaaataggttttccctgttctggacatttcatataaatggaatcacacaa

SEQ ID NO: 343505 - DNA, 2605 bp, Artificial Sequence
  derived and/or modified sequence
gtgctctgccacgagacattggccggcgccggcctccgcccccgcctctccgccaatcaccgcccgcctgctcccctcgccgtgggtccccgcgaggccgccaccccggggtcgccgtctccgcctcgccgcagtcggggcagccgctcgcccctcttttccatgtatccgtccaggatcccatgacagattctgttgtcacgtctccttacagagtttgagcggtgctgaactgtcagcaccatctgtccggtcccagcatgccttctgagaccccccaggcagaagtggggcccacaggctgcccccaccgctcagggccacactcggcgaaggggagcctggagaaggggtccccagaggataaggaagccaaggagcccctgtggatccggcccgatgctccgagcaggtgcacctggcagctgggccggcctgcctccgagtccccacatcaccacactgccccggcaaaatctccaaaaatcttgccagatattctgaagaaaatcggggacacccctatggtcagaatcaacaagattgggaagaagttcggcctgaagtgtgagctcttggccaagtgtgagttcttcaacgcgggcgggagcgtgaaggaccgcatcagcctgcggatgattgaggatgctgagcgcgacgggacgctgaagcccggggacacgattatcgagccgacatccgggaacaccgggatcgggctggccctggctgcggcagtgaggggctatcgctgcatcatcgtgatgccagagaagatgagctccgagaaggtggacgtgctgcgggcactgggggctgagattgtgaggacgcccaccaatgccaggttcgactccccggagtcacacgtgggggtggcctggcggctgaagaacgaaatccccaattctcacatcctagaccagtaccgcaacgccagcaaccccctggctcactacgacaccaccgctgatgagatcctgcagcagtgtgatgggaagctggacatgctggtggcttcagtgggcacgggcggcaccatcacgggcattgccaggaagctgaaggagaagtgtcctggatgcaggatcattggggtggatcccgaagggtccatcctcgcagagccggaggagctgaaccagacggagcagacaacctacgaggtggaagggatcggctacgacttcatccccacggtgctggacaggacggtggtggacaagtggttcaagagcaacgatgaggaggcgttcacctttgcccgcatgctgatcgcgcaagaggggctgctgtgcggtggcagtgctggcagcacggtggcggtggccgtgaaggccgcgcaggagctgcaggagggccagcgctgcgtggtcattctgcccgactcagtgcggaactacatgaccaagttcctgagcgacaggtggatgctgcagaagggctttctgaaggaggaggacctcacggagaagaagccctggtggtggcacctccgtgttcaggagctgggcctgtcagccccgctgaccgtgctcccgaccatcacctgtgggcacaccatcgagatcctccgggagaagggcttcgaccaggcgcccgtggtggatgaggcgggggtaatcctgggaatggtgacgcttgggaacatgctctcgtccctgcttgccgggaaggtgcagccgtcagaccaagttggcaaagtcatctacaagcagttcaaacagatccgcctcacggacacgctgggcaggctctcgcacatcctggagatggaccacttcgccctggtggtgcacgagcagatccagtaccacagcaccgggaagtccagtcagcggcagatggtgttcggggtggtcaccgccattgacttgctgaacttcgtggccgcccaggagcgggaccagaagtgaagtccggagcgctgggcggtgcggagcgggcccgccacccttgcccacttctccttcgctttcctgagccctaaacacacgcgtgattggtaactgcctggcctggcaccgttatccctgcacacggcacagagcatccgtctcccctcgttaacacatggcttcctaaatggccctgtttacggcctatgagatgaaatatgtgattttctctaatgtaacttcctcttaggatgtttcaccaaggaaatattgagagagaagtcggccaggtaggatgaacacaggcaatgactgcgcagagtggattaaaggcaaaagagagaagagtccaggaaggggcggggagaagcctgggtggctcagcatcctccacgggctgcgccgtctgctcggggctgagctggcgggagcagtttgcgtgtttgggttttttaattgagatgaaattcaaataacctaaaaatcaatcacttgaaagtgaacaatcagcggcatttagtacatccagaaagttgtgtaggcaccacctctgtcacgttctggaacattctgtcatcaccccgtgaagcaatcatttcccctcccgtcttcctcctcccctggcaactgctgatcgactttgtgtctctgttgtctaaaataggttttccctgttctggacatttcatataaatggaatcacacaa

SEQ ID NO: 343506 - DNA, 819 bp, Artificial Sequence
  derived and/or modified sequence
agttcctgccagtggacatttaattctaattcacgtctcactccctcccctactgtgagccccacgtggcagagaccgcggcggagctgcgcgggccggaggaggctgcggagcatcgctctgacctgagccggggacgctgcggaggcgcagcacgttcctctgcccagagctgatgggcaccgtccgtgtctttcgctgcaggatcccatgacagattctgttgtcacgtctccttacagagtttgagcggtgctgaactgtcagcaccatctgtccggtcccagcatgccttctgagaccccccaggcagaagtggggcccacaggctgcccccaccgctcagggccacactcggcgaaggggagcctggagaaggggtccccagaggataaggaagccaaggagcccctgtggatccggcccgatgctccgagcaggtgcacctggcagctgggccggcctgcctccgagtccccacatcaccacactgccccggcaaaatctccaaaaatcttgccagatattctgaagaaaatcggggacacccctatggtcagaatcaacaagattgggaagaagttcggcctgaagtgtgagctcttggccaagtgtgagttcttcaacgcgggcgggagcgtgaaggaccgcatcagcctgcggatgattgaggatgctgagcgcgacgggacgctgaagcccggggacacgattatcgagccgacatccgggaacaccgggatcgggctggccctggctgcggcagtgaggggctatcgctgcatcatcgtgatgccagagaagatgagctccgagaag

SEQ ID NO: 343507 - DNA, 2129 bp, Artificial Sequence
  derived and/or modified sequence
ggagctgcgcgggccggaggaggctgcggagcatcgctctgacctgagccggggacgctgcggaggcgcagcacgttcctctgcccagagctgatgggcaccgtccgtgtctttcgctgcagggcaagaagttaaccaagtaaaacagcatcggaacaccaggatcccatgacagattctgttgtcacgtctccttacagagtttgagcggtgctgaactgtcagcaccatctgtccggtcccagcatgccttctgagaccccccaggcagaagtggggcccacaggctgcccccaccgctcagggccacatcaccacactgccccggcaaaatctccaaaaatcttgccagatattctgaagaaaatcggggacacccctatggtcagaatcaacaagattgggaagaagttcggcctgaagtgtgagctcttggccaagtgtgagttcttcaacgcgggcgggagcgtgaaggaccgcatcagcctgcggatgattgaggatgctgagcgcgacgggacgctgaagcccggggacacgattatcgagccgacatccgggaacaccgggatcgggctggccctggctgcggcagtgaggggctatcgctgcatcatcgtgatgccagagaagatgagctccgagaaggtggacgtgctgcgggcactgggggctgagattgtgaggacgcccaccaatgccaggttcgactccccggagtcacacgtgggggtggcctggcggctgaagaacgaaatccccaattctcacatcctagaccagtaccgcaacgccagcaaccccctggctcactacgacaccaccgctgatgagatcctgcagcagtgtgatgggaagctggacatgctggtggcttcagtgggcacgggcggcaccatcacgggcattgccaggaagctgaaggagaagtgtcctggatgcaggatcattggggtggatcccgaagggtccatcctcgcagagccggaggagctgaaccagacggagcagacaacctacgaggtggaagggatcggctacgacttcatccccacggtgctggacaggacggtggtggacaagtggttcaagagcaacgatgaggaggcgttcacctttgcccgcatgctgatcgcgcaagaggggctgctgtgcggtggcagtgctggcagcacggtggcggtggccgtgaaggccgcgcaggagctgcaggagggccagcgctgcgtggtcattctgcccgactcagtgcggaactacatgaccaagttcctgagcgacaggtggatgctgcagaagggctttctgaaggaggaggacctcacggagaagaagccctggtggtggcacctccgtgttcaggagctgggcctgtcagccccgctgaccgtgctcccgaccatcacctgtgggcacaccatcgagatcctccgggagaagggcttcgaccaggcgcccgtggtggatgaggcgggggtaatcctgggaatggtgacgcttgggaacatgctctcgtccctgcttgccgggaaggtgcagccgtcagaccaagttggcaaagtcatctacaagcagttcaaacagatccgcctcacggacacgctgggcaggctctcgcacatcctggagatggaccacttcgccctggtggtgcacgagcagatccagtaccacagcaccgggaagtccagtcagcggcagatggtgttcggggtggtcaccgccattgacttgctgaacttcgtggccgcccaggagcgggaccagaagtgaagtccggagcgctgggcggtgcggagcgggcccgccacccttgcccacttctccttcgctttcctgagccctaaacacacgcgtgattggtaactgcctggcctggcaccgttatccctgcacacggcacagagcatccgtctcccctcgttaacacatggcttcctaaatggccctgtttacggcctatgagatgaaatatgtgattttctctaatgtaacttcctcttaggatgtttcaccaaggaaatattgagagagaagtcggccaggtaggatgaacacaggcaatgactgcgcagagtggattaaaggcaaaagagagaagagtccaggaaggggcggggagaagcctg

SEQ ID NO: 343508 - DNA, 1703 bp, Artificial Sequence
  derived and/or modified sequence
gctaagcgctctgggcctggccctgatcacctctgcaaacttctcagggcaaaatctccaaaaatcttgccagatattctgaagaaaatcggggacacccctatggtcagaatcaacaagattgggaagaagttcggcctgaagtgtgagctcttggccaagtgtgagttcttcaacgcgggcgggagcgtgaaggaccgcatcagcctgcggatgattgaggatgctgagcgcgacgggacgctgaagcccggggacacgattatcgagccgacatccgggaacaccgggatcgggctggccctggctgcggcagtgaggggctatcgctgcatcatcgtgatgccagagaagatgagctccgagaaggtggacgtgctgcgggcactgggggctgagattgtgaggacgcccaccaatgccaggttcgactccccggagtcacacgtgggggtggcctggcggctgaagaacgaaatccccaattctcacatcctagaccagtaccgcaacgccagcaaccccctggctcactacgacaccaccgctgatgagatcctgcagcagtgtgatgggaagctggacatgctggtggcttcagtgggcacgggcggcaccatcacgggcattgccaggaagctgaaggagaagtgtcctggatgcaggatcattggggtggatcccgaagggtccatcctcgcagagccggaggagctgaaccagacggagcagacaacctacgaggtggaagggatcggctacgacttcatccccacggtgctggacaggacggtggtggacaagtggttcaagagcaacgatgaggaggcgttcacctttgcccgcatgctgatcgcgcaagaggggctgctgtgcggtggcagtgctggcagcacggtggcggtggccgtgaaggccgcgcaggagctgcaggagggccagcgctgcgtggtcattctgcccgactcagtgcggaactacatgaccaagttcctgagcgacaggtggatgctgcagaagggctttctgaaggaggaggacctcacggagaagaagccctggtggtggcacctccgtgttcaggagctgggcctgtcagccccgctgaccgtgctcccgaccatcacctgtgggcacaccatcgagatcctccgggagaagggcttcgaccaggcgcccgtggtggatgaggcgggggtaatcctgggaatggtgacgcttgggaacatgctctcgtccctgcttgccgggaaggtgcagccgtcagaccaagttggcaaagtcatctacaagcagttcaaacagatccgcctcacggacacgctgggcaggctctcgcacatcctggagatggaccacttcgccctggtggtgcacgagcagatccagtaccacagcaccgggaagtccagtcagcggcagatggtgttcggggtggtcaccgccattgacttgctgaacttcgtggccgcccaggagcgggaccagaagtgaagtccggagcgctgggcggtgcggagcgggcccgccacccttgcccacttctccttcgctttcctgagccctaaacacacgcgtgattggtaactgcctggcctggcaccgttatccctgcacacggcacagagcatccgtctcccctcgttaacacatggcttcctaaatggccctgtttacggcctatgagatgaaatatgtgattt

SEQ ID NO: 343509 - DNA, 1656 bp, Artificial Sequence
  derived and/or modified sequence
atgcccagcgagaccccccaggccgaggtgggccccaccggctgcccccacagaagcggcccccacagcgccaagggcagcctggagaagggcagccccgaggacaaggaggccaaggagcccctgtggatcagacccgacgcccccagcagatgcacctggcagctgggcagacccgccagcgagagcccccaccaccacaccgcccccgccaagagccccaagatcctgcccgacatcctgaagaagatcggcgacacccccatggtgagaatcaacaagatcggcaagaagttcggcctgaagtgcgagctgctggccaagtgcgagttcttcaacgccggcggcagcgtgaaggacagaatcagcctgagaatgatcgaggacgccgagagagacggcaccctgaagcccggcgacaccatcatcgagcccaccagcggcaacaccggcatcggcctggccctggccgccgccgtgagaggctacagatgcatcatcgtgatgcccgagaagatgagcagcgagaaggtggacgtgctgagagccctgggcgccgagatcgtgagaacccccaccaacgccagattcgacagccccgagagccacgtgggcgtggcctggagactgaagaacgagatccccaacagccacatcctggaccagtacagaaacgccagcaaccccctggcccactacgacaccaccgccgacgagatcctgcagcagtgcgacggcaagctggacatgctggtggccagcgtgggcaccggcggcaccatcaccggcatcgccagaaagctgaaggagaagtgccccggctgcagaatcatcggcgtggaccccgagggcagcatcctggccgagcccgaggagctgaaccagaccgagcagaccacctacgaggtggagggcatcggctacgacttcatccccaccgtgctggacagaaccgtggtggacaagtggttcaagagcaacgacgaggaggccttcaccttcgccagaatgctgatcgcccaggagggcctgctgtgcggcggcagcgccggcagcaccgtggccgtggccgtgaaggccgcccaggagctgcaggagggccagagatgcgtggtgatcctgcccgacagcgtgagaaactacatgaccaagttcctgagcgacagatggatgctgcagaagggcttcctgaaggaggaggacctgaccgagaagaagccctggtggtggcacctgagagtgcaggagctgggcctgagcgcccccctgaccgtgctgcccaccatcacctgcggccacaccatcgagatcctgagagagaagggcttcgaccaggcccccgtggtggacgaggccggcgtgatcctgggcatggtgaccctgggcaacatgctgagcagcctgctggccggcaaggtgcagcccagcgaccaggtgggcaaggtgatctacaagcagttcaagcagatcagactgaccgacaccctgggcagactgagccacatcctggagatggaccacttcgccctggtggtgcacgagcagatccagtaccacagcaccggcaagagcagccagagacagatggtgttcggcgtggtgaccgccatcgacctgctgaacttcgtggccgcccaggagagagaccagaagtag

SEQ ID NO: 343510 - DNA, 534 bp, Artificial Sequence
  derived and/or modified sequence
atgcccagcgagaccccccaggccgaggtgggccccaccggctgcccccacagaagcggcccccacagcgccaagggcagcctggagaagggcagccccgaggacaaggaggccaaggagcccctgtggatcagacccgacgcccccagcagatgcacctggcagctgggcagacccgccagcgagagcccccaccaccacaccgcccccgccaagagccccaagatcctgcccgacatcctgaagaagatcggcgacacccccatggtgagaatcaacaagatcggcaagaagttcggcctgaagtgcgagctgctggccaagtgcgagttcttcaacgccggcggcagcgtgaaggacagaatcagcctgagaatgatcgaggacgccgagagagacggcaccctgaagcccggcgacaccatcatcgagcccaccagcggcaacaccggcatcggcctggccctggccgccgccgtgagaggctacagatgcatcatcgtgatgcccgagaagatgagcagcgagaagtag

SEQ ID NO: 343511 - DNA, 1527 bp, Artificial Sequence
  derived and/or modified sequence
atgcccagcgagaccccccaggccgaggtgggccccaccggctgcccccacagaagcggcccccaccaccacaccgcccccgccaagagccccaagatcctgcccgacatcctgaagaagatcggcgacacccccatggtgagaatcaacaagatcggcaagaagttcggcctgaagtgcgagctgctggccaagtgcgagttcttcaacgccggcggcagcgtgaaggacagaatcagcctgagaatgatcgaggacgccgagagagacggcaccctgaagcccggcgacaccatcatcgagcccaccagcggcaacaccggcatcggcctggccctggccgccgccgtgagaggctacagatgcatcatcgtgatgcccgagaagatgagcagcgagaaggtggacgtgctgagagccctgggcgccgagatcgtgagaacccccaccaacgccagattcgacagccccgagagccacgtgggcgtggcctggagactgaagaacgagatccccaacagccacatcctggaccagtacagaaacgccagcaaccccctggcccactacgacaccaccgccgacgagatcctgcagcagtgcgacggcaagctggacatgctggtggccagcgtgggcaccggcggcaccatcaccggcatcgccagaaagctgaaggagaagtgccccggctgcagaatcatcggcgtggaccccgagggcagcatcctggccgagcccgaggagctgaaccagaccgagcagaccacctacgaggtggagggcatcggctacgacttcatccccaccgtgctggacagaaccgtggtggacaagtggttcaagagcaacgacgaggaggccttcaccttcgccagaatgctgatcgcccaggagggcctgctgtgcggcggcagcgccggcagcaccgtggccgtggccgtgaaggccgcccaggagctgcaggagggccagagatgcgtggtgatcctgcccgacagcgtgagaaactacatgaccaagttcctgagcgacagatggatgctgcagaagggcttcctgaaggaggaggacctgaccgagaagaagccctggtggtggcacctgagagtgcaggagctgggcctgagcgcccccctgaccgtgctgcccaccatcacctgcggccacaccatcgagatcctgagagagaagggcttcgaccaggcccccgtggtggacgaggccggcgtgatcctgggcatggtgaccctgggcaacatgctgagcagcctgctggccggcaaggtgcagcccagcgaccaggtgggcaaggtgatctacaagcagttcaagcagatcagactgaccgacaccctgggcagactgagccacatcctggagatggaccacttcgccctggtggtgcacgagcagatccagtaccacagcaccggcaagagcagccagagacagatggtgttcggcgtggtgaccgccatcgacctgctgaacttcgtggccgcccaggagagagaccagaagtag

SEQ ID NO: 343512 - DNA, 1392 bp, Artificial Sequence
  derived and/or modified sequence
atggtgagaatcaacaagatcggcaagaagttcggcctgaagtgcgagctgctggccaagtgcgagttcttcaacgccggcggcagcgtgaaggacagaatcagcctgagaatgatcgaggacgccgagagagacggcaccctgaagcccggcgacaccatcatcgagcccaccagcggcaacaccggcatcggcctggccctggccgccgccgtgagaggctacagatgcatcatcgtgatgcccgagaagatgagcagcgagaaggtggacgtgctgagagccctgggcgccgagatcgtgagaacccccaccaacgccagattcgacagccccgagagccacgtgggcgtggcctggagactgaagaacgagatccccaacagccacatcctggaccagtacagaaacgccagcaaccccctggcccactacgacaccaccgccgacgagatcctgcagcagtgcgacggcaagctggacatgctggtggccagcgtgggcaccggcggcaccatcaccggcatcgccagaaagctgaaggagaagtgccccggctgcagaatcatcggcgtggaccccgagggcagcatcctggccgagcccgaggagctgaaccagaccgagcagaccacctacgaggtggagggcatcggctacgacttcatccccaccgtgctggacagaaccgtggtggacaagtggttcaagagcaacgacgaggaggccttcaccttcgccagaatgctgatcgcccaggagggcctgctgtgcggcggcagcgccggcagcaccgtggccgtggccgtgaaggccgcccaggagctgcaggagggccagagatgcgtggtgatcctgcccgacagcgtgagaaactacatgaccaagttcctgagcgacagatggatgctgcagaagggcttcctgaaggaggaggacctgaccgagaagaagccctggtggtggcacctgagagtgcaggagctgggcctgagcgcccccctgaccgtgctgcccaccatcacctgcggccacaccatcgagatcctgagagagaagggcttcgaccaggcccccgtggtggacgaggccggcgtgatcctgggcatggtgaccctgggcaacatgctgagcagcctgctggccggcaaggtgcagcccagcgaccaggtgggcaaggtgatctacaagcagttcaagcagatcagactgaccgacaccctgggcagactgagccacatcctggagatggaccacttcgccctggtggtgcacgagcagatccagtaccacagcaccggcaagagcagccagagacagatggtgttcggcgtggtgaccgccatcgacctgctgaacttcgtggccgcccaggagagagaccagaagtag

SEQ ID NO: 343513 - protein, 485 aa, Artificial Sequence
  derived and/or modified sequence
MASSSTVPLGFHYETKYVVLSYLGLLSQEKLQEQHLSSPQGVQLDIASQSLDQEILLKVKTEIEEELKSLDKEISEAFTSTGFDRHTSPVFSPANPESSMEDCLAHLGEKVSQELKEPLHKALQMLLSQPVTYQAFRECTLETTVHASGWNKILVPLVLLRQMLLELTRRGQEPLSALLQFGVTYLEDYSAEYIIQQGGWGTVFSLESEEEEYPGITAEDSNDIYILPSDNSGQVSPPESPTVTTSWQSESLPVSLSASQSWHTESLPVSLGPESWQQIAMDPEEVKSLDSNGAGEKSENNSSNSDIVHVEKEEVPEGMEEAAVASVVLPARELQEALPEAPAPLLPHITATSLLGTREPDTEVITVEKSSPATSLFVELDEEEVKAATTEPTEVEEVVPALEPTETLLSEKEINAREESLVEELSPASEKKPVPPSEGKSRLSPAGEMKPMPLSEGKSILLFGGAAAVAILAVAIGVALALRKK

SEQ ID NO: 343514 - protein, 323 aa, Artificial Sequence
  derived and/or modified sequence
MLLELTRRGQEPLSALLQFGVTYLEDYSAEYIIQQGGWGTVFSLESEEEEYPGITAEDSNDIYILPSDNSGQVSPPESPTVTTSWQSESLPVSLSASQSWHTESLPVSLGPESWQQIAMDPEEVKSLDSNGAGEKSENNSSNSDIVHVEKEEVPEGMEEAAVASVVLPARELQEALPEAPAPLLPHITATSLLGTREPDTEVITVEKSSPATSLFVELDEEEVKAATTEPTEVEEVVPALEPTETLLSEKEINAREESLVEELSPASEKKPVPPSEGKSRLSPAGEMKPMPLSEGKSILLFGGAAAVAILAVAIGVALALRKK

SEQ ID NO: 343515 - protein, 201 aa, Artificial Sequence
  derived and/or modified sequence
MASSSTVPLGFHYETKYVVLSYLGLLSQEKLQEQHLSSPQGVQLDIASQSLDQEILLKVKTEIEEELKSLDKEISEAFTSTGFDRHTSPVFSPANPESSMEDCLAHLGEKVSQELKEPLHKALQMLLSQPVTYQAFRECTLETTVHASGWNKILVPLVLLRQMLLELTRRGQEPLSALLQFGVTYLEDYSAEYIIQQGGWV

SEQ ID NO: 343516 - protein, 361 aa, Artificial Sequence
  derived and/or modified sequence
MKQSMLFSATWDSSLKRSCKSNIFPHPKILVPLVLLRQMLLELTRRGQEPLSALLQFGVTYLEDYSAEYIIQQGGWGTVFSLESEEEEYPGITAEDSNDIYILPSDNSGQVSPPESPTVTTSWQSESLPVSLSASQSWHTESLPVSLGPESWQQIAMDPEEVKSLDSNGAGEKSENNSSNSDIVHVEKEEVPEGMEEAAVASVVLPARELQEALPEAPAPLLPHITATSLLGTREPDTEVITVEKSSPATSLFVELDEEEVKAATTEPTEVEEVVPALEPTETLLSEKEINAREESLVEELSPASEKKPVPPSEGKSRLSPAGEMKPMPLSEGKSILLFGGAAAVAILAVAIGVALALRKK

SEQ ID NO: 343517 - DNA, 1458 bp, Artificial Sequence
  derived and/or modified sequence
atggccagcagcagcaccgtgcccctgggcttccactacgagaccaagtacgtggtgctgagctacctgggcctgctgagccaggagaagctgcaggagcagcacctgagcagcccccagggcgtgcagctggacatcgccagccagagcctggaccaggagatcctgctgaaggtgaagaccgagatcgaggaggagctgaagagcctggacaaggagatcagcgaggccttcaccagcaccggcttcgacagacacaccagccccgtgttcagccccgccaaccccgagagcagcatggaggactgcctggcccacctgggcgagaaggtgagccaggagctgaaggagcccctgcacaaggccctgcagatgctgctgagccagcccgtgacctaccaggccttcagagagtgcaccctggagaccaccgtgcacgccagcggctggaacaagatcctggtgcccctggtgctgctgagacagatgctgctggagctgaccagaagaggccaggagcccctgagcgccctgctgcagttcggcgtgacctacctggaggactacagcgccgagtacatcatccagcagggcggctggggcaccgtgttcagcctggagagcgaggaggaggagtaccccggcatcaccgccgaggacagcaacgacatctacatcctgcccagcgacaacagcggccaggtgagcccccccgagagccccaccgtgaccaccagctggcagagcgagagcctgcccgtgagcctgagcgccagccagagctggcacaccgagagcctgcccgtgagcctgggccccgagagctggcagcagatcgccatggaccccgaggaggtgaagagcctggacagcaacggcgccggcgagaagagcgagaacaacagcagcaacagcgacatcgtgcacgtggagaaggaggaggtgcccgagggcatggaggaggccgccgtggccagcgtggtgctgcccgccagagagctgcaggaggccctgcccgaggcccccgcccccctgctgccccacatcaccgccaccagcctgctgggcaccagagagcccgacaccgaggtgatcaccgtggagaagagcagccccgccaccagcctgttcgtggagctggacgaggaggaggtgaaggccgccaccaccgagcccaccgaggtggaggaggtggtgcccgccctggagcccaccgagaccctgctgagcgagaaggagatcaacgccagagaggagagcctggtggaggagctgagccccgccagcgagaagaagcccgtgccccccagcgagggcaagagcagactgagccccgccggcgagatgaagcccatgcccctgagcgagggcaagagcatcctgctgttcggcggcgccgccgccgtggccatcctggccgtggccatcggcgtggccctggccctgagaaagaagtag

SEQ ID NO: 343518 - DNA, 606 bp, Artificial Sequence
  derived and/or modified sequence
atggccagcagcagcaccgtgcccctgggcttccactacgagaccaagtacgtggtgctgagctacctgggcctgctgagccaggagaagctgcaggagcagcacctgagcagcccccagggcgtgcagctggacatcgccagccagagcctggaccaggagatcctgctgaaggtgaagaccgagatcgaggaggagctgaagagcctggacaaggagatcagcgaggccttcaccagcaccggcttcgacagacacaccagccccgtgttcagccccgccaaccccgagagcagcatggaggactgcctggcccacctgggcgagaaggtgagccaggagctgaaggagcccctgcacaaggccctgcagatgctgctgagccagcccgtgacctaccaggccttcagagagtgcaccctggagaccaccgtgcacgccagcggctggaacaagatcctggtgcccctggtgctgctgagacagatgctgctggagctgaccagaagaggccaggagcccctgagcgccctgctgcagttcggcgtgacctacctggaggactacagcgccgagtacatcatccagcagggcggctgggtgtag

SEQ ID NO: 343519 - DNA, 1458 bp, Artificial Sequence
  derived and/or modified sequence
atggcctcctcatcgactgtcccactggggtttcactatgaaaccaagtacgtggtgttgtcatatctgggcctcctatcacaagaaaagttgcaggagcaacacttatcctccccacaaggcgttcagctcgacattgcctctcagagcttagaccaggaaattctcctcaaagtgaagacggaaatcgaggaagagttaaagtcattggataaagaaatttcggaggcatttaccagcactgggttcgaccgccacacatccccagtgttcagccccgccaacccagaaagctccatggaagattgtctcgcccacctcggcgagaaggtcagccaggaactgaaggagccattgcacaaggctctgcaaatgctactgtctcagcctgtgacataccaggcgttccgtgaatgcacgctggaaacgactgtgcatgcaagcggttggaacaagatcctggtccctctagtcctccttcgccaaatgctgttagagctcacccggcgtggccaagagccactctccgctcttctccaattcggcgtaacttatctggaggactactcggctgaatacatcatccagcaaggaggttgggggaccgtctttagcctcgaaagcgaagaagaagagtaccccggcatcactgccgaggatagcaacgatatctacatcctcccctccgacaattctgggcaagtgtctcctcccgaatctcctacagttaccacgtcgtggcagtccgagtctctccccgtcagccttagcgccagtcaaagttggcatacagagagcctgcccgtatctctcgggccagagtcttggcagcaaatagccatggaccccgaggaagtcaagagcctcgattctaatggcgctggtgagaaaagtgaaaataactcttcaaattccgacatcgtccatgtagagaaggaggaggtcccagaaggcatggaggaagctgccgttgcatcggtggtacttcctgcccgggagcttcaagaggcactccctgaggccccagccccactgctgccgcatatcaccgcgacgtccctgctgggaactcgcgaaccagacaccgaagtgatcaccgtggaaaaatcatcacccgccacaagtctattcgttgaattggatgaggaggaggtgaaggcggccactacggaacccacagaagtcgaggaagtagttcctgctctggaacctaccgagacactgctgagcgagaaagaaataaacgccagagaagagtcactcgtggaggaactgtcacccgcgtccgagaaaaaacccgtgcccccctcagagggcaagtccaggctgagtcctgccggggaaatgaaacctatgccgttatctgagggcaagagtattcttttgttcggaggtgccgctgcagtagctatacttgcagtggctataggggtggcactcgccctgcggaaaaagtag

SEQ ID NO: 343520 - DNA, 606 bp, Artificial Sequence
  derived and/or modified sequence
atggctagcagctcaaccgtcccactgggctttcattacgagactaaatacgtggtcctgtcctatttaggcctgctctcgcaggaaaaactccaggagcagcatctaagctccccccagggtgtgcagcttgacatcgcgtcgcagagcttggaccaggagatcctcttaaaggtaaaaaccgagatcgaagaagaactgaagagccttgataaagaaatatctgaggccttcacttccactggcttcgatagacatacctctccagttttttcacccgccaatcccgagtcttccatggaggattgcctagcccacttgggagagaaggtgagtcaagaactcaaggaacctttgcataaagcactccagatgctgctatcacaacctgtcacataccaggcatttagggagtgtacccttgaaacaactgttcatgccagcggctggaacaagatcttagttcccctcgtgctactgaggcagatgctgttggagctgacgagaagaggccaggagcccctatcagccctgttacagttcggcgtcacatatctcgaggactactctgccgaatatattatccagcaaggtgggtgggtctag

SEQ ID NO: 343521 - DNA, 606 bp, Artificial Sequence
  derived and/or modified sequence
atggcgagctcctcgacggtccccttggggtttcattatgaaactaagtacgtggtcctgtcctacctcggcctgctgagtcaggagaagctgcaggaacagcatctgagcagtcctcagggcgtacagctggacatcgcctcacagtccttggatcaagagatcctgctgaaggttaaaacagaaattgaggaggagttgaagtctctggataaggagatttccgaggcctttacatcaacgggctttgacaggcataccagccccgtcttttctcccgccaatccagaaagttctatggaagattgtctcgcccacttaggcgagaaagtgtcccaagagttgaaggagccactccacaaagcactccagatgctgttaagtcaacctgttacgtaccaggcgtttcgagagtgtaccctagaaaccacggtccacgcgtccggttggaacaagattctggtgccacttgtactcctccgacagatgttgttggagctcactcgaagagggcaggaaccattatccgcgctcctgcagtttggcgtgacatatctggaagattatagcgctgagtacattatccagcagggcgggtgggtgtag

SEQ ID NO: 343522 - DNA, 1458 bp, Artificial Sequence
  derived and/or modified sequence
atggccagcagcagcacagtgcccctgggcttccactatgagaccaagtatgtggtgctgagctacctgggcctgctgagccaggagaagctgcaggagcagcacctgagcagcccccagggcgtgcagctggacatcgccagccagagcctggaccaggagatcctgctgaaggtgaagacagaaattgaggaggagctgaagagcctggacaaggagatcagcgaggccttcaccagcactggatttgacagacacaccagccctgtgttctccccagccaaccctgagagctccatggaggactgcctggcccacctgggggagaaggtgtcccaggagctgaaggagcccctgcacaaggccctgcagatgctgctgagccagcctgtgacctaccaggccttccgggagtgcaccctggagaccaccgtgcacgccagcggctggaacaagatcctggtgcccctggtgctgctgcggcagatgctgctggagctgacccggcggggccaggagcccctgagcgccctgctgcagtttggagtgacctacctggaggactacagcgctgagtacatcatccagcagggcggctggggcaccgtcttcagcctggagagcgaggaggaggagtacccaggcatcacagctgaggacagcaatgacatctacatcctgcccagcgacaacagcggccaggtgtccccacctgagagccccaccgtgaccacctcctggcagagcgagagcctgcctgtgtccctgagcgccagccagagctggcacacagagagcctgcctgtgtccctgggccctgagagctggcagcagatcgccatggaccctgaggaggtgaagagcctggacagcaatggagctggggagaagtctgagaacaacagcagcaacagcgacatcgtgcacgtggagaaggaggaggtgcctgagggcatggaggaggccgctgtggcctctgtggtgctgcctgcccgggagctgcaggaggccctgcctgaggccccagcccccctgctgccccacatcacagccaccagcctgctgggcacccgggagccagacacagaggtgatcaccgtggagaagagcagccctgccaccagcctgtttgtggagctggatgaggaggaggtgaaggccgccaccacagagcccacagaggtggaggaggtggtgcctgccctggagcccacagagaccctgctgtctgagaaggagatcaatgcccgggaggagagcctggtggaggagctgagccctgccagcgagaagaagcctgtgcccccatctgagggcaagagccggctgagccctgctggggagatgaagcccatgcccctgtctgagggcaagagcatcctgctgtttggaggagctgctgctgtggccatcctggccgtggccatcggcgtggccctggccctgaggaagaagtag

SEQ ID NO: 343523 - DNA, 606 bp, Artificial Sequence
  derived and/or modified sequence
atggccagcagcagcacagtgcccctgggcttccactatgagaccaagtatgtggtgctgagctacctgggcctgctgagccaggagaagctgcaggagcagcacctgagcagcccccagggcgtgcagctggacatcgccagccagagcctggaccaggagatcctgctgaaggtgaagacagaaattgaggaggagctgaagagcctggacaaggagatcagcgaggccttcaccagcactggatttgacagacacaccagccctgtgttctccccagccaaccctgagagctccatggaggactgcctggcccacctgggggagaaggtgtcccaggagctgaaggagcccctgcacaaggccctgcagatgctgctgagccagcctgtgacctaccaggccttccgggagtgcaccctggagaccaccgtgcacgccagcggctggaacaagatcctggtgcccctggtgctgctgcggcagatgctgctggagctgacccggcggggccaggagcccctgagcgccctgctgcagtttggagtgacctacctggaggactacagcgctgagtacatcatccagcagggcggctgggtgtag

SEQ ID NO: 343524 - DNA, 1458 bp, Artificial Sequence
  derived and/or modified sequence
atggccagcagcagcaccgtgcccctgggcttccactacgagaccaaatacgtcgtcctgagttatttgggcttgttgtcacaggagaaactgcaggagcaacacctcagctcacctcagggtgtgcagctggatatcgccagccagtccctcgaccaagaaatcttgttgaaggttaaaaccgagatcgaggaggagctaaaatctcttgataaggagatctctgaagcttttacatctactggcttcgatcgacacacgtcccccgtcttcagccctgcaaatccagaatcaagtatggaagactgcctggctcacctgggcgaaaaggtgtcccaggagctgaaggagccattgcataaagctctccaaatgctgttgagtcagccggtcacctaccaagctttcagagaatgcacactggagacaacagtacacgccagcggttggaacaaaattctggtacccctggtgctgctgcgccagatgttgcttgagctcacaagaagggggcaagagccacttagcgcccttctgcagtttggagtcacctatctcgaggactactccgccgagtatataatacaacaaggtgggtggggtacagtttttagcctcgaaagtgaggaggaggagtaccccggaattaccgctgaagactccaacgatatctatattctccccagcgataactcaggccaagtttccccgcctgagagtccaactgtgactacatcttggcagtctgagtccctgcccgtgtctctgtccgcatcccagagctggcacaccgaatctctgccggtctctctggggccagagtcttggcagcaaatcgccatggaccccgaggaggtgaagtctctcgactccaacggggccggtgaaaaatcagaaaacaactcctctaacagtgacatcgttcacgtagagaaagaggaggtgcctgagggcatggaggaggctgccgttgcttcggtggtgcttcctgcacgcgaactgcaggaagccctgccggaggctcctgcccctctcctgccacacattaccgcaactagcttgttgggtacccgagaacctgacaccgaggtgattactgtggagaagtcatcaccagctacaagtctgttcgtggagctggacgaggaggaggtaaaagccgcaactactgagcctactgaggtagaggaagttgtccccgccctggagcccaccgaaacccttctgtccgagaaggagattaacgctcgcgaagaatctctggttgaggaactatctcctgcttcggagaagaagcccgtgccaccatctgaggggaagagccgtttgtcccccgcgggtgagatgaaaccaatgcctctctccgaggggaaatccatccttttgtttggtggggccgccgcagtggctatcctggcagttgccataggtgtcgcactcgcattaagaaaaaaatag

SEQ ID NO: 343525 - DNA, 606 bp, Artificial Sequence
  derived and/or modified sequence
atggccagcagcagcaccgtgcccctgggcttccactacgagaccaagtacgtcgtcttgtcttaccttgggctgctgtcacaagaaaagttacaggagcagcatctgtcatctcctcaaggggtgcagctggatatcgcctctcagagcctggaccaggaaatcttgttgaaagtgaaaactgagatcgaagaagagctcaaatcactcgacaaagagattagcgaggctttcacttctaccgggtttgatagacacacatccccagttttcagcccagcaaatcccgagagcagtatggaggattgccttgcccaccttggtgagaaagtaagtcaagagctgaaggagccgctgcacaaagccctgcaaatgttgttgagccagcccgtcacctaccaagcattcagggaatgtactctggaaacaaccgtccatgcttctgggtggaacaaaatcctggtgccgctggtcctgctgcggcaaatgctcctggaactgacaaggagaggccaggagccactatcggctctgctccaattcggggttacctacttggaggattacagtgccgaatatatcatccaacaggggggttgggtttag

SEQ ID NO: 343526 - DNA, 606 bp, Artificial Sequence
  derived and/or modified sequence
atggccagcagcagcaccgtgcccctgggcttccactacgagaccaagtacgtggtgctcagttaccttgggctgctctcgcaggagaaactgcaagaacaacatctctcgagtccgcaaggggtgcagttagatatcgcctctcaaagcttggaccaagaaatcttgctgaaagttaaaaccgaaatcgaagaggagcttaagagtctagataaggagatttcagaggcatttacgtcaactggcttcgatcgccacacctccccagtgttctctcccgctaatcccgagtcctctatggaggactgcttggcccacctgggtgaaaaggtgagtcaggagctgaaggaacccctccataaagctctccagatgctcctctcgcaaccagtgacttatcaggcattcagagaatgtactctggagaccaccgttcatgcaagtggatggaataagatcctggtgccgctggtgcttctgcgtcaaatgcttctcgaacttacaaggcggggccaggaacctctctctgccttgctccagtttggggtcacttacttggaggactactccgccgagtatatcatacagcaagggggctgggtttag

SEQ ID NO: 343527 - DNA, 1458 bp, Artificial Sequence
  derived and/or modified sequence
atggcttctagttcaaccgtcccactcgggtttcattatgagaccaagtacgtggtcctgtcctaccttggccttctgtcccaggaaaagttgcaggagcaacacctttcctctccacaaggtgtgcaactagatatcgcgtcgcagtccctggatcaggaaattttgctgaaagtaaaaaccgagatagaggaggagctgaaaagtctcgacaaggagatcagcgaggctttcacctccaccggcttcgaccgccacacgtctccagtttttagcccggcaaaccccgaaagctcaatggaagattgcctggcacatcttggagagaaggtctcgcaggaactaaaagagcctttacacaaagcactacagatgctgctgagccaacctgttacctatcaggcatttcgggagtgcactttagaaaccacagtgcacgccagtgggtggaataagatactggtcccgctggtattactgagacagatgttattagaactgacgagaagaggtcaggagccactgtctgccttactgcagtttggtgtgacttacttggaggactactctgcagagtatatcatccaacagggaggttggggaaccgtcttctccctggaatcggaggaggaggagtatcccggaataactgctgaagatagtaatgatatttatatactcccttctgataatagcggccaggtttcaccacctgaatccccgacagtgaccacatcttggcagagtgagtctctacccgtgtcactaagtgcaagccagagctggcataccgagtcactgccagtctctctgggaccggagagttggcagcagattgcaatggacccagaagaggtgaaatcactggacagtaacggtgcaggcgagaaatctgagaacaactcttctaatagcgacattgtgcacgtggagaaggaggaggttcctgagggtatggaagaagcagcggtcgctagcgttgtgctccccgctcgcgagctacaagaggcactccccgaggctcccgcaccacttctcccccacatcacggccacttccctcctaggcactagggagccggataccgaagtaattactgttgaaaagagcagtcccgctaccagtctgttcgtggagttggacgaagaagaggtgaaagccgctacaaccgaacctactgaggtagaggaggtggtcccggcactggagcccaccgagaccctgctctctgagaaagagataaacgcccgagaggagagcttagtggaggaactgtcccctgcctccgagaaaaagcctgttcccccatcggaggggaagtcccggctgtcccctgccggagagatgaagcctatgccactgtcggaggggaaatccattttattgttcgggggagccgctgcagtcgccattctggcggttgctattggtgtcgccctggccctaagaaagaagtag

SEQ ID NO: 343528 - DNA, 606 bp, Artificial Sequence
  derived and/or modified sequence
atggcgagctctagcactgtgcccttgggatttcactatgagaccaaatacgttgtgctgtcatatctgggacttctgtcacaggagaagctgcaggagcaacacctcagctctccccagggggtgcaattggatatagctagtcagagcctcgaccaggaaattcttttgaaggtgaagaccgagattgaggaggagcttaagtcgctcgataaggagatttctgaggcatttacaagtaccggatttgataggcatacctcaccggtcttctctccggctaaccccgagagttccatggaagattgtctggcacacctgggagagaaagtgtctcaggaattaaaggaacctcttcacaaagccctgcagatgctgctgtcacagccggttacctatcaggcatttcgtgagtgcaccctagaaacgacagtccatgcatctgggtggaataagatcctcgtgcccctagtgctcctcaggcagatgcttctcgagttgacccggagaggccaggagccactctctgcccttttgcaattcggtgtgacgtatctggaagattattccgccgagtacatcattcagcaggggggatgggtgtag

SEQ ID NO: 343529 - DNA, 606 bp, Artificial Sequence
  derived and/or modified sequence
atggccagttcttcaacagtgcccctcggatttcactatgaaacgaaatatgtagtcttgtcctacttagggcttttgagccaggagaagcttcaagagcaacaccttagctctccccagggagtgcaactcgatatcgcctctcagtccctggaccaagaaattctgctgaaagtcaaaacagagatcgaggaagagctcaagagtctggacaaagaaatttcagaggcatttaccagcacagggttcgatagacatacgagccccgttttttctccggcaaacccggagtctagtatggaggattgcctcgctcatctaggggagaaggttagccaagaactgaaagaacctttgcacaaagccctccagatgttactatcacagcccgtaacataccaggccttcagagagtgtaccttagagaccactgtccatgcctctggctggaataaaattttagttcctttagtgctgctccgccagatgctgctggaattaactaggcggggtcaggagcctttgtccgcactgttgcagtttggggtgacctacctcgaagattactctgccgaatacataatccagcagggaggatgggtgtag

SEQ ID NO: 343530 - DNA, 2992 bp, Artificial Sequence
  derived and/or modified sequence
agatttgggcgggctaggagggtttgggtcttcaggtcacatctggacggagagacctccggggcctccgttggtcggtccttccgctccggataccgttccggatgtcaggtagttcaggtcccgccccgacgccggccgtgacgaaggcacgccggggtgacctcaccctccaacatggcggcggcggtagattagggccgcgggtcggagcactcaccgccgctgggggaccctgtcggaagcaactgccgccgccgcctctttcatctcttctggggcaggggccagggccaggttttacacatccataagtagacctttttggagcctcaccagccaattcaatggcgtcctcttctactgtgcctctgggatttcactatgaaacaaagtatgttgttctcagctacttgggactcctctctcaagagaagctgcaagagcaacatctttcctcaccccaaggggttcaactagatatagcttcacaatctctggatcaagaaattttattaaaagttaaaactgaaattgaagaagagctaaaatctctggacaaagaaatttctgaagccttcaccagcacaggctttgaccgtcacacttctccagtgttcagccctgccaatccagaaagctcaatggaagactgcttggcccatcttggagaaaaagtgtcccaggaactgaaagagcctctccataaagcattgcaaatgctcctgagccagccagtgacatatcaggcatttcgggaatgtacactggagaccacagttcatgccagcggctggaataagattttggtgcctctggttttgctacgacaaatgcttttggaattgacaagacgtggtcaagaacctttgagcgcactgctgcagtttggcgtgacatacctggaggactattcggcagagtacatcattcagcaaggtggctggggcactgtgtttagtcttgagtcagaggaggaggaataccctggaatcactgcagaagatagcaatgacatttacatcctgcccagcgacaactctggacaagtcagtcccccagagtctccaactgtgaccacttcctggcagtctgagagcttacctgtgtcactgtcagctagccagagttggcacacagaaagcctgccagtgtcactaggccctgagtcctggcagcagattgcaatggatcctgaagaagtgaaaagcttagacagcaacggagctggagagaagagtgagaacaactcctctaattctgacattgtgcacgtggagaaagaagaggtgcccgagggcatggaagaggctgctgtggcttctgtggtcttgccagcgcgggagctgcaagaggcacttcctgaagccccagctcccttgcttccacatatcactgccacctccctgctggggacaagggaacctgacacagaagtgatcacagttgagaaatccagccctgctacatctctgtttgtagaacttgatgaagaagaggtgaaagcagcaacaactgaacctactgaagtggaggaggtggtccccgcactggaacccacagaaacgctgctgagtgagaaggagataaacgcaagggaagagagccttgtggaagagctgtcccctgccagcgagaagaagcccgtgccgccgtctgagggcaagtctagactgtcccccgccggtgagatgaagcccatgccgctgtctgagggcaagtctatactgctgtttggaggggctgctgctgttgccatcctggcagtggccatcggggtagccctggctctgagaaagaaataggaggcttttcagaagagaaagacagaaggatgtaaggttggagttgtattggctggaatttgaacctccagcagctgtctggacatttgtggaacactctgggataattggggacttctgctcaacatggcagtggcatgttaggcatgttagggcttgaggtggggcattcacattcatctgactgtaaatcccaagggcctccgctcatgctaaattgagaatcttaggggtaaagcaccccctccaggaccgggtttctcagccttggcactagtgctgttctgaccattctctgtgttggggctgtcctgtgtgtggtgggctccacccactagatgccagtggcaccccctcccagagatgacaaacgaaaatgtctctagacattgccaaatgtcccgtgtgaacatcccctattgagacccactgctttagcgagagagggtttacttaggaagaattgggatagaaattcccagctgagagaacttagctgtgggctcctcagctactgacttcttagctcttaatccccttagaatttcatctttctcgatgagcaggctctgcacccactctttttttgccccccgccctcatcctggagtgtgagggtgctcgcccgtactctcagctgcctctcagggactgcactgttcctcttcacccccaggttcctgctaagatcccacgggcgagggcttgctctggactcagtctgtcaagtccccgaagcttcctgcagctccaccttgtaaaaatgctgcctttgggaatcttcgaaatatgtacacagagaaaatcacatgaaggagacctggggtccccacttgtgagtgcaactgcaagtaactctggctagagagacacatgtgtcttgtgtcaaggcaggaggataacctggatgaccttctgaggtctcttcagcccttttcgctagtggtcacccaccaccatggttacttgccagcaacatctctattgctggatggtccctgtctataaccttgggctagtatattttttccaatatgggaccttagtcttactactgatgagttctatgggtctcttgctagggggtaaggatttttattcttgggcttatagagccagttagatcataattcttatgaaatagagagtgtcctaaatatcactgaaataaaaagtaggaaaaagaa

SEQ ID NO: 343531 - DNA, 1381 bp, Artificial Sequence
  derived and/or modified sequence
tcctaaactgggatcttgggtaggaggaagaaaagataaggagttcctctatctgaaattagtcgggctgttttgaggagtactggttagataccttccgatactcctccaaagaactctcggattcaagtaaacaaacatccattaatacaagttaagtatgttccaggcgctgtgtgttccaggtactgttaacaaaagcgggttactagttaagacttccttcatgccctggcgcctctgctcagccagttcccttcgcctaggaggacctctctacaccaccccgctatattccctccccggaattccttcccaaccttcaaggaccatctgccccaactagtggcgaacatcgaggctgtcgtgactgtgtagatacttatttgacctgctcccttggcaaacacttgaaacgcaatacatgtttgtggaactgaacatagcctgtgcatgcagcaaggcttctttccctggaatcgcctgcccttcctccaacacagcgaccagccggtcagaatcccaacccctcgactccggaaatgatctgagagacggaacttccgaacgtcgcaatcagatttgggcgggctaggagggtttgggtcttcaggtcacatctggacggagagacctccggggcctccgttggtcggtccttccgctccggataccgttccggatgtcaggttttacacatccataagtagacctttttggagcctcaccagccaattcaatggcgtcctcttctactgtgcctctgggatttcactatgaaacaaagtatgttgttctcagctacttgggactcctctctcaagagaagctgcaagagcaacatctttcctcaccccaaggggttcaactagatatagcttcacaatctctggatcaagaaattttattaaaagttaaaactgaaattgaagaagagctaaaatctctggacaaagaaatttctgaagccttcaccagcacaggctttgaccgtcacacttctccagtgttcagccctgccaatccagaaagctcaatggaagactgcttggcccatcttggagaaaaagtgtcccaggaactgaaagagcctctccataaagcattgcaaatgctcctgagccagccagtgacatatcaggcatttcgggaatgtacactggagaccacagttcatgccagcggctggaataagattttggtgcctctggttttgctacgacaaatgcttttggaattgacaagacgtggtcaagaacctttgagcgcactgctgcagtttggcgtgacatacctggaggactattcggcagagtacatcattcagcaaggtggctgggtatgagctgttatatattaaaaatattttcttgaaaaaaaa

SEQ ID NO: 343532 - DNA, 2112 bp, Artificial Sequence
  derived and/or modified sequence
ggcggcggtagattagggccgcgggtcggagcactcaccgccgctgggggaccctgtcggaagcaactgccgccgccgcctctttcatctcttctggggcaggggccagggccaggttttacacatccataagtagacctttttggagcctcaccagccaattcaatggcgtcctcttctactgtgcctctgggatttcactatgaaacaaagtatgttgttctcagctacttgggactcctctctcaagagaagctgcaagagcaacatctttcctcaccccaaggggttcaactagatatagcttcacaatctctggatcaagaaattttattaaaagttaaaactgaaattgaagaagagctaaaatctctggacaaagaaatttctgaagccttcaccagcacaggctttgaccgtcacacttctccagtgttcagccctgccaatccagaaagctcaatggaagactgcttggcccatcttggagaaaaagtgtcccaggaactgaaagagcctctccataaagcattgcaaatgctcctgagccagccagtgacatatcaggcatttcgggaatgtacactggagaccacagttcatgccagcggctggaataagattttggtgcctctggttttgctacgacaaatgcttttggaattgacaagacgtggtcaagaacctttgagcgcactgctgcagtttggcgtgacatacctggaggactattcggcagagtacatcattcagcaaggtggctgggtatgagctgttatatattaaaaatattttcttgaaaaaaaattaggtttgttgtttttcttaagagatgggttcttgctgtgttacccgggctggagtgcagtgtctaattgctggcactatcatggcaggcttcggtctcaaactcctgggctcaagtgatcctgcctcaggtcctgaatagccaagagcacaggctgggactataggtgcccaccactgtgccgtgctctatcccgtactttttgatatgtaattattattattattcagttggttcagttgtttataaattttccttatatgttctttgacccttgaattacttagaaatgtattttttaatttctaaatacttacaggtttaaaaattttgttttcaattactaatttaattctgtttcatcagaaagcacgaccatcgtggcattgaaacttgagttatagcctactatcatgatcaatttaaaaaatatatatatagggctgggtgcagtggtgcacatctgtaatcccagtgctttgggaggctgaggtgggtgaatcacctgaggtcaggagttcaagaccagcctggtcaacatgacaaaaccccatctgtacaaaaaaatacaaaaaattaactgggcttggtggcatgtgcctgtaatcccagctactcaggaggccaaggcaggagaatcacttgaacccgggaggcagaggttgcagtgagccaagatggcaccactgcattccagcctgggcaacagagcaacaacaacaacaacaacaaaatatatatatacacacacacacacacatatgtatatgtatatacacacatgtatatttttatgtatgtttcagaacatgtattctctaatggttggtgcagaagtctgtacgtgtccatttacatttaatcagtcttaataatacgtattttaaatctttcagtcatttccaattattttgtctaattatttactaagagagacatgttctatttgctactatggtggtagattttccattttccctttagttctgtcaattgtaggtgactaaaagttgtaattattgacccctggacatttatgcggactctctttctttctttgggcctagaaatggtttttaagtttatttgttgtaatttgcccaacagtcagtgattctgtagagagagtacttttcataaagtatactactcattattgttttttagccactatgcatctgagggtttgagttaatttttaaaatatgtaaatttaattactatggatactaatatcgaacatcctaggtttacgtgcttggtaaatgcttactgaataaaatcctgaacatttgtcttaggaa

SEQ ID NO: 343533 - DNA, 2662 bp, Artificial Sequence
  derived and/or modified sequence
acgccggggtgacctcaccctccaacatggcggcggcggtagattagggccgcgggtcggagcactcaccgccgctgggggaccctgtcggaagcaactgccgccgccgcctctttcatctcttctggggcaggggccagggccaggttttacacatccataagtagacctttttggagcctcaccagccaattcaatggcgtcctcttctactgtgcctctgggatttcactatgaaacaaagtatgttgttctcagctacttgggactcctctctcaagagaagctgcaagagcaacatctttcctcaccccaaggggttcaactagatatagcttcacaatctctggatcaagaaattttattaaaagttaaaactgaaattgaagaagagctaaaatctctggacaaagaaatttctgaaggccagtgacatatcaggcatttcgggaatgtacactggagaccacagttcatgccagcggctggaataagattttggtgcctctggttttgctacgacaaatgcttttggaattgacaagacgtggtcaagaacctttgagcgcactgctgcagtttggcgtgacatacctggaggactattcggcagagtacatcattcagcaaggtggctggggcactgtgtttagtcttgagtcagaggaggaggaataccctggaatcactgcagaagatagcaatgacatttacatcctgcccagcgacaactctggacaagtcagtcccccagagtctccaactgtgaccacttcctggcagtctgagagcttacctgtgtcactgtcagctagccagagttggcacacagaaagcctgccagtgtcactaggccctgagtcctggcagcagattgcaatggatcctgaagaagtgaaaagcttagacagcaacggagctggagagaagagtgagaacaactcctctaattctgacattgtgcacgtggagaaagaagaggtgcccgagggcatggaagaggctgctgtggcttctgtggtcttgccagcgcgggagctgcaagaggcacttcctgaagccccagctcccttgcttccacatatcactgccacctccctgctggggacaagggaacctgacacagaagtgatcacagttgagaaatccagccctgctacatctctgtttgtagaacttgatgaagaagaggtgaaagcagcaacaactgaacctactgaagtggaggaggtggtccccgcactggaacccacagaaacgctgctgagtgagaaggagataaacgcaagggaagagagccttgtggaagagctgtcccctgccagcgagaagaagcccgtgccgccgtctgagggcaagtctagactgtcccccgccggtgagatgaagcccatgccgctgtctgagggcaagtctatactgctgtttggaggggctgctgctgttgccatcctggcagtggccatcggggtagccctggctctgagaaagaaataggaggcttttcagaagagaaagacagaaggatgtaaggttggagttgtattggctggaatttgaacctccagcagctgtctggacatttgtggaacactctgggataattggggacttctgctcaacatggcagtggcatgttaggcatgttagggcttgaggtggggcattcacattcatctgactgtaaatcccaagggcctccgctcatgctaaattgagaatcttaggggtaaagcaccccctccaggaccgggtttctcagccttggcactagtgctgttctgaccattctctgtgttggggctgtcctgtgtgtggtgggctccacccactagatgccagtggcaccccctcccagagatgacaaacgaaaatgtctctagacattgccaaatgtcccgtgtgaacatcccctattgagacccactgctttagcgagagagggtttacttaggaagaattgggatagaaattcccagctgagagaacttagctgtgggctcctcagctactgacttcttagctcttaatccccttagaatttcatctttctcgatgagcaggctctgcacccactctttttttgccccccgccctcatcctggagtgtgagggtgctcgcccgtactctcagctgcctctcagggactgcactgttcctcttcacccccaggttcctgctaagatcccacgggcgagggcttgctctggactcagtctgtcaagtccccgaagcttcctgcagctccaccttgtaaaaatgctgcctttgggaatcttcgaaatatgtacacagagaaaatcacatgaaggagacctggggtccccacttgtgagtgcaactgcaagtaactctggctagagagacacatgtgtcttgtgtcaaggcaggaggataacctggatgaccttctgaggtctcttcagcccttttcgctagtggtcacccaccaccatggttacttgccagcaacatctctattgctggatggtccctgtctataaccttgggctagtatattttttccaatatgggaccttagtcttactactgatgagttctatgggtctcttgctagggggtaaggatttttattcttgggcttatagagccagttagatcataattcttatgaaatagagagtgtcctaaatatcactg

SEQ ID NO: 343534 - protein, 456 aa, Artificial Sequence
  derived and/or modified sequence
ELEAALHRDDVEFISDLIACLLQGCYQRRDITPQTFHSYLEDIINYRWELEEGKPNPLREASFQDLPLRTRVEILHRLCDYRLDADDVFDLLKGLDADSLRVEPLGEDNSGALYWYFYGTRMYKEDPVQGKSNGELSLSRESEGQKNVSSIPGKTGKRRGRPPKRKKLQEEILLSEKQEENSLASEPQTRHGSQGPGQGTWWLLCQTEEEWRQVTESFRERTSLRERQLYKLLSEDFLPEICNMIAQKETPVLTRIEKQKRKEEEEERQILLAVQKKEQEQMLKEERKRELEEKVKAVEGMCSVRVVWRGACLSTSRPVDRAKRRKLREERAWLLAQGKELPPELSHLDPNSPMREEKKTKDLFELDDDFTAMYKVLDVVKAHKDSWPFLEPVDESYAPNYYQIIKAPMDISSMEKKLNGGLYCTKEEFVNDMKTMFRNCRKYNGESSGKQGRSLC

SEQ ID NO: 343535 - DNA, 1371 bp, Artificial Sequence
  derived and/or modified sequence
gagttggaggcggctctccacagagatgacgtggagttcatttctgacctgatcgcttgcctgctgcagggctgctaccagcggcgcgatataacacctcagacttttcactcttaccttgaagacatcatcaactaccgctgggaactggaagagggcaagcccaatcctttaagggaggcctccttccaggatctgccacttcgaacccgcgtcgaaatcctgcataggctctgcgactataggctcgacgcggatgacgtgtttgacctgctgaagggactcgacgccgacagtctcagggtcgaaccgctgggtgaggacaactctggcgctttatactggtacttttatggtactcggatgtataaagaggatccggttcagggaaagagcaatggggaactctccttgtcaagggagagtgaaggccaaaagaatgtgtcctcaatccctggaaagactgggaaaagacgcggccggccaccaaagagaaagaagctgcaggaggaaatactgctttccgagaaacaagaagagaatagccttgcctcggagcctcagactagacatggatcgcaggggcccggacagggcacctggtggctgctctgccagactgaggaggagtggcgccaggtaaccgaaagcttccgtgagagaactagcctgcgcgaacgccagctctataagctgctgtccgaagactttctcccggaaatttgcaatatgattgcccagaaggagacccctgttctgactagaattgaaaagcagaagcgcaaggaggaagaagaggaaaggcagattctcctggccgtgcagaaaaaggagcaggaacaaatgttgaaggaggagcgaaaaagggaattggaagagaaggtgaaggcagtggagggcatgtgcagtgtgcgagttgtgtggagaggagcgtgcctgtcaacaagcaggccagtggatagggctaaaagaaggaaactgagagaggagcgcgcgtggctactggctcaggggaaagagttgccccccgaactctcacacctcgaccccaactctcccatgcgggaggaaaaaaaaacaaaagacctgttcgaactggacgacgactttactgcgatgtataaggtcttggacgtggttaaggcacataaagactcctggcctttcctcgaacctgtggacgaatcctatgcccctaattattatcaaattattaaagctccgatggacatctcatctatggagaagaagttaaacggtggcctttactgtactaaggaagaattcgttaatgacatgaaaactatgttcagaaattgtcgtaagtataatggggagtcaagcggtaaacaaggacgatcgctctgctag

SEQ ID NO: 343536 - DNA, 1371 bp, Artificial Sequence
  derived and/or modified sequence
gagctggaggccgccctgcacagagatgatgtggagttcatcagtgacctgattgcctgcctgctgcagggctgctaccagaggcgggacatcaccccccagaccttccacagctacctggaggacatcatcaactaccgctgggagctggaggagggcaagcccaaccccctgcgggaggccagcttccaggacctgcccctgcggaccagggtggagatcctgcaccggctgtgtgactaccgcctggatgctgatgatgtgtttgacctgctgaagggcctggatgctgacagcctgcgggtggagcccctgggggaggacaacagcggggccctgtactggtacttctacggcaccaggatgtacaaggaggaccctgtgcagggcaagagcaatggagagctgagcctgagccgggagagcgagggccagaagaatgtgagcagcatccctgggaagacaggcaagaggcggggccggccccccaagaggaagaagctgcaggaggagatcctgctgtctgagaagcaggaggagaacagcctggccagcgagccccagaccaggcatggcagccagggccctggccagggcacctggtggctgctgtgccagacagaggaggagtggaggcaggtgacagagagcttccgggagaggaccagcctgcgggagcggcagctgtacaagctgctgtctgaggacttcctgcctgagatctgcaacatgattgcccagaaggagacccctgtgctgacccgcatcgagaagcagaagaggaaggaggaggaggaggagcggcagatcctgctggccgtgcagaagaaggagcaggagcagatgctgaaggaggagaggaagcgggagctggaggagaaggtgaaggctgtggagggcatgtgcagcgtgcgggtggtgtggaggggggcctgcctgagcaccagcaggcctgtggaccgggccaagaggaggaagctgcgggaggagcgggcctggctgctggcccagggcaaggagctgcccccagagctgagccacctggaccccaacagccccatgagggaggagaagaagaccaaggacctgtttgagctggatgatgacttcaccgccatgtacaaggtgctggatgtggtgaaggcccacaaggacagctggcccttcctggagcctgtggatgagagctatgcccccaactactaccagatcatcaaggcccccatggacatcagctccatggagaagaagctgaatggaggcctgtactgcaccaaggaggagtttgtgaatgacatgaagaccatgttcaggaactgcaggaagtacaacggggagagcagcggcaagcagggccgcagcctgtgctag

SEQ ID NO: 343537 - DNA, 1371 bp, Artificial Sequence
  derived and/or modified sequence
gagctggaggccgccctgcaccgggacgacgtggagttcatcagcgatctgatcgcatgcctactccaaggatgctatcagagacgagatattaccccccagacttttcattcatatcttgaggacatcattaactacagatgggagctcgaagaaggaaagcccaaccctctgagggaagccagctttcaggaccttcccttgcggacaagggtagaaattctccatcgtctgtgcgattaccgacttgacgcagacgacgtatttgaccttctgaagggtcttgacgccgactcactccgcgtggaacccctcggcgaagataattccggcgctctgtattggtatttttacgggaccagaatgtataaggaagaccccgtgcagggtaagagcaacggcgagctgagcctatcccgcgaatcggaagggcagaaaaatgtgtcctcaatccccggcaaaacgggcaaacgccgcgggcggccacctaaacgcaagaagctacaagaggagatcctgcttagcgaaaagcaggaagagaacagcctggcttctgagccacagaccagacacggcagccaggggcccggacagggcacctggtggctgctgtgtcagacggaggaggaatggcgtcaggtgactgagagctttcgggagcgaactagcctcagggaacgccaactatacaaactgctttccgaagacttcctgccggaaatctgtaatatgatcgcccagaaggaaacaccagtccttaccaggattgaaaagcagaaacggaaggaagaggaggaagagcgccaaattctgttagccgtccagaagaaggaacaggagcagatgcttaaggaggaaagaaaacgagagctggaagagaaagtgaaggctgtcgagggcatgtgtagcgtgagggtggtctggaggggcgcctgcttgtctacctctcgtcccgttgatcgagcaaagaggcggaaacttagagaagagcgggcatggctgctagctcaggggaaagaactgccccctgagctctcccacctcgacccaaattcaccaatgagagaagaaaagaagactaaagatctgttcgagctagatgacgactttacagccatgtataaagtgctggacgtggtcaaggctcacaaggatagctggcctttcctcgagcccgtcgatgaaagttacgcccccaactactaccagatcataaaagcacccatggatatctcaagtatggaaaaaaagctgaacggcggattatattgtaccaaggaagagtttgttaatgacatgaaaacaatgttcaggaattgtcggaaatataatggcgagtctagcggcaagcaggggcgctcgctgtgttag

SEQ ID NO: 343538 - DNA, 1371 bp, Artificial Sequence
  derived and/or modified sequence
gaattggaggccgcattacaccgcgatgatgtggagtttatctcagacctcatcgcctgccttctgcagggctgttaccaaagacgcgatataactccacaaaccttccactcctatctggaagacatcattaattatcgatgggagctggaggagggtaagcctaatccactgagggaagcttcgtttcaggatctcccactgcgaacgcgggtggaaattctgcaccggctgtgcgattaccggctggacgccgatgatgtgttcgacctgcttaagggactggatgccgactctcttagggtcgagccactgggggaagacaactccggggcactgtactggtacttctacggaacccggatgtacaaagaggacccagtccagggcaagtcgaacggggagctgtccttatccagagagtccgagggccagaaaaatgtatcatcgattcccggaaaaacagggaaacggagaggtaggccccctaagcggaagaaactgcaggaagaaattctcctctcagaaaaacaagaggagaattccctagcctcagagccacagacccgacatgggagccaaggccctggccagggaacttggtggcttctgtgccagaccgaggaggagtggaggcaagtaaccgaatctttccgcgagcgtacttctcttagggaacggcagctttacaagttgctgagtgaggacttcctgccagaaatatgcaatatgatagcccagaaggagactccagtcctcacacgtattgagaaacagaaaagaaaagaggaggaggaggagagacagatcctgctggccgtgcaaaagaaggagcaagaacaaatgctgaaggaagagcggaaaagggagctggaggagaaagtgaaagccgtagaggggatgtgcagtgtgagagtagtgtggcgcggtgcctgcttaagcacgagccgcccagtcgacagagcaaagaggagaaaactgcgcgaggagcgcgcttggctgttggcgcagggtaaggagttaccaccagaacttagccacttagaccctaattcaccaatgcgggaagaaaagaaaacgaaagacttgttcgaactcgacgacgatttcacggcgatgtataaggtcctggacgtggtgaaagctcacaaagactcttggcccttcctggagcctgtggatgagagctacgctcctaactactaccagatcattaaagccccaatggatatctctagtatggagaagaaattgaatggcggactgtattgtactaaggaggaatttgtgaatgacatgaaaacaatgtttaggaattgtcgaaagtacaacggcgaatcctctgggaagcagggccgtagcctctgctag

SEQ ID NO: 343539 - DNA, 1448 bp, Artificial Sequence
  derived and/or modified sequence
aaaggaaaaaggatgaacaaatgcctgtgtggtttcacttatatagtactcagcttgacgccatgtgaaatgaagaggagttagaagccgctcttcacagagatgacgtggagtttatcagtgacctgattgcctgcctgcttcagggctgctatcaacgaagagatatcacgcctcagacattccacagctacctagaggacatcatcaactaccgctgggagctcgaagaagggaagcccaaccctctgagggaagccagtttccaggacctgcctcttcgcacacgggtggagatcctgcaccgactctgtgattaccggctggatgcagacgatgtcttcgatcttctaaagggcctggatgcagacagtctccgtgtggagccattgggtgaagacaattctggggcactatattggtatttctatggaacacgaatgtacaaagaggacccggtgcaaggaaaatccaatggagaactctctttgagcagggaaagtgaaggacaaaaaaatgtctcaagtattcctggaaaaacgggaaaaagaagaggaagacccccaaaacggaagaaactgcaggaggagattctgttgagtgaaaagcaggaagaaaattccttggcatccgagccacagacaagacatgggtcccaagggccaggccaaggtacttggtggctcctgtgccagacagaagaggaatggagacaggtcaccgagagttttcgcgagaggacctcccttcgagaacggcagctctacaagctcctcagtgaggacttcctgcctgagatctgcaacatgatcgcccagaaggagactcctgtgctgaccagaatagaaaaacaaaagcgcaaagaggaggaagaagagcgtcagattcttctagcagtgcagaagaaggagcaggagcagatgctaaaggaagagaggaaacgcgagttggaggagaaggtcaaggcagtggaaggtatgtgcagtgtccgcgtggtctggagaggtgcatgtctgtcgaccagccgtcctgtagatcgagcgaagaggagaaagctcagggaagaaagggcatggctgctggctcaaggaaaggagctccctccagaactttcccatctggaccccaattcccccatgagagaggaaaaaaagactaaagacctctttgagttggatgatgatttcactgctatgtataaagttctagacgtggtaaaggctcacaaggattcctggcccttcttggaacctgtggatgaatcttatgcccctaactattatcagattattaaggcccccatggatatttccagcatggagaagaaactgaatggaggtttatactgtaccaaggaggaatttgtaaatgacatgaagaccatgttcaggaattgtcgaaagtataatggggaaagtagtggtaagcagggaaggagtttgtgctag

SEQ ID NO: 343540 - DNA, 1371 bp, Artificial Sequence
  derived and/or modified sequence
gagctggaggccgccctgcacagagacgacgtggagttcatcagcgacctgatcgcctgcctgctgcagggctgctaccagagaagagacatcaccccccagaccttccacagctacctggaggacatcatcaactacagatgggagctggaggagggcaagcccaaccccctgagagaggccagcttccaggacctgcccctgagaaccagagtggagatcctgcacagactgtgcgactacagactggacgccgacgacgtgttcgacctgctgaagggcctggacgccgacagcctgagagtggagcccctgggcgaggacaacagcggcgccctgtactggtacttctacggcaccagaatgtacaaggaggaccccgtgcagggcaagagcaacggcgagctgagcctgagcagagagagcgagggccagaagaacgtgagcagcatccccggcaagaccggcaagagaagaggcagaccccccaagagaaagaagctgcaggaggagatcctgctgagcgagaagcaggaggagaacagcctggccagcgagccccagaccagacacggcagccagggccccggccagggcacctggtggctgctgtgccagaccgaggaggagtggagacaggtgaccgagagcttcagagagagaaccagcctgagagagagacagctgtacaagctgctgagcgaggacttcctgcccgagatctgcaacatgatcgcccagaaggagacccccgtgctgaccagaatcgagaagcagaagagaaaggaggaggaggaggagagacagatcctgctggccgtgcagaagaaggagcaggagcagatgctgaaggaggagagaaagagagagctggaggagaaggtgaaggccgtggagggcatgtgcagcgtgagagtggtgtggagaggcgcctgcctgagcaccagcagacccgtggacagagccaagagaagaaagctgagagaggagagagcctggctgctggcccagggcaaggagctgccccccgagctgagccacctggaccccaacagccccatgagagaggagaagaagaccaaggacctgttcgagctggacgacgacttcaccgccatgtacaaggtgctggacgtggtgaaggcccacaaggacagctggcccttcctggagcccgtggacgagagctacgcccccaactactaccagatcatcaaggcccccatggacatcagcagcatggagaagaagctgaacggcggcctgtactgcaccaaggaggagttcgtgaacgacatgaagaccatgttcagaaactgcagaaagtacaacggcgagagcagcggcaagcagggcagaagcctgtgctag

SEQ ID NO: 343541 - protein, 511 aa, Artificial Sequence
  derived and/or modified sequence
MLVDGPSERPALCFLLLAVAMSFFGSALSIDETRAHLLLKEKMMRLGGRLVLNTKEELANERLMTLKIAEMKEAMRTLIFPPSMHFFQAKHLIERSQVFNILRMMPKGAALHLHDIGIVTMDWLVRNVTYRPHCHICFTPRGIMQFRFAHPTPRPSEKCSKWILLEDYRKRVQNVTEFDDSLLRNFTLVTQHPEVIYTNQNVVWSKFETIFFTISGLIHYAPVFRDYVFRSMQEFYEDNVLYMEIRARLLPVYELSGEHHDEEWSVKTYQEVAQKFVETHPEFIGIKIIYSDHRSKDVAVIAESIRMAMGLRIKFPTVVAGFDLVGHEDTGHSLHDYKEALMIPAKDGVKLPYFFHAGETDWQGTSIDRNILDALMLNTTRIGHGFALSKHPAVRTYSWKKDIPIEVCPISNQVLKLVSDLRNHPVATLMATGHPMVISSDDPAMFGAKGLSYDFYEVFMGIGGMKADLRTLKQLAMNSIKYSTLLESEKNTFMEIWKKRWDKFIADVATK

SEQ ID NO: 343542 - protein, 24 aa, Artificial Sequence
  derived and/or modified sequence
MLVDGPSERPALCFLLLAVAMSFF

SEQ ID NO: 343543 - protein, 469 aa, Artificial Sequence
  derived and/or modified sequence
MMRLGGRLVLNTKEELANERLMTLKIAEMKEAMRTLIFPPSMHFFQAKHLIERSQVFNILRMMPKGAALHLHDIGIVTMDWLVRNVTYRPHCHICFTPRGIMQFRFAHPTPRPSEKCSKWILLEDYRKRVQNVTEFDDSLLRNFTLVTQHPEVIYTNQNVVWSKFETIFFTISGLIHYAPVFRDYVFRSMQEFYEDNVLYMEIRARLLPVYELSGEHHDEEWSVKTYQEVAQKFVETHPEFIGIKIIYSDHRSKDVAVIAESIRMAMGLRIKFPTVVAGFDLVGHEDTGHSLHDYKEALMIPAKDGVKLPYFFHAGETDWQGTSIDRNILDALMLNTTRIGHGFALSKHPAVRTYSWKKDIPIEVCPISNQVLKLVSDLRNHPVATLMATGHPMVISSDDPAMFGAKGLSYDFYEVFMGIGGMKADLRTLKQLAMNSIKYSTLLESEKNTFMEIWKKRWDKFIADVATK

SEQ ID NO: 343544 - protein, 152 aa, Artificial Sequence
  derived and/or modified sequence
MLVDGPSERPALCFLLLAVAMSFFGSALSIDETRAHLLLKEKMMRLGGRLVLNTKEELANERLMTLKIAEMKEAMRTLIFPPSMHFFQAKHLIERSQVFNILRMMPKGAALHLHDIGIVTMDWLVRNVTYRPHCHICFTPRGIMQFRFAHPT

SEQ ID NO: 343545 - DNA, 459 bp, Artificial Sequence
  derived and/or modified sequence
atgctggtggacggccccagcgagcggcccgccctgtgcttcctgcttctggccgtggcaatgtcattctttgggagcgccttgagcatcgatgagacgagagctcatttattgcttaaggagaaaatgatgagactcggagggcggttggttcttaacactaaagaggagttagccaacgaacgccttatgacactgaagatcgcggagatgaaagaagcaatgcggactctgattttcccaccaagtatgcacttttttcaggccaaacatttgatcgaacgcagtcaggtctttaatatcctgagaatgatgcccaaaggcgcagccctgcatttacatgatatcggaatcgttactatggactggctggtcagaaacgtgacctatcggcctcactgtcatatttgctttacacctcgcggaattatgcagtttcgtttcgcccaccctacctag

SEQ ID NO: 343546 - DNA, 1536 bp, Artificial Sequence
  derived and/or modified sequence
atgctggttgatggaccatctgagaggcctgcactgtgctttttattattggcggtggcaatgtctttttttggcagcgccttatccatcgacgagacccgggcacacctccttttgaaggaaaagatgatgagactcggcggacgtctggttttgaataccaaagaagagctggcaaatgaacgtttgatgacactgaaaattgcagaaatgaaggaggccatgagaacgctcatatttccaccttcaatgcacttcttccaggctaagcatctgatcgaacggagccaagtgttcaacatactgaggatgatgcccaagggagcagcactccaccttcacgatatcggaatcgtgaccatggactggctcgtgcgtaacgtgacctaccgaccccattgccatatctgctttacgcctcgagggattatgcagtttagattcgcccatcccaccccaagaccgagcgaaaagtgcagtaagtggatcctcctcgaggactataggaagcgagtgcagaatgtgacagaattcgacgatagcctcctgcgcaacttcactctggtgacacagcatcctgaagtcatctacactaaccagaatgttgtgtggtcaaagttcgagacaattttcttcactatcagtggcctcatccactatgccccagtgtttcgcgactatgtgttcagatccatgcaggaattctatgaggacaatgtgttgtacatggaaattagagctcgcctgctgcctgtctatgaattgtcaggagagcaccacgatgaggagtggtcagtcaagacgtatcaggaagtggcccagaagtttgtggaaacccacccagaatttattggaattaagattatttactcagatcatagatctaaggacgttgctgtaatagccgagtccattaggatggccatgggcctgaggattaagttccctaccgtagtggcgggtttcgacttggtcggtcacgaagacacaggccactctctgcatgactacaaggaagcccttatgatccccgctaaagacggcgtaaaacttccttatttctttcacgccggagaaacagactggcaggggacatcaatcgacaggaatatattagatgctctgatgctcaatactactcggattgggcatggcttcgctctctctaaacatcctgctgtgcggacttattcctggaaaaaggatattcccatagaggtttgcccgataagcaaccaggttctcaaacttgtgtcagatctgagaaaccatcctgtggcaactttgatggccaccggccatcccatggtgatcagtagtgacgaccccgctatgtttggcgctaaaggactatcttatgatttttacgaagtgtttatgggaataggtggaatgaaggcagatctgcggacactaaagcagctggcaatgaactcgattaagtactctactttacttgagtccgagaagaatacttttatggaaatctggaaaaaacgatgggataaatttatagcagatgtagctaccaagtag

SEQ ID NO: 343547 - DNA, 1603 bp, Artificial Sequence
  derived and/or modified sequence
agtttctggagctgttccgagtcccgtggagtctccatctgagccctttcctagtccaggcatcccgatgttggtggatggcccatctgagcggccagccctgtgcttcttgctgttggctgtggcaatgtctttcttcggctcagctctatccatagatgaaacacgggcgcatctgttgttgaaagaaaagatgatgcggctgggggggcggctggtgctgaacaccaaggaggagctggccaatgagaggctcatgacgctcaaaatcgctgagatgaaggaggccatgaggaccctgatattcccacccagcatgcactttttccaggccaagcatctcattgagagaagtcaagtgtttaatattctaaggatgatgccaaaaggggctgccttgcacctccatgacattggcatcgtgactatggactggctggtgaggaatgtcacctacaggcctcactgccacatctgtttcaccccaagggggatcatgcagttcagatttgctcacccaactccccgtccatcagaaaaatgttccaagtggattctgctggaggattatcggaagcgggtgcagaacgtcactgagtttgatgacagcttgctgaggaatttcactctggtgacccagcacccggaggtgatttacacaaaccaaaatgttgtctggtcgaaatttgaaaccatcttcttcaccatctctggtctcatccattacgcaccagtgttcagagactatgtcttccggagcatgcaggagttctacgaggacaacgtgctctacatggagatcagagccaggctgctgccggtgtatgagctcagtggagagcaccatgacgaagagtggtcagtgaagacttaccaggaagtagctcagaagtttgtggaaactcaccctgagtttattggaatcaaaatcatttattcggatcacagatccaaagatgtggctgtcatcgcagaatccatccgaatggccatggggctccgaatcaagttccccacggtggtggcagggtttgacctggtggggcatgaggacactggccactccttgcatgactacaaggaagctctgatgatccccgccaaggatggcgttaagctgccttacttcttccacgccggagaaacagactggcagggtacttccatagacaggaacattctggatgctctgatgctgaacactaccagaatcggccatggatttgctttgagcaaacaccccgcagtcaggacttactcctggaaaaaggacatccccatagaagtctgtcccatctctaaccaggtgctgaaactggtgtctgacttgaggaaccaccctgtagccactctgatggccactgggcaccccatggtgatcagctctgatgacccagctatgtttggtgccaaaggcttgtcctatgatttctatgaggtcttcatgggcattggggggatgaaggctgacctgaggaccctcaaacagctggccatgaactctatcaagtacagtaccctgttggagagtgagaaaaatactttcatggaaatctggaagaagagatgggataagttcatagcagatgtggctacaaagtga

SEQ ID NO: 343548 - DNA, 3986 bp, Artificial Sequence
  derived and/or modified sequence
attcttcccgaatggcctcacgtgtgctccctatcatcacgccttttcagctaggcaacgctcagagtcacacctgagtggaggccgacgcccctttggaggcgactccagccataaaaagtcctgcttggagctggttttagccacagagggccaataaatggccccttctgaatgaggtgcccctgcacctctgcagagcctgctgccagcctccaggatctaactgggctctgattcaccgctcccaaccccacatccaggcatcccgatgttggtggatggcccatctgagcggccagccctgtgcttcttgctgttggctgtggcaatgtctttcttcggctcagctctatccatagatgaaacacgggcgcatctgttgttgaaagaaaagatgatgcggctgggggggcggctggtgctgaacaccaaggaggagctggccaatgagaggctcatgacgctcaaaatcgctgagatgaaggaggccatgaggaccctgatattcccacccagcatgcactttttccaggccaagcatctcattgagagaagtcaagtgtttaatattctaaggatgatgccaaaaggggctgccttgcacctccatgacattggcatcgtgactatggactggctggtgaggaatgtcacctacaggcctcactgccacatctgtttcaccccaagggggatcatgcagttcagatttgctcacccaactccccgtccatcagaaaaatgttccaagtggattctgctggaggattatcggaagcgggtgcagaacgtcactgagtttgatgacagcttgctgaggaatttcactctggtgacccagcacccggaggtgatttacacaaaccaaaatgttgtctggtcgaaatttgaaaccatcttcttcaccatctctggtctcatccattacgcaccagtgttcagagactatgtcttccggagcatgcaggagttctacgaggacaacgtgctctacatggagatcagagccaggctgctgccggtgtatgagctcagtggagagcaccatgacgaagagtggtcagtgaagacttaccaggaagtagctcagaagtttgtggaaactcaccctgagtttattggaatcaaaatcatttattcggatcacagatccaaagatgtggctgtcatcgcagaatccatccgaatggccatggggctccgaatcaagttccccacggtggtggcagggtttgacctggtggggcatgaggacactggccactccttgcatgactacaaggaagctctgatgatccccgccaaggatggcgttaagctgccttacttcttccacgccggagaaacagactggcagggtacttccatagacaggaacattctggatgctctgatgctgaacactaccagaatcggccatggatttgctttgagcaaacaccccgcagtcaggacttactcctggaaaaaggacatccccatagaagtctgtcccatctctaaccaggtgctgaaactggtgtctgacttgaggaaccaccctgtagccactctgatggccactgggcaccccatggtgatcagctctgatgacccagctatgtttggtgccaaaggcttgtcctatgatttctatgaggtcttcatgggcattggggggatgaaggctgacctgaggaccctcaaacagctggccatgaactctatcaagtacagtaccctgttggagagtgagaaaaatactttcatggaaatctggaagaagagatgggataagttcatagcagatgtggctacaaagtgaggagaagctagccagccctctacaagctgtcttcttgcacacgctgtcacttcctctcactcgttcttgaatcagctccatgtgcccatgaaatcaatggcctctgtatggagcgaccctgtgagaagcacttggctggctgagcaaattcatcctctggaaatattctctctcagccacagtgacattgaccctcttggttttctcctgtctctggccatttcttccagtttccctatttcagagtcttctcctctctctgatctctgtgctgtttcctcaggactcagtcctgggctctcttctattctggtctctttatttttttatttttgtattttttcgagatggagttttgctcttgttgcccaggctggagtacaatggtgcgatctcagctcagtgcaacctccgccacccgggttcaggcaattctcttgcatcagcctcgcgagtagttggaattataggcatgtgccaccacacccagctgatttttgcatttttagtagagacaggttttcaccatgttggcgaggctggtatccaactcttgacctcaggtgatccactcgccccttggctcccaaagtgctggaattacaggcattagccaccatgcctggcctattctggtctctttaactctctcctctttatttctcttctctctctgtacacttttcctgggtggtctcatccattcctttgctttttcataccatttatttgttaatgattcccacatttatttatgcacttggagagctcacaggaatctcagaaactgatgaggtacaattctgaaccctcagtctcttccctttaaacctttctttttctctactttaatttttctaaagagtgtcttgctatgttgcccaggctggtctccaactcaagtgatcctcctgccgcagtctcccgaagtgctgggattactgacatgagccaccacactcagccctttaaacctttccctggcctttcccatagctggtgaaggacacctccatccattccacgcagttgctcaaagcagaaattttcagtgcaagtcttgatgctgcgccgtcccccactccctacatcagaacgcatccctcatctggactccagcggtggcttcttgatgctgcgcggtcccccactccctacatcagaatgcatcccgcatccagactccagcggtggtgctctacctgcacgctgttgccaagtccaagctaccatactcctgcctgagctatgacaacagcctcctcactgatctcccctttcttccctttgcctcctccagctcatttttcacagtgtagaatgacattttgtttgtttgttttgttttgtttgagatggagtctcgctctgttgcccagggtggagtgcagcggtgcgatctcggctcactgcaacctccacctcccgggttcaagcggattctcgtgcctcagcctcctgagtagctgggattacaggcatgcaccaccatgcccggataatttttgtatttttagtagagatggggtttcactatgttggccaggctggtctcgaacacctgacctcgtggtccacccgcctcggcctcccaaagcactgggattacaggcgtgagccacccggcctggcctagaatgacttttaaaagatcaaattaaatcaggtcactcctttgcttacaacgcagtgcgtttagaggtacaccccatgtctccacagggcatacagcatccgatttaatctggatccattccggcgccttcctctcccagtcacccagagggccccaaccccggcggccctttcttcctcaaatgtcctcggctctataccgtgcctgggtcttttctctttctctctgcctggaagattccttctttccccttttgtcttgcccactcctgtttacccttcaagtttcaagttcatgtcactgtctcagagaggttttcctgtgctcgccctgtttctctcaggaagccttgctcttttccatcatgcctctaatcacagcttataatcggatatttatttctgtgtctacagtcttgccctgccagactgtatgccccatgtgggcaggcgctcatgattgtttctgattgtttcacgcatgctgctaacccagagcctgggcccaaagctagttagtactcaataaacaatgcattgaatg

SEQ ID NO: 343549 - DNA, 75 bp, Artificial Sequence
  derived and/or modified sequence
atgctcgtggatgggccatcagagagacctgctctgtgttttctgctgctggcagttgccatgtcatttttctag

SEQ ID NO: 343550 - DNA, 1536 bp, Artificial Sequence
  derived and/or modified sequence
atgctcgtcgatggcccatcagagaggccagcactgtgctttttgctgctggcagtggcaatgagtttttttggaagcgccctcagtatcgatgagactcgggctcacctgctcctcaaggagaagatgatgagactaggcggacgcctcgtgctgaatacaaaagaggaactcgctaacgaacgtctgatgacgttgaaaatcgctgaaatgaaggaagccatgagaactctgatatttccgccatccatgcatttcttccaggctaaacacctgatagagcggtcacaggtgttcaatatcctcagaatgatgcctaagggggctgctttgcatcttcacgatattggcatcgtgaccatggattggctggtgagaaacgtgacctatcgacctcactgtcacatctgctttaccccccgtggtataatgcagtttaggtttgcccaccccaccccaaggccatctgagaagtgctctaaatggatcctgctcgaggattacaggaagagagttcaaaacgtgacggagttcgatgatagtcttcttcggaacttcactctagtcacacaacatccagaagtcatctataccaatcagaacgtggtgtggtctaaatttgaaacgattttctttaccatttccgggttgattcattacgccccagtctttcgggattacgtattccgttccatgcaggaattctacgaggacaatgtcctgtatatggagatccgggcacgactgttacctgtctacgaactgtcaggagaacaccatgacgaagagtggtccgttaaaacttaccaggaagtcgctcagaagttcgttgaaacacatccggaattcatcggaatcaaaattatctactctgatcatcggagcaaggacgttgccgtcatcgccgaaagcattcgcatggctatgggcctccgaattaagttcccaacagtcgtcgcaggctttgatctggtcggacatgaggacaccggtcactccctccacgactacaaggaggctctcatgatcccagcaaaggacggcgtcaaactcccatacttcttccacgccggagagacagattggcaggggacctccatagataggaatatcctggacgccctgatgctgaatacaactaggatcgggcacggttttgccctcagcaagcaccccgctgttcgaacctactcctggaaaaaggacatccccatcgaagtctgtcccatatctaatcaggtgctgaaattggttagtgacctgcggaaccacccagttgctacactgatggcaaccggccaccccatggtcatctcatctgatgatccagctatgttcggagcaaaagggctttcttacgatttctacgaagtgttcatgggcatagggggaatgaaggccgacctgcggacactcaaacagctagccatgaattcgatcaaatactctaccttactggagagcgagaagaacactttcatggaaatctggaaaaagagatgggataagttcatcgcagacgtcgccaccaagtag

SEQ ID NO: 343551 - DNA, 1536 bp, Artificial Sequence
  derived and/or modified sequence
atgctggtcgatggtccctcggagcgtcccgctttatgttttcttcttctggctgttgccatgtccttcttcggaagcgctctgagcattgatgagactagggcgcacctcctcttgaaagaaaaaatgatgcgtctcggcggtcggttggtgctgaataccaaagaagaacttgcaaatgaacgtctaatgactctgaagatcgccgagatgaaagaggctatgagaactctgattttcccaccgtccatgcactttttccaggctaaacacttaattgagcgatctcaggtgttcaatattctccggatgatgcctaaaggggcagctctgcatctgcacgacattgggatcgtaactatggactggctggtacggaacgtcacgtatcgccctcactgccacatttgcttcacacctagaggaataatgcaatttcgtttcgcccaccctactcccaggccaagtgaaaagtgttcaaagtggatcctgctcgaagactaccgcaaaagggtgcagaacgttaccgagtttgatgactcgttgcttcgtaacttcacactggtgactcagcaccctgaagtgatctataccaatcagaacgtagtgtggtcgaaattcgagacaatattctttaccataagcggccttatccactatgccccagtctttcgtgactatgtttttaggagtatgcaggagttctatgaggataacgtgctgtacatggagatccgcgcacgcttgctaccggtgtacgagctgtctggagagcatcacgatgaggagtggtcagtgaagacctatcaggaggtggcccagaaattcgtggagactcatccagagtttatcggcatcaaaattatctactccgatcacagatctaaggatgtggccgtcattgctgagagcattcggatggcaatgggtttgagaatcaaatttcccactgtggtagcgggatttgatcttgtgggacatgaagacactggccatagcctccatgattataaggaggctttgatgattccagccaaggatggcgtgaaactcccatacttcttccatgccggtgaaactgactggcagggtacaagcatcgataggaacatccttgatgctctgatgctgaacaccacccgaatcgggcacggctttgccctttccaaacaccctgccgtgagaacctactcatggaaaaaagatatccccatcgaggtctgtccaatatcaaaccaggtacttaagctcgtgtccgacctacggaatcaccccgtcgccacgttgatggccacagggcatcctatggttatttcctcagacgatccagccatgtttggtgcaaagggtcttagctatgatttctatgaggtttttatgggcataggtgggatgaaagccgatctgcggactctgaaacagctcgccatgaactctattaagtactcaaccctcctcgagtctgagaaaaacacgttcatggagatctggaagaaaaggtgggacaagtttatagcagatgtggctaccaaatag

SEQ ID NO: 343552 - DNA, 1410 bp, Artificial Sequence
  derived and/or modified sequence
atgatgcgcttgggtggacgcttggttctcaatacgaaagaagaactcgctaacgaaaggctgatgactctcaaaatagccgagatgaaagaagctatgcgtacgctgatcttccctcccagcatgcacttcttccaggctaagcacttaatcgagcggagccaggtttttaatattctgagaatgatgccaaagggcgctgctctgcacctccacgatattgggattgtgacaatggactggctggttcgaaatgtcacctataggccacactgtcatatctgttttacccctcgaggaattatgcagttcaggttcgcacaccctactccaaggccttccgaaaagtgtagtaaatggattctgttagaagactacagaaagagagtccaaaatgtgaccgagttcgacgactctctgcttcggaattttacactggtgacgcagcaccccgaagtcatatacactaatcagaatgtggtatggtctaagttcgagaccatttttttcaccatatctggtctgatccactacgctcctgttttcagagactacgtttttaggtcaatgcaagagttctatgaggataacgtcctttatatggaaattagagcaaggctgttgccagtgtacgaactctcaggtgaacatcacgatgaggaatggagcgtgaagacataccaggaggtggcgcaaaagttcgtggagacccacccagagtttatcgggataaagatcatctactccgaccacagaagtaaagacgtcgcagtgatcgccgaatctatccgaatggcaatgggattgcgcatcaaatttccaacagttgtcgccggattcgatctcgtcggtcatgaggacactggacattctctccacgattataaagaggccctgatgatccccgctaaagatggggtgaagctgccatactttttccacgcgggagagacggactggcagggtacatccattgaccgcaacattctggatgccctgatgttgaatacaactcggatcggtcacggattcgcactttccaagcacccagctgttcgaacctactcctggaagaaggacatccccatagaagtctgtcctatcagcaatcaagtcctcaagctggtgagtgacctccgcaatcacccggttgctacacttatggccacaggacatcctatggtgatctcatcagatgacccagctatgtttggcgcaaaaggactctcctacgatttctacgaggtgttcatgggaatcggtggaatgaaggcggacctgcgcactctgaagcagttggctatgaatagtatcaagtacagtaccctgctggagtccgagaagaacactttcatggaaatttggaaaaagcgctgggataagtttattgctgatgtggctacgaaatag

SEQ ID NO: 343553 - DNA, 75 bp, Artificial Sequence
  derived and/or modified sequence
atgctagtggatggcccttccgagcgccctgccctgtgcttcttgctcctcgccgtcgccatgtccttcttctag

SEQ ID NO: 343554 - DNA, 459 bp, Artificial Sequence
  derived and/or modified sequence
atgctcgtggatgggccttccgagcggcctgctttatgctttcttcttttagcagtcgcaatgtccttctttggctctgccctttccattgacgagacccgggcacatctcctcctgaaagagaagatgatgcgcttgggcggtcggttggtgctgaacacaaaggaggagctggcgaacgaacgtctgatgaccctcaaaatcgctgaaatgaaagaagcgatgcgtacccttatcttccccccatctatgcatttcttccaggcgaaacatctgatcgaacggagtcaagtcttcaacattctgcggatgatgccaaagggggcagccttgcacttacatgatatcggcatcgtgacgatggactggttggttcgcaacgttacttatcgtccccattgtcatatctgctttactccgaggggcattatgcagtttcgcttcgcccatcccacctag

SEQ ID NO: 343555 - DNA, 1536 bp, Artificial Sequence
  derived and/or modified sequence
atgctggttgacggcccaagcgaaaggccagcactctgtttcctgctgttagccgtcgcaatgtcatttttcgggtctgcgttgagcattgacgaaacccgagcacatctcctgttaaaagagaaaatgatgcggctgggtggaagacttgtactcaacaccaaagaggaactggcgaacgaaagattaatgacactgaaaatcgcagaaatgaaggaggctatgagaactctcatttttccaccttcgatgcatttcttccaggctaagcacctgattgaaagatcccaagtcttcaacattttacgtatgatgcctaaaggcgccgccctgcacctgcatgatatcggtatcgtgaccatggattggctcgtacgtaacgtcacatatcggccccattgtcacatttgttttacaccgcgtgggattatgcagttccgctttgcacatcctacccctaggccttcggaaaagtgcagtaaatggatcctgctcgaagactaccgtaaacgagtccagaatgtaaccgagttcgacgattctctccttaggaactttaccttggttacccagcatccagaagttatctacaccaatcagaacgtcgtgtggtccaagttcgagactatctttttcacgatctccggcctgatccattacgccccagtttttagggactacgtctttagatctatgcaggaattttatgaggataacgttctttatatggagattagggctaggctgctgccagtgtacgaattgtcaggagagcaccatgacgaggagtggtcggtgaagacttatcaggaggtggctcagaaattcgtggaaacacaccccgagtttattggcatcaagattatatacagtgatcatagaagtaaagacgtcgctgttatagctgaaagtattagaatggcaatgggcctgcgtatcaaattccccacagttgtcgcaggattcgatttagtcggccacgaggacaccgggcattcactgcacgattataaagaggccctgatgatccccgctaaggatggcgtcaagctcccctacttctttcacgccggggaaacagattggcagggaactagtatagaccggaatattctggatgctctgatgttaaatacaaccagaatcggacatggcttcgcattgtccaaacaccccgcagtgcgaacttattcatggaaaaaagatatccctattgaggtgtgtcctattagtaatcaggtcctgaagctggtctccgatctacgcaatcacccagtggctactctgatggcgacaggacatcctatggtcattagctcagatgatcctgcgatgtttggcgctaaaggattatcatacgacttttacgaagtgtttatgggcatcggaggcatgaaagctgacctgcggactctcaaacagctcgccatgaattctataaagtactctacgctgctcgaaagcgaaaagaacacgttcatggaaatatggaagaagagatgggataaattcatcgccgacgtggccactaagtag

SEQ ID NO: 343556 - DNA, 75 bp, Artificial Sequence
  derived and/or modified sequence
atgctcgttgatggaccctccgaaaggcccgcgctctgtttcctactcctcgccgtagcaatgtctttcttctag

SEQ ID NO: 343557 - DNA, 1536 bp, Artificial Sequence
  derived and/or modified sequence
atgctagtggacggtccttctgaacggcccgccctttgcttccttctgctggctgttgctatgtcttttttcgggagcgccttgtctatcgacgaaacccgtgcccacctgctcctgaaagaaaaaatgatgcgcttaggcggcagactggtgctgaacactaaagaggagctagctaatgaacggctgatgaccctcaagatcgcagaaatgaaagaggcgatgcggacacttatattccccccctcaatgcatttctttcaggccaaacatctgatcgaacgatctcaagtatttaacatcctgcggatgatgccaaagggagcagctctgcacctgcacgacatagggatcgtaacaatggactggttagtccggaatgtgacctaccgccctcattgccatatctgcttcacaccccggggaattatgcaatttagattcgcccatcccactccccgaccaagtgagaaatgtagcaaatggatcctgctcgaggattatcggaagcgcgtacagaatgtaacagagtttgacgatagcctactgagaaatttcacattggtcacccagcatcccgaagttatctatactaatcagaatgttgtgtggagcaaatttgaaacaatcttcttcaccatttcaggtctaattcattatgctccagtgtttcgagactacgtgttcaggtccatgcaggagttttatgaagataacgtgctctacatggaaatcagggctagattactcccagtttatgagctctcaggcgagcaccacgatgaggaatggtcagtgaagacgtatcaagaggtcgcacagaagttcgtcgaaacccaccccgaattcataggcatcaaaataatctacagcgaccatcggagcaaagacgttgccgtgatcgctgagtccataagaatggcgatgggcctgcgaatcaagtttccgacagtggttgctggattcgatctggtgggccacgaagacactggccactccctgcacgactacaaagaggccttaatgatcccagccaaagatggcgtaaagcttccatactttttccacgccggcgagaccgattggcaaggaaccagtattgacaggaatatcctcgacgcgttaatgctgaatactacgcgcataggccacggctttgccttgtctaaacatccagcagtaaggacctacagctggaaaaaagatatacctatcgaagtgtgtcccatatctaatcaggtactgaaactcgtatccgatttacgcaaccaccctgtagccacacttatggccactggccacccaatggtgatctcaagcgatgaccctgccatgttcggcgcaaaaggcttgagctacgatttttatgaggtcttcatgggcattggtgggatgaaagccgacctgaggactctgaagcagctcgccatgaactcgattaaatattcaacgctactcgagtccgagaaaaacacctttatggagatatggaagaaacggtgggacaaatttatcgcagacgtcgcgacgaagtag

SEQ ID NO: 343558 - DNA, 1536 bp, Artificial Sequence
  derived and/or modified sequence
atgctagtagatgggcctagcgagcgaccagctctgtgctttctgcttctggcagtggccatgagtttcttcggctcagctctcagcatcgatgaaaccagagcacacctcctcctcaaagagaagatgatgaggctgggaggtcgtctagtgttaaacactaaagaagagcttgctaacgagcgtctcatgactctgaagattgcagaaatgaaggaagctatgcgcacgctgatttttccgccaagcatgcactttttccaggcgaaacatctgatcgaaagaagtcaagtcttcaacatccttcgaatgatgccgaaaggagccgccttacacctgcatgatatcggcatcgttaccatggactggttggtgcggaatgtgacgtacagaccgcactgccatatttgcttcactccaaggggcattatgcagtttaggtttgcccacccaactccccggccgtccgaaaagtgtagtaagtggatccttcttgaagactaccgaaaaagagttcaaaacgtgacagaatttgacgattctctactgcgaaattttactttggtaacccagcaccccgaggtgatctacaccaaccagaacgtggtctggtctaaatttgagacaatcttcttcaccatttctggacttatccactacgcccccgtgtttcgagactatgtgtttaggtctatgcaggagttctacgaagacaatgtcctctatatggagattcgcgccaggcttttacccgtatacgaactttccggagagcatcacgatgaggagtggagtgttaaaacctatcaggaggtcgcccagaaattcgtagaaacccacccagagtttataggtatcaaaatcatctactctgaccaccggtccaaggatgtggcagtgatagcagagtctatcaggatggcaatgggacttaggatcaagttccccaccgtggttgccggcttcgacctcgtcggacatgaggatacaggccacagtttgcatgactacaaagaggccctgatgattcctgccaaagacggagtcaagttaccctacttttttcacgcaggggagaccgactggcaaggcacttctatagaccggaacattcttgatgcacttatgcttaatactaccagaatcgggcacgggtttgccttatctaaacaccctgccgtccggacctactcgtggaagaaagacatccctattgaagtttgccccatcagcaaccaggtattaaaactagtgtccgatcttaggaaccatccagtcgctactttaatggccacagggcaccccatggtgatatcctcagatgaccctgccatgtttggagccaagggactatcttacgatttctacgaggtattcatggggattggaggtatgaaggccgacttgagaaccttaaagcagctggccatgaactcaattaaatatagcaccttgttggaatccgaaaagaacactttcatggagatttggaagaaacgatgggacaaattcattgccgacgtagccacaaagtag

SEQ ID NO: 343559 - DNA, 1410 bp, Artificial Sequence
  derived and/or modified sequence
atgatgcgactcggtggaaggcttgtgttaaatacaaaggaggagcttgcaaatgagcggctgatgacactgaaaatcgccgaaatgaaggaagccatgcgtacccttattttcccaccttctatgcatttctttcaggccaaacatctcatcgaacggagtcaagtgttcaacattctgagaatgatgcctaagggagctgccctgcacttgcatgacatcgggatcgtaactatggactggctggttagaaatgttacataccggcctcactgtcacatttgctttaccccaagaggcattatgcagttccggtttgcccatccaacgcctagaccatccgaaaagtgctcgaaatggattctcctggaggactataggaaacgcgtgcagaatgttacagagttcgacgacagcctgttgcgcaatttcactcttgtaacccaacatccagaggtcatttacacaaaccagaatgtcgtgtggtccaagttcgagacaatatttttcacaataagcggcttgatccactacgccccagtatttcgagattatgtgttccgatccatgcaagagttttacgaggataacgtgctgtatatggaaatccgtgcccggctgctgcccgtgtacgagctgagcggcgagcatcatgacgaggagtggagtgtgaaaacttaccaggaggtggcacagaaattcgttgaaactcaccctgaatttattggcatcaaaattatatattccgaccacaggagtaaagatgttgcagtgatcgcagaaagcattagaatggctatggggttacgcataaaatttccaacagtggtggccggctttgacctggtgggacatgaagacacaggacattccttacatgactataaagaagcccttatgatcccggccaaggatggcgtgaaactgccctatttcttccatgcaggcgagaccgattggcagggcacatccatagatagaaatatcctggacgccctgatgctgaacactaccaggataggacatggctttgctctgtcaaagcacccggccgtccgcacatacagctggaagaaagacatcccaattgaagtgtgccctatttcgaaccaggtgttaaagttagtatctgatctcaggaaccatcccgtcgccacattgatggccaccggtcacccaatggtaattagcagtgacgacccagcaatgttcggggccaaaggactcagctacgatttctatgaggtgtttatggggatcggtgggatgaaggcagatctcagaacactcaaacagctagcaatgaactctattaagtactccacactgctggaatcagagaagaatacctttatggagatttggaagaagagatgggacaagtttatcgccgatgttgcgaccaaatag

SEQ ID NO: 343560 - DNA, 75 bp, Artificial Sequence
  derived and/or modified sequence
atgctcgtggatgggccatccgaacgtcctgctctctgttttctgctactggctgtcgcaatgtccttcttctag

SEQ ID NO: 343561 - DNA, 459 bp, Artificial Sequence
  derived and/or modified sequence
atgctcgtagatggaccctcagaacggcctgccctctgcttcctgttgcttgccgtcgccatgagcttctttggttccgctctatccattgacgagactcgggcccacctactcctgaaagagaaaatgatgcgcttgggcggaagactggttttaaataccaaagaggaactggccaatgagcgtttaatgaccctgaaaatcgccgaaatgaaagaagccatgaggacattgatttttcctccttccatgcattttttccaggctaaacatctaatcgagcgctctcaagtgttcaatatcttaaggatgatgccaaagggggcagccctgcacctgcatgacattgggattgtaacgatggattggctggttaggaacgtaacctatcgcccacactgccatatctgcttcacacctaggggaattatgcagtttcgcttcgcacatcctacatag

SEQ ID NO: 343562 - DNA, 1536 bp, Artificial Sequence
  derived and/or modified sequence
atgttggtagacggcccttccgaacgcccagctctgtgcttcctgctgttggccgttgccatgtccttctttggttcagcactatccatagatgagactagagcacatcttcttctgaaggaaaagatgatgaggttaggaggtagattggttctgaatacaaaagaagagttggcaaatgagagactgatgacactgaaaattgcagaaatgaaagaggccatgcgaacacttatattccctccctccatgcacttcttccaggctaagcacctgatcgagagatcccaagtcttcaatatcttgcgcatgatgcccaaaggagcagctcttcatctccatgatatcggcatcgttactatggactggctcgtgcggaacgtcacatacaggccccattgccacatatgttttacgcctcgtggaatcatgcaatttagattcgctcacccaactccgagaccctcagagaaatgtagtaaatggattctattggaggattataggaagagagtacaaaacgtaacggagtttgatgacagccttctccggaatttcacgttggtcacgcagcaccccgaagtgatctacacaaaccagaacgttgtttggtccaaatttgagacgatttttttcactattagtggcctgattcattacgcccctgtgttcagggactacgtctttagaagcatgcaggaattctatgaagataatgtgttatatatggagattcgcgcaagactccttcctgtttacgagctcagcggcgagcatcacgacgaggagtggagcgttaaaacgtatcaagaggttgctcaaaaatttgtcgaaacccatcccgagtttattggcataaaaataatttattcagaccataggagtaaggatgtcgcggttatcgctgaaagcatacgaatggcaatgggtctgcgcattaaattccccacagttgtcgcaggtttcgatctcgtgggccatgaggacaccggacactctctgcatgattacaaggaagccctaatgatacctgctaaagatggcgtaaaattgccctatttctttcatgcgggcgaaacagactggcagggaacctctatcgaccgaaacattttggacgccctgatgcttaacacaaccaggataggacatggtttcgccctgtctaaacaccccgctgttagaacatatagttggaaaaaagacattcccattgaagtttgcccaataagtaaccaggtcctgaaactcgtctctgaccttagaaatcaccccgttgccacattaatggccactggtcatcccatggtcatcagttccgacgatcccgctatgtttggcgctaaagggctcagctatgacttctacgaggtgtttatgggaatcggcgggatgaaagctgatttgaggaccttaaagcagctagcaatgaatagcatcaagtacagcactctcctcgagagcgaaaaaaatacctttatggagatatggaaaaagagatgggataagttcattgccgatgtcgctacaaagtag

SEQ ID NO: 343563 - DNA, 2072 bp, Artificial Sequence
  derived and/or modified sequence
agccacagagggccaataaatggccccttctgaatgaggtgcccctgcacctctgcagagcctgctgccagcctccaggatctaactgggctctgattcaccgctcccaaccccacatccagctctatccatagatgaaacacgggcgcatctgttgttgaaagaaaagatgatgcggctgggggggcggctggtgctgaacaccaaggaggagctggccaatgagaggctcatgacgctcaaaatcgctgagatgaaggaggccatgaggaccctgatattcccacccagcatgcactttttccaggccaagcatctcattgagagaagtcaagtgtttaatattctaaggatgatgccaaaaggggctgccttgcacctccatgacattggcatcgtgactatggactggctggtgaggaatgtcacctacaggcctcactgccacatctgtttcaccccaagggggatcatgcagttcagatttgctcacccaactccccgtccatcagaaaaatgttccaagtggattctgctggaggattatcggaagcgggtgcagaacgtcactgagtttgatgacagcttgctgaggaatttcactctggtgacccagcacccggaggtgatttacacaaaccaaaatgttgtctggtcgaaatttgaaaccatcttcttcaccatctctggtctcatccattacgcaccagtgttcagagactatgtcttccggagcatgcaggagttctacgaggacaacgtgctctacatggagatcagagccaggctgctgccggtgtatgagctcagtggagagcaccatgacgaagagtggtcagtgaagacttaccaggaagtagctcagaagtttgtggaaactcaccctgagtttattggaatcaaaatcatttattcggatcacagatccaaagatgtggctgtcatcgcagaatccatccgaatggccatggggctccgaatcaagttccccacggtggtggcagggtttgacctggtggggcatgaggacactggccactccttgcatgactacaaggaagctctgatgatccccgccaaggatggcgttaagctgccttacttcttccacgccggagaaacagactggcagggtacttccatagacaggaacattctggatgctctgatgctgaacactaccagaatcggccatggatttgctttgagcaaacaccccgcagtcaggacttactcctggaaaaaggacatccccatagaagtctgtcccatctctaaccaggtgctgaaactggtgtctgacttgaggaaccaccctgtagccactctgatggccactgggcaccccatggtgatcagctctgatgacccagctatgtttggtgccaaaggcttgtcctatgatttctatgaggtcttcatgggcattggggggatgaaggctgacctgaggaccctcaaacagctggccatgaactctatcaagtacagtaccctgttggagagtgagaaaaatactttcatggaaatctggaagaagagatgggataagttcatagcagatgtggctacaaagtgaggagaagctagccagccctctacaagctgtcttcttgcacacgctgtcacttcctctcactcgttcttgaatcagctccatgtgcccatgaaatcaatggcctctgtatggagcgaccctgtgagaagcacttggctggctgagcaaattcatcctctggaaatattctctctcagccacagtgacattgaccctcttggttttctcctgtctctggccatttcttccagtttccctatttcagagtcttctcctctctctgatctctgtgctgtttcctcaggactcagtcctgggctctcttctattctggtctctttatttttttatttttgtattttttcgagatggagttttgctcttgttgcccaggctggagtacaatggtgcgatctcagctcagtgcaacctccgccacccgggttcaggcaattctcttgcatcagcctcgcgagtagttggaattataggcatgtgccaccacacccagctg

SEQ ID NO: 343564 - DNA, 1536 bp, Artificial Sequence
  derived and/or modified sequence
atgctggttgatggcccatctgagagacccgcgctctgctttctacttcttgcagttgcaatgtccttctttggctctgcactatctatcgacgaaacaagggctcacctgcttttaaaggaaaaaatgatgagactcgggggacggctcgtcctgaacaccaaggaagaactggcaaacgagagattgatgacactgaaaatcgctgaaatgaaggaagccatgcgtacactgatttttcctcccagtatgcattttttccaggccaagcatctgattgaacgctcacaagtgttcaacattctcagaatgatgcctaaaggagccgcacttcacttgcacgacattggaattgtaaccatggactggcttgtacgcaatgtaacctatcggcctcactgtcatatctgcttcacaccacggggcatcatgcagtttagattcgcacacccgaccccgcggccctcagaaaagtgctcaaagtggattctgctggaagattaccgtaaaagagttcagaatgtaaccgagtttgacgacagcctcctgcgcaattttacgcttgtgactcagcaccccgaggtgatatatacaaaccaaaacgtggtatggtcaaaatttgagacaattttcttcacaatctccggattaattcattatgccccagtttttcgggattacgtctttagatccatgcaggagttttatgaggataacgttctgtatatggaaattcgagcccgacttttacctgtttatgaactgagtggggagcaccacgatgaagaatggagcgtgaaaacctaccaagaggtcgcccagaagtttgtcgaaactcatccagagttcataggaatcaaaattatttactccgatcacagaagtaaggacgtggcagtcattgccgaaagcatcagaatggccatgggacttcgtattaaattccccacagtggtagcgggcttcgatctagtgggacacgaagacacaggacacagcttacacgactacaaggaagctttaatgattcccgcgaaagatggagttaaactaccttatttcttccatgccggcgagacagactggcagggtacttctatagataggaatatcctggacgctctcatgctaaatactacaagaattggtcatgggttcgcactttccaagcatccagcagtgcgcacctactcctggaaaaaggacattccaatcgaagtctgccctatttcaaaccaggtactaaagctcgtcagtgacttgagaaaccatccagtcgctacccttatggccactggccacccaatggtgatatctagcgacgatccagctatgttcggcgccaaagggttgtcatacgatttctatgaagtcttcatgggcatcggaggaatgaaggccgatctacgcaccttaaagcagctggcaatgaattcaattaaatattccactctacttgagtctgaaaagaatacatttatggagatctggaaaaagagatgggacaaattcattgcagacgttgctactaaatag

SEQ ID NO: 343565 - DNA, 1536 bp, Artificial Sequence
  derived and/or modified sequence
atgttggttgacggcccatctgaaagacccgcgttatgcttcctgctgctggcagttgcaatgagcttcttcggctcagccctgagcattgatgaaacgagagcacacctcctgttaaaggaaaaaatgatgcggttgggcggccgtttggtgctgaataccaaagaggagctggccaacgagcgcctgatgacactcaagattgctgaaatgaaggaagccatgcgcacacttatattcccaccatctatgcactttttccaagccaaacatctgatcgaacgatctcaagtattcaatatactccggatgatgcccaaaggagcagcactccaccttcatgacatcggaattgttacaatggactggcttgtgcgtaatgttacatatagacctcactgtcacatttgctttactccacgtggtattatgcagtttcgtttcgcccaccctacccctcggccctccgaaaaatgtagtaaatggattctgctagaagattaccgaaaaagagtgcaaaacgtaactgagtttgatgatagtttacttaggaacttcacactcgtgacacaacaccccgaggtgatctacaccaatcagaatgtagtttggtccaagtttgaaacgatcttcttcactatcagcgggctaattcactatgcccccgtgttcagagactacgtcttcagatcaatgcaggaattttatgaggacaatgtgctttatatggagattagagcaagattactgccagtttatgagttatccggagagcaccatgatgaggaatggtcagtcaagacctatcaggaggttgcccagaagttcgtcgaaacccatccagagtttattggcattaaaataatttattcggaccacagatccaaggatgttgctgtcatagcagaaagtatacgcatggctatgggcctaagaattaaatttcccaccgttgtagccggctttgatctggttggtcatgaagacacaggacattcccttcacgattataaggaggctcttatgatccctgcgaaagacggtgtaaaactcccgtatttctttcacgcaggagagacagactggcagggcacatcaatagacaggaacatcttggatgccttgatgctcaatactactcggatagggcatgggttcgccctatcaaagcaccccgctgtcagaacttactcatggaaaaaagacatccctattgaagtttgccccatcagcaaccaggtattaaaactagtgtccgatcttaggaaccatccagtcgctactttaatggccacagggcaccccatggtgatatcctcagatgaccctgccatgtttggagccaagggactatcttacgatttctacgaggtattcatggggattggaggtatgaaggccgacttgagaaccttaaagcagctggccatgaactcaattaaatatagcaccttgttggaatccgaaaagaacactttcatggagatttggaagaaacgatgggacaaatttatcgccgacgtagcaactaagtag

SEQ ID NO: 343566 - DNA, 1410 bp, Artificial Sequence
  derived and/or modified sequence
atgatgagactcgggggtaggttggttctgaatactaaagaagagctcgccaacgaaaggctgatgaccctcaagatagcagagatgaaagaagcaatgcgtacactgattttcccaccatccatgcacttcttccaagcaaaacatttgatcgaacgttctcaggtattcaacatattgcgaatgatgcctaaaggtgccgccctccacctgcatgatatcggaattgtgactatggactggctagtcagaaacgtgacatataggccccattgtcatatctgctttaccccacgcggcattatgcaatttagattcgcccatccaacacctaggccaagcgaaaagtgcagcaaatggatcctccttgaagactatagaaagagagtgcaaaacgtgaccgaatttgatgactccctgctcagaaactttactctggtgacacagcacccagaggtcatctatacgaaccagaacgtcgtctggtccaagtttgagaccatttttttcaccattagcggcctcattcactacgcacccgtatttagagactacgtgttcaggtctatgcaggaattctacgaagacaatgttctatatatggagattcgggctaggctgcttcccgtttacgagctatcaggggaacatcacgatgaggaatggtctgtgaaaacctatcaagaggtcgcccagaagttcgtcgagacccacccagaatttatcggtattaagattatctactctgatcacagaagtaaagacgtggcagtgatcgctgagtccattaggatggctatgggattacggataaagtttccgaccgttgtcgctggatttgacctagttggacacgaagacacaggccactccctccatgattataaagaggcactgatgattccagctaaggatggtgtgaaactcccttatttcttccacgccggagaaaccgactggcaaggaacatcaatcgacaggaacatactagatgcccttatgctgaacactacccgcataggacacgggttcgccctcagcaaacaccctgcagtccgcacttactcttggaagaaggacatacccatcgaagtttgtccaatcagcaatcaagtgctcaaactggtcagcgatctaagaaaccatcccgtcgccaccctaatggcaactggacatccgatggttatttcctcagacgatcctgcgatgttcggcgcaaagggtctcagctacgatttttacgaagtgtttatgggcattggaggcatgaaggctgatctgaggactctgaaacaactcgcaatgaacagcatcaaatatagcaccttgttggagagtgaaaaaaacacatttatggaaatttggaaaaagagatgggataagtttattgccgatgtggccaccaagtag

SEQ ID NO: 343567 - DNA, 186 bp, Artificial Sequence
  derived and/or modified sequence
ccctactggtccttctgccttagccacaggttctgaaaccaaagcaaaaccaccagagagtgattcattcccgtggagtctccatctgagccctttcctagtccaggcatcccgatgttggtggatggcccatctgagcggccagccctgtgcttcttgctgttggctgtggcaatgtctttcttc

SEQ ID NO: 343568 - DNA, 459 bp, Artificial Sequence
  derived and/or modified sequence
atgcttgttgatggtccaagtgaaagaccagctctgtgctttttactcctggctgttgctatgagcttttttggtagtgcactgtccatagatgagactcgggcccacctgctccttaaggaaaagatgatgcggttaggcggtcgacttgtgctcaacacaaaagaggaattggcaaatgagcgccttatgacactcaagattgcagaaatgaaagaagctatgagaacactgattttccccccctccatgcacttctttcaggcaaaacatttgattgagcgaagtcaggtatttaacatcctgagaatgatgccaaaaggtgccgcactgcatctccacgatattgggatcgtcaccatggattggttagtaagaaacgtcacctaccgcccgcattgtcatatctgctttacacctaggggaattatgcagtttcgcttcgctcacccaacttag

SEQ ID NO: 343569 - DNA, 549 bp, Artificial Sequence
  derived and/or modified sequence
agttggtgagcttttccggtgctctgcacagatgctggggcgctgagcaaacagccctcagtttctggagctgttccgagtccaggcatcccgatgttggtggatggcccatctgagcggccagccctgtgcttcttgctgttggctgtggcaatgtctttcttcggctcagctctatccatagatgaaacacgggcgcatctgttgttgaaagaaaagatgatgcggctgggggggcggctggtgctgaacaccaaggaggagctggccaatgagaggctcatgacgctcaaaatcgctgagatgaaggaggccatgaggaccctgatattcccacccagcatgcactttttccaggccaagcatctcattgagagaagtcaagtgtttaatattctaaggatgatgccaaaaggggctgccttgcacctccatgacattggcatcgtgactatggactggctggtgaggaatgtcacctacaggcctcactgccacatctgtttcaccccaagggggatcatgcagttcagatttgctcacccaact

SEQ ID NO: 343570 - DNA, 3925 bp, Artificial Sequence
  derived and/or modified sequence
ttgggaaacccctacctgtctgtacctgtaggtcttttctctggggtctggaagaagaatccttcaatatcttgccttctggtaatctgagagcagggcgagaaaaggaagatcagagttccacccttaaatctgtaggttttcactcccccactctcctttgcagtcccgtggagtctccatctgagccctttcctagtccaggcatcccgatgttggtggatggcccatctgagcggccagccctgtgcttcttgctgttggctgtggcaatgtctttcttcggctcagctctatccatagatgaaacacgggcgcatctgttgttgaaagaaaagatgatgcggctgggggggcggctggtgctgaacaccaaggaggagctggccaatgagaggctcatgacgctcaaaatcgctgagatgaaggaggccatgaggaccctgatattcccacccagcatgcactttttccaggccaagcatctcattgagagaagtcaagtgtttaatattctaaggatgatgccaaaaggggctgccttgcacctccatgacattggcatcgtgactatggactggctggtgaggaatgtcacctacaggcctcactgccacatctgtttcaccccaagggggatcatgcagttcagatttgctcacccaactccccgtccatcagaaaaatgttccaagtggattctgctggaggattatcggaagcgggtgcagaacgtcactgagtttgatgacagcttgctgaggaatttcactctggtgacccagcacccggaggtgatttacacaaaccaaaatgttgtctggtcgaaatttgaaaccatcttcttcaccatctctggtctcatccattacgcaccagtgttcagagactatgtcttccggagcatgcaggagttctacgaggacaacgtgctctacatggagatcagagccaggctgctgccggtgtatgagctcagtggagagcaccatgacgaagagtggtcagtgaagacttaccaggaagtagctcagaagtttgtggaaactcaccctgagtttattggaatcaaaatcatttattcggatcacagatccaaagatgtggctgtcatcgcagaatccatccgaatggccatggggctccgaatcaagttccccacggtggtggcagggtttgacctggtggggcatgaggacactggccactccttgcatgactacaaggaagctctgatgatccccgccaaggatggcgttaagctgccttacttcttccacgccggagaaacagactggcagggtacttccatagacaggaacattctggatgctctgatgctgaacactaccagaatcggccatggatttgctttgagcaaacaccccgcagtcaggacttactcctggaaaaaggacatccccatagaagtctgtcccatctctaaccaggtgctgaaactggtgtctgacttgaggaaccaccctgtagccactctgatggccactgggcaccccatggtgatcagctctgatgacccagctatgtttggtgccaaaggcttgtcctatgatttctatgaggtcttcatgggcattggggggatgaaggctgacctgaggaccctcaaacagctggccatgaactctatcaagtacagtaccctgttggagagtgagaaaaatactttcatggaaatctggaagaagagatgggataagttcatagcagatgtggctacaaagtgaggagaagctagccagccctctacaagctgtcttcttgcacacgctgtcacttcctctcactcgttcttgaatcagctccatgtgcccatgaaatcaatggcctctgtatggagcgaccctgtgagaagcacttggctggctgagcaaattcatcctctggaaatattctctctcagccacagtgacattgaccctcttggttttctcctgtctctggccatttcttccagtttccctatttcagagtcttctcctctctctgatctctgtgctgtttcctcaggactcagtcctgggctctcttctattctggtctctttatttttttatttttgtattttttcgagatggagttttgctcttgttgcccaggctggagtacaatggtgcgatctcagctcagtgcaacctccgccacccgggttcaggcaattctcttgcatcagcctcgcgagtagttggaattataggcatgtgccaccacacccagctgatttttgcatttttagtagagacaggttttcaccatgttggcgaggctggtatccaactcttgacctcaggtgatccactcgccccttggctcccaaagtgctggaattacaggcattagccaccatgcctggcctattctggtctctttaactctctcctctttatttctcttctctctctgtacacttttcctgggtggtctcatccattcctttgctttttcataccatttatttgttaatgattcccacatttatttatgcacttggagagctcacaggaatctcagaaactgatgaggtacaattctgaaccctcagtctcttccctttaaacctttctttttctctactttaatttttctaaagagtgtcttgctatgttgcccaggctggtctccaactcaagtgatcctcctgccgcagtctcccgaagtgctgggattactgacatgagccaccacactcagccctttaaacctttccctggcctttcccatagctggtgaaggacacctccatccattccacgcagttgctcaaagcagaaattttcagtgcaagtcttgatgctgcgccgtcccccactccctacatcagaacgcatccctcatctggactccagcggtggcttcttgatgctgcgcggtcccccactccctacatcagaatgcatcccgcatccagactccagcggtggtgctctacctgcacgctgttgccaagtccaagctaccatactcctgcctgagctatgacaacagcctcctcactgatctcccctttcttccctttgcctcctccagctcatttttcacagtgtagaatgacattttgtttgtttgttttgttttgtttgagatggagtctcgctctgttgcccagggtggagtgcagcggtgcgatctcggctcactgcaacctccacctcccgggttcaagcggattctcgtgcctcagcctcctgagtagctgggattacaggcatgcaccaccatgcccggataatttttgtatttttagtagagatggggtttcactatgttggccaggctggtctcgaacacctgacctcgtggtccacccgcctcggcctcccaaagcactgggattacaggcgtgagccacccggcctggcctagaatgacttttaaaagatcaaattaaatcaggtcactcctttgcttacaacgcagtgcgtttagaggtacaccccatgtctccacagggcatacagcatccgatttaatctggatccattccggcgccttcctctcccagtcacccagagggccccaaccccggcggccctttcttcctcaaatgtcctcggctctataccgtgcctgggtcttttctctttctctctgcctggaagattccttctttccccttttgtcttgcccactcctgtttacccttcaagtttcaagttcatgtcactgtctcagagaggttttcctgtgctcgccctgtttctctcaggaagccttgctcttttccatcatgcctctaatcacagcttataatcggatatttatttctgtgtctacagtcttgccctgccagactgtatgccccatgtgggcaggcgctcatgattgtttctgattgtttcacgcatgctgctaacccagagcctgggcccaaagctagttagtactcaataaacaatgcattgaa

SEQ ID NO: 343571 - DNA, 1536 bp, Artificial Sequence
  derived and/or modified sequence
atgctggtggacggccccagcgagagacccgccctgtgcttcctgctgctggccgtggccatgagcttcttcggcagcgccctgagcatcgacgagaccagagcccacctgctgctgaaggagaagatgatgagactgggcggcagactggtgctgaacaccaaggaggagctggccaacgagagactgatgaccctgaagatcgccgagatgaaggaggccatgagaaccctgatcttcccccccagcatgcacttcttccaggccaagcacctgatcgagagaagccaggtgttcaacatcctgagaatgatgcccaagggcgccgccctgcacctgcacgacatcggcatcgtgaccatggactggctggtgagaaacgtgacctacagaccccactgccacatctgcttcacccccagaggcatcatgcagttcagattcgcccaccccacccccagacccagcgagaagtgcagcaagtggatcctgctggaggactacagaaagagagtgcagaacgtgaccgagttcgacgacagcctgctgagaaacttcaccctggtgacccagcaccccgaggtgatctacaccaaccagaacgtggtgtggagcaagttcgagaccatcttcttcaccatcagcggcctgatccactacgcccccgtgttcagagactacgtgttcagaagcatgcaggagttctacgaggacaacgtgctgtacatggagatcagagccagactgctgcccgtgtacgagctgagcggcgagcaccacgacgaggagtggagcgtgaagacctaccaggaggtggcccagaagttcgtggagacccaccccgagttcatcggcatcaagatcatctacagcgaccacagaagcaaggacgtggccgtgatcgccgagagcatcagaatggccatgggcctgagaatcaagttccccaccgtggtggccggcttcgacctggtgggccacgaggacaccggccacagcctgcacgactacaaggaggccctgatgatccccgccaaggacggcgtgaagctgccctacttcttccacgccggcgagaccgactggcagggcaccagcatcgacagaaacatcctggacgccctgatgctgaacaccaccagaatcggccacggcttcgccctgagcaagcaccccgccgtgagaacctacagctggaagaaggacatccccatcgaggtgtgccccatcagcaaccaggtgctgaagctggtgagcgacctgagaaaccaccccgtggccaccctgatggccaccggccaccccatggtgatcagcagcgacgaccccgccatgttcggcgccaagggcctgagctacgacttctacgaggtgttcatgggcatcggcggcatgaaggccgacctgagaaccctgaagcagctggccatgaacagcatcaagtacagcaccctgctggagagcgagaagaacaccttcatggagatctggaagaagagatgggacaagttcatcgccgacgtggccaccaagtag

SEQ ID NO: 343572 - DNA, 75 bp, Artificial Sequence
  derived and/or modified sequence
atgctggtggacggccccagcgagagacccgccctgtgcttcctgctgctggccgtggccatgagcttcttctag

SEQ ID NO: 343573 - DNA, 1410 bp, Artificial Sequence
  derived and/or modified sequence
atgatgagactgggcggcagactggtgctgaacaccaaggaggagctggccaacgagagactgatgaccctgaagatcgccgagatgaaggaggccatgagaaccctgatcttcccccccagcatgcacttcttccaggccaagcacctgatcgagagaagccaggtgttcaacatcctgagaatgatgcccaagggcgccgccctgcacctgcacgacatcggcatcgtgaccatggactggctggtgagaaacgtgacctacagaccccactgccacatctgcttcacccccagaggcatcatgcagttcagattcgcccaccccacccccagacccagcgagaagtgcagcaagtggatcctgctggaggactacagaaagagagtgcagaacgtgaccgagttcgacgacagcctgctgagaaacttcaccctggtgacccagcaccccgaggtgatctacaccaaccagaacgtggtgtggagcaagttcgagaccatcttcttcaccatcagcggcctgatccactacgcccccgtgttcagagactacgtgttcagaagcatgcaggagttctacgaggacaacgtgctgtacatggagatcagagccagactgctgcccgtgtacgagctgagcggcgagcaccacgacgaggagtggagcgtgaagacctaccaggaggtggcccagaagttcgtggagacccaccccgagttcatcggcatcaagatcatctacagcgaccacagaagcaaggacgtggccgtgatcgccgagagcatcagaatggccatgggcctgagaatcaagttccccaccgtggtggccggcttcgacctggtgggccacgaggacaccggccacagcctgcacgactacaaggaggccctgatgatccccgccaaggacggcgtgaagctgccctacttcttccacgccggcgagaccgactggcagggcaccagcatcgacagaaacatcctggacgccctgatgctgaacaccaccagaatcggccacggcttcgccctgagcaagcaccccgccgtgagaacctacagctggaagaaggacatccccatcgaggtgtgccccatcagcaaccaggtgctgaagctggtgagcgacctgagaaaccaccccgtggccaccctgatggccaccggccaccccatggtgatcagcagcgacgaccccgccatgttcggcgccaagggcctgagctacgacttctacgaggtgttcatgggcatcggcggcatgaaggccgacctgagaaccctgaagcagctggccatgaacagcatcaagtacagcaccctgctggagagcgagaagaacaccttcatggagatctggaagaagagatgggacaagttcatcgccgacgtggccaccaagtag

SEQ ID NO: 343574 - DNA, 459 bp, Artificial Sequence
  derived and/or modified sequence
atgctggtggacggccccagcgagagacccgccctgtgcttcctgctgctggccgtggccatgagcttcttcggcagcgccctgagcatcgacgagaccagagcccacctgctgctgaaggagaagatgatgagactgggcggcagactggtgctgaacaccaaggaggagctggccaacgagagactgatgaccctgaagatcgccgagatgaaggaggccatgagaaccctgatcttcccccccagcatgcacttcttccaggccaagcacctgatcgagagaagccaggtgttcaacatcctgagaatgatgcccaagggcgccgccctgcacctgcacgacatcggcatcgtgaccatggactggctggtgagaaacgtgacctacagaccccactgccacatctgcttcacccccagaggcatcatgcagttcagattcgcccaccccacctag

SEQ ID NO: 343575 - DNA, 1536 bp, Artificial Sequence
  derived and/or modified sequence
atgctggtcgatggtccgtctgagagaccagccctgtgctttctactgctcgccgtcgccatgagcttcttcggcagtgccctatctatagacgaaacccgagctcatcttcttttgaaggagaagatgatgagattaggagggcgtctggtgcttaacacaaaggaggaattagctaatgagcgcctgatgaccctcaagatcgccgagatgaaagaggcgatgagaaccctgatcttccccccctctatgcacttttttcaggcaaagcacctgatcgagcgatctcaagtttttaatatcctaagaatgatgccgaaaggagcagccttgcatctgcatgacatcggcatcgtgaccatggattggctggtcagaaatgtgacttatcggccacactgccacatttgttttacgccccgagggattatgcagtttagattcgcccaccctactccccgcccatcagagaagtgtagcaaatggattctccttgaagactaccgaaagcgagttcagaatgtaaccgaattcgatgactcgttactgcgcaattttactcttgttactcagcatcccgaagtcatctacaccaatcaaaacgttgtgtggtctaagttcgaaaccatcttctttacgatttctggcctcatccactacgcccctgtcttcagggactatgtgttcaggagcatgcaggaattttatgaggacaacgtactttacatggagatccgggccagattactgcctgtatatgagctgtccggtgagcaccacgacgaggagtggagcgttaaaacataccaggaggtagcccagaagttcgttgaaacacacccagagtttattggcatcaaaatcatctattcggatcacagaagcaaggatgtagctgtgatcgccgagtctattagaatggctatgggcttgcgcataaaatttcccacagtggtggccgggttcgacctggtgggacatgaagacaccgggcatagccttcatgattacaaggaagccctcatgatacccgccaaggacggcgtcaagctgccctatttcttccacgcaggcgaaaccgattggcaaggcacctctattgaccgaaatattctggatgccctcatgctcaatacaactcggatcggacacggattcgcgctgtctaagcaccccgctgtgagaacatatagttggaagaaggacatcccaatcgaggtgtgtcctatcagcaaccaggtgctcaaactggtttctgacctgagaaatcatcccgtggcgaccctcatggccacaggccaccccatggtcatttctagcgatgaccctgccatgtttggagccaagggcctgtcctacgacttctatgaggtgttcatgggcattggaggaatgaaggccgacctacgaacacttaaacagttagctatgaacagtattaagtactctacactgctggaaagcgagaaaaacacatttatggagatctggaaaaagcgttgggacaaatttattgccgacgtggccacaaaatag

SEQ ID NO: 343576 - DNA, 75 bp, Artificial Sequence
  derived and/or modified sequence
atgcttgtggacggcccctccgagagacccgcactgtgctttctcctactcgccgttgccatgtcctttttttag

SEQ ID NO: 343577 - DNA, 1536 bp, Artificial Sequence
  derived and/or modified sequence
atgttagttgacgggcctagcgaaaggccggccttgtgttttctgctcctcgcagtggccatgagtttctttggtagcgccttatccatagatgagacccgagcccacctcctgctcaaggagaagatgatgcggctgggcggcaggttagtactaaacacaaaggaagagttggcaaatgagaggctaatgaccctgaaaattgcagaaatgaaggaagccatgaggaccttgattttcccacccagcatgcacttttttcaagccaagcacctgatcgagaggtcacaggtgtttaatatcctaaggatgatgccaaaaggtgcagcattgcatctgcacgatatcggcatcgttacaatggattggctggtccgaaacgtgacgtatcgcccacattgtcatatctgcttcacccctagaggtataatgcaattcaggttcgctcatcctaccccccgcccctcagaaaagtgttctaagtggatacttctggaagactatcgcaagagggtccagaacgttaccgaatttgacgattcactgctgagaaatttcacacttgtgacacagcacccagaagttatctacaccaatcagaacgtagtctggtcgaaatttgagaccatattttttactatctccggcctcatccattacgccccggtgttccgggactacgtgttcagatcgatgcaggagttctatgaggacaatgtgttgtatatggaaatcagggcccggctccttccagtgtacgaactcagcggagagcaccatgatgaggagtggagtgtaaagacctatcaggaggtggctcagaagtttgttgagactcatccagagtttattggcattaagataatctattctgatcataggagtaaagacgtggccgtaatcgccgagtcaattcgtatggccatgggcttgcggattaagtttccaaccgtcgtggctggtttcgacttagtaggccatgaggacactgggcactccctgcatgattataaggaggctctgatgatccctgcaaaggacggcgtgaaactcccctatttttttcatgccggcgagaccgattggcagggtactagcattgatagaaacattttagatgccctgatgttgaatacaacacgaattgggcatgggtttgctctgagcaagcacccagcagtccgtacttactcctggaagaaagacatacccatcgaggtctgcccaatctccaaccaagttctgaaactggtttctgatctcagaaatcaccccgttgcaaccctgatggccacaggccatccgatggttatcagtagcgacgaccccgccatgtttggagcgaagggtctctcttacgacttctacgaggtttttatgggtattggcggcatgaaggccgatctccgcacccttaaacaattggcgatgaattcaataaagtacagcacactgctggaatccgagaaaaacacattcatggaaatttggaagaaacgctgggacaaattcatcgccgacgtcgccaccaagtag

SEQ ID NO: 343578 - DNA, 1536 bp, Artificial Sequence
  derived and/or modified sequence
atgctggttgacgggccttctgagagacccgccctgtgcttccttctgctggccgtggcaatgtccttttttgggagcgcactgtcaattgatgagacccgggcacatctcctgctgaaagagaaaatgatgcgtctcgggggtaggttggtactcaacacaaaggaagaactagcaaacgagcggctgatgaccctgaagatcgctgaaatgaaagaggctatgcggactctaatcttccctccctccatgcatttctttcaggctaaacatcttatcgaacggtcccaggtgtttaatattctgcgcatgatgcctaaaggcgccgcactgcacctacacgacataggcatcgttactatggactggctggtgagaaacgtcacctataggcctcattgccatatctgcttcactcccaggggcataatgcaattccgatttgcccaccccacaccaaggcccagtgaaaagtgttccaaatggattctgctggaagactaccgtaaaagagtccagaacgtgactgaattcgacgactctttattacgcaactttaccttggtgactcaacatcccgaggtgatttatacaaatcagaatgtagtgtggtccaagttcgagacaatcttcttcactatctctggcctgattcactacgcgcccgtgtttagggactatgtcttccgctcgatgcaggaattttacgaggacaatgtcctgtacatggagattcgtgctcggctcctcccggtgtatgagctaagcggcgaacatcacgatgaagaatggagcgtgaaaacctaccaagaagtcgcccaaaaattcgtcgagactcatccggagtttattggtattaagattatctactcagaccaccggtccaaggatgtagcagtgatagctgaatcaatccgtatggccatgggtttgcgtatcaagtttcctacagtcgtcgccggcttcgacttggttggacatgaagacacaggacattctctgcacgactataaggaggccctgatgattcctgccaaagatggtgtgaagctcccctacttcttccacgctggcgaaaccgactggcagggcacgtcgattgatagaaatatcctcgacgccctgatgctcaacacaactcggatcggtcatggatttgccctgtccaagcacccagccgtgcggacctattcatggaagaaggacatcccaatcgaggtttgtcctataagtaaccaagtcctgaagttggtgagtgacttaaggaaccacccagtcgcaacattgatggcgacaggtcaccctatggttatctcaagcgatgacccagctatgttcggcgctaaaggcttatcctacgatttttacgaagtgttcatgggaataggcggaatgaaggcagaccttcgtactctaaagcagctcgccatgaactcaatcaagtacagtacgctcctggagtcagagaaaaatacatttatggaaatttggaagaagagatgggacaaattcatcgcggatgttgccacgaagtag

SEQ ID NO: 343579 - DNA, 1410 bp, Artificial Sequence
  derived and/or modified sequence
atgatgagactcggagggcgactagttctgaacacaaaagaggaacttgccaacgaaagactgatgaccctgaagatcgctgagatgaaagaggccatgaggactctgatctttccgccttccatgcacttctttcaggccaaacatttgattgagagatcccaggtctttaatattttaagaatgatgccaaaaggtgccgcactccacctgcatgacattggcattgtgaccatggactggctagtgagaaatgttacttaccggccacactgccacatctgcttcaccccgcgcggtattatgcagttcaggtttgcccacccgacaccccggcccagtgagaagtgctcaaagtggattctcctggaagattaccggaaacgagttcagaacgtgaccgaatttgatgattcactgcttaggaattttacgctcgttactcaacatccagaagtgatttatactaaccagaatgtggtatggagcaagttcgagactatcttcttcactatatcgggtctgattcattatgcccctgtgttccgggactacgtcttccggagcatgcaggaattttatgaagacaacgtattgtacatggagattcgggctcgccttctgccagtgtatgagctgtcaggagagcatcatgacgaggagtggtccgtgaaaacctatcaagaagtcgctcagaaatttgtcgaaacgcaccccgagttcataggcatcaagataatctactccgaccaccgttccaaagacgtggctgtgatcgccgagtcaattaggatggcaatgggtctcagaataaaattcccaacggtggtcgcgggtttcgatctggtgggacacgaagacaccggccacagtctacacgactacaaagaggcgctcatgatccccgcaaaagacggggtgaagctgccttacttctttcatgcgggagaaacagattggcaggggacctctatcgatcggaatatactggacgcactaatgctgaacacgactcgcattggccacggatttgccctaagtaaacaccccgccgtacgaacttactcctggaaaaaggatattcccatcgaagtatgcccaatttccaatcaggtgctcaagttggtatcagatctgcgcaatcaccccgttgctacactgatggcaacgggccaccccatggtgatttcctcagacgatcctgccatgtttggcgcaaaggggctctcatatgatttttacgaggtgttcatggggataggcggtatgaaggccgacctgagaacgcttaaacagctggccatgaactcgatcaaatacagcactctgttggaaagtgagaaaaacacttttatggagatatggaagaaacggtgggacaaatttattgccgacgttgccacaaagtag

SEQ ID NO: 343580 - DNA, 75 bp, Artificial Sequence
  derived and/or modified sequence
atgcttgttgatggcccgagcgaacgtccagcattgtgtttcctactcttggccgtagccatgtcattcttctag

SEQ ID NO: 343581 - DNA, 459 bp, Artificial Sequence
  derived and/or modified sequence
atgctcgtggatggtccttccgaaaggcctgcactatgttttctgttgctcgccgtggcaatgtccttctttgggtccgcactgagtattgacgagaccagagcgcacctgttactgaaggagaaaatgatgcgcctcggcggccgcctggtcctgaacacaaaggaggagctggcaaacgaacggcttatgaccctgaagatcgcggagatgaaggaagctatgagaaccttgatctttcctccaagcatgcatttcttccaagcgaagcacctgatcgagaggagccaggtcttcaacatactgaggatgatgccaaaaggcgccgctttgcacttacatgacatcgggatcgtgacaatggactggcttgtccgcaacgttacttataggccccactgccacatttgctttacacctcggggcatcatgcaattccgctttgcccatccaacatag

SEQ ID NO: 343582 - DNA, 1536 bp, Artificial Sequence
  derived and/or modified sequence
atgctggtggatggccccagcgagaggcctgccctgtgcttcctgctgctggccgtggccatgtccttcttcggcagcgccctgagcattgatgagacccgggcccacctgctgctgaaggagaagatgatgaggctgggcggccgcctggtgctgaacaccaaggaggagctggccaatgaaaggctgatgaccctgaagattgctgagatgaaggaggccatgaggaccctcatcttccccccatccatgcacttcttccaggccaagcacctgattgaaagaagccaggtgttcaacatcctgaggatgatgcccaagggagctgccctgcacctgcatgacatcggcatcgtgaccatggactggctggtgagaaatgtgacctaccggccccactgccacatctgcttcaccccccggggcatcatgcagttccgctttgcccaccccaccccccggcccagcgagaagtgcagcaagtggatcctgctggaggactacaggaagagggtgcagaatgtgacagaatttgatgacagcctgctgaggaacttcaccctggtgacccagcaccctgaggtgatctacaccaaccagaatgtggtgtggagcaagtttgagaccatcttcttcaccatcagcggcctcatccactacgcccctgtgttccgggactatgtgttccgctccatgcaggagttctatgaagataatgtgctgtacatggagatccgggcccggctgctgcctgtgtatgagctgagcggggagcaccatgatgaggagtggagcgtgaagacctaccaggaggtggcccagaagtttgtggagacccaccctgagttcatcggcatcaagatcatctacagcgaccacaggagcaaggatgtggccgtgattgctgagagcatccgcatggccatgggcctgcgcatcaagttccccaccgtggtggccggctttgacctggtgggccacgaggacaccggccacagcctgcatgactacaaggaggccctgatgatcccagccaaggatggagtgaagctgccctacttcttccacgccggggagacagactggcagggcaccagcattgacaggaacatcctggatgccctgatgctgaacaccacccgcatcggccacggctttgccctgagcaagcaccctgctgtgaggacctacagctggaagaaggacatccccatcgaggtgtgccccatcagcaaccaggtgctgaagctggtgtctgacctgaggaaccaccctgtggccaccctgatggccaccggccaccccatggtgatcagcagtgatgatcctgccatgtttggagccaagggcctgtcctatgacttctatgaggtgttcatgggcatcggcggcatgaaggctgacctgcggaccctgaagcagctggccatgaacagcatcaagtacagcaccctgctggagagcgagaagaacaccttcatggagatctggaagaagcgctgggacaagttcatcgcagatgtggccaccaagtag

SEQ ID NO: 343583 - DNA, 75 bp, Artificial Sequence
  derived and/or modified sequence
atgctggtggatggccccagcgagaggcctgccctgtgcttcctgctgctggccgtggccatgtccttcttctag

SEQ ID NO: 343584 - DNA, 1410 bp, Artificial Sequence
  derived and/or modified sequence
atgatgaggctgggcggccgcctggtgctgaacaccaaggaggagctggccaatgaaaggctgatgaccctgaagattgctgagatgaaggaggccatgaggaccctcatcttccccccatccatgcacttcttccaggccaagcacctgattgaaagaagccaggtgttcaacatcctgaggatgatgcccaagggagctgccctgcacctgcatgacatcggcatcgtgaccatggactggctggtgagaaatgtgacctaccggccccactgccacatctgcttcaccccccggggcatcatgcagttccgctttgcccaccccaccccccggcccagcgagaagtgcagcaagtggatcctgctggaggactacaggaagagggtgcagaatgtgacagaatttgatgacagcctgctgaggaacttcaccctggtgacccagcaccctgaggtgatctacaccaaccagaatgtggtgtggagcaagtttgagaccatcttcttcaccatcagcggcctcatccactacgcccctgtgttccgggactatgtgttccgctccatgcaggagttctatgaagataatgtgctgtacatggagatccgggcccggctgctgcctgtgtatgagctgagcggggagcaccatgatgaggagtggagcgtgaagacctaccaggaggtggcccagaagtttgtggagacccaccctgagttcatcggcatcaagatcatctacagcgaccacaggagcaaggatgtggccgtgattgctgagagcatccgcatggccatgggcctgcgcatcaagttccccaccgtggtggccggctttgacctggtgggccacgaggacaccggccacagcctgcatgactacaaggaggccctgatgatcccagccaaggatggagtgaagctgccctacttcttccacgccggggagacagactggcagggcaccagcattgacaggaacatcctggatgccctgatgctgaacaccacccgcatcggccacggctttgccctgagcaagcaccctgctgtgaggacctacagctggaagaaggacatccccatcgaggtgtgccccatcagcaaccaggtgctgaagctggtgtctgacctgaggaaccaccctgtggccaccctgatggccaccggccaccccatggtgatcagcagtgatgatcctgccatgtttggagccaagggcctgtcctatgacttctatgaggtgttcatgggcatcggcggcatgaaggctgacctgcggaccctgaagcagctggccatgaacagcatcaagtacagcaccctgctggagagcgagaagaacaccttcatggagatctggaagaagcgctgggacaagttcatcgcagatgtggccaccaagtag

SEQ ID NO: 343585 - DNA, 459 bp, Artificial Sequence
  derived and/or modified sequence
atgctggtggatggccccagcgagaggcctgccctgtgcttcctgctgctggccgtggccatgtccttcttcggcagcgccctgagcattgatgagacccgggcccacctgctgctgaaggagaagatgatgaggctgggcggccgcctggtgctgaacaccaaggaggagctggccaatgaaaggctgatgaccctgaagattgctgagatgaaggaggccatgaggaccctcatcttccccccatccatgcacttcttccaggccaagcacctgattgaaagaagccaggtgttcaacatcctgaggatgatgcccaagggagctgccctgcacctgcatgacatcggcatcgtgaccatggactggctggtgagaaatgtgacctaccggccccactgccacatctgcttcaccccccggggcatcatgcagttccgctttgcccaccccacctag

SEQ ID NO: 343586 - DNA, 1536 bp, Artificial Sequence
  derived and/or modified sequence
atgctggtggacggccccagcgagcggcccgccctgtgcttcctgctgttggctgtggctatgagcttcttcggctctgctctatcaattgacgaaacgcgcgctcacctcttgctgaaagagaagatgatgcgcctcggcggacgcctcgttcttaataccaaagaggaactggccaacgaacgcctgatgaccttgaagatcgcagaaatgaaagaagccatgcgcacactcatattcccaccatcgatgcatttcttccaagccaaacatctgatcgagcgttcccaggtcttcaacatcctgagaatgatgccaaaaggagccgccctgcatttgcacgacatcgggatcgtcacaatggactggttggtgcggaatgttacctaccggccgcactgccacatttgtttcactccaagagggatcatgcagtttcgtttcgcccaccccaccccccgaccttcagaaaaatgcagcaaatggatcctgctagaagactaccggaagcgcgtgcagaacgtcaccgagtttgacgatagcttgctgagaaactttaccttagttactcagcaccccgaagtgatatataccaatcaaaatgtcgtgtggagtaagttcgagaccattttcttcactatctctggactcattcactacgctcccgtgtttcgcgattacgtgtttcgtagtatgcaggagttctacgaggacaacgttctgtatatggagatcagggctcgccttctgcccgtctatgaattaagcggggaacaccacgacgaggaatggtccgtgaagacatatcaggaggtcgcacagaaattcgtagagactcaccccgagttcattggaatcaaaatcatctacagtgaccatcgcagcaaagatgttgccgttatcgccgaatccattagaatggctatgggtttgcgcatcaagttcccaaccgttgtcgccggtttcgaccttgttggccatgaggacactgggcattctcttcacgactataaggaggccttaatgatcccagcaaaggacggagtgaagctgccttacttctttcatgccggggagacggactggcaggggacaagtattgaccgaaatatcctggatgccttaatgctgaatactacacgtattggccacggctttgctctgagcaaacacccagcagtcaggacctattcctggaagaaggacatacctattgaggtttgtcctatttcaaaccaagtactgaaacttgtgtctgacctgcggaatcatcccgtagcaaccctcatggccactgggcatcctatggttatcagctcagacgatcccgcaatgttcggcgcgaagggcttatcatatgacttctacgaagtgtttatggggattggcggcatgaaggctgacttgcgcactctcaagcaactggcgatgaactccattaagtatagcactcttctggaaagtgaaaaaaacacttttatggagatctggaagaagaggtgggacaagtttatagccgacgtggcaacaaaatag

SEQ ID NO: 343587 - DNA, 75 bp, Artificial Sequence
  derived and/or modified sequence
atgctggtggacggccccagcgagcggcccgccctgtgcttcctgcttctggctgttgcaatgagctttttttag

SEQ ID NO: 343588 - DNA, 1536 bp, Artificial Sequence
  derived and/or modified sequence
atgctggtggacggccccagcgagcggcccgccctgtgcttcctgctactggcagtggctatgtcctttttcggcagtgccttgtctatcgatgaaaccagagcccacctgctcttgaaggagaaaatgatgagactcggcggacggctcgtgctcaacactaaagaggagctggctaacgagcggttaatgacactcaaaattgctgagatgaaagaggccatgcggaccttaattttccctccatctatgcattttttccaggcgaaacatctgatagagagatcccaggtgtttaacatccttcggatgatgccaaaaggggcggcactacaccttcacgacattggcattgttacaatggactggcttgtccgaaatgtaacatatagacctcactgccatatatgctttactcctagaggaattatgcagttcaggtttgctcaccctactcccaggcccagcgagaagtgtagcaaatggatcctgctggaagattatcgaaagagagtacagaacgtgactgagtttgatgactccctgctgaggaattttacactggtgacgcagcacccggaagtgatctacacaaaccaaaatgtcgtgtggagcaagttcgagactatattttttacaatatccggcctaattcactacgcgcccgtttttagggattatgtcttcagatccatgcaggagttttacgaggataatgttctgtatatggagattagggctaggctgttgcctgtctatgaactcagcggcgagcaccatgacgaggaatggtccgtcaaaacctaccaggaagtcgcccagaaattcgtggagacccatcctgagttcatcgggatcaagataatatacagcgatcatagaagcaaggatgttgccgtcatcgcggagtccattagaatggcaatgggtctgaggattaagtttcctacagttgtagcaggctttgatctcgtcggacacgaggatacaggtcacagcctccacgattataaggaggctctgatgatccccgcgaaagacggcgttaagctaccctatttttttcatgccggtgaaactgactggcagggaacctcgattgatcggaacatcctcgacgctctcatgctgaacacaactaggatcggtcacggcttcgccctgtcaaagcatccggcagtgcggacgtattcgtggaagaaggacatcccaatcgaggtttgcccgattagcaaccaggtcctgaaactggtatcagacctgcgtaaccatcctgttgccacactgatggctactggacacccgatggttatttccagcgacgatcccgctatgtttggggcaaaaggccttagttacgatttctatgaggtgttcatgggaattggggggatgaaagccgacctccgaacccttaagcaactcgccatgaactcaattaagtatagcactctgctcgagagcgaaaaaaatacatttatggagatctggaaaaagcggtgggataagttcattgccgacgtcgccactaaatag

SEQ ID NO: 343589 - DNA, 1536 bp, Artificial Sequence
  derived and/or modified sequence
atgctggtggacggccccagcgagcggcccgccctgtgcttcctgctgttggctgtggcaatgtcatttttcggttctgcactcagtatcgacgaaacacgggcccatttgttgctcaaagaaaagatgatgaggcttggcggtcgccttgtacttaacactaaggaggaactggcaaacgagagactgatgaccctgaaaatcgccgagatgaaggaggctatgcggactcttattttccctccatcgatgcattttttccaagccaagcacctgattgagcgctcgcaggtgttcaacattttacgcatgatgcccaagggcgctgctctacaccttcatgatatcggcattgtgacaatggactggctggtcaggaatgtgacctatcggccacattgtcacatatgtttcaccccaagggggatcatgcagtttcggtttgctcaccccacgcccagaccatcagagaagtgctcaaaatggatccttttagaagactacaggaaacgagtgcagaatgtgaccgaattcgacgactcactgctgcgcaactttaccttagtcacacagcaccccgaagtcatctacacaaaccagaatgttgtctggtccaaatttgaaaccatatttttcaccatcagcggcctaatccactacgctccagtctttagggattatgtgttccgctcaatgcaggagttttacgaggataacgtactgtatatggaaatccgggctagacttctgcctgtgtacgagcttagtggcgagcatcatgacgaagaatggtccgtaaaaacctaccaggaggtcgctcagaaattcgtagagactcaccctgagttcatcggtattaaaatcatttatagtgatcaccggagtaaagatgtcgcagtgattgccgagagcatccggatggctatggggctccgcatcaagttcccaaccgtcgtggctgggtttgacctggtggggcacgaagacaccggacattccttacacgactataaagaggccctgatgattccggccaaagacggggttaagctaccctacttctttcacgcaggcgaaaccgactggcaaggaacgtctatcgaccggaatattctggatgcattaatgctgaatactaccaggatcggtcatggtttcgcactttcgaaacaccccgccgtccggacctattcttggaagaaagacattcccatcgaggtctgtcccatctcaaaccaggtgttaaaactggtttcagatcttagaaaccaccccgtcgctaccctcatggctactgggcaccccatggtcatctcctcagacgatccagcaatgtttggggcaaaaggccttagttatgatttctacgaagttttcatgggcatcgggggtatgaaggccgatctgagaacgctgaaacagcttgctatgaattctattaaatattcaactctgcttgagagcgaaaaaaacacattcatggagatctggaaaaagaggtgggacaagttcatcgcagacgtggcgaccaagtag

SEQ ID NO: 343590 - DNA, 1410 bp, Artificial Sequence
  derived and/or modified sequence
atgatgcggctgggcggccggctggtgctgaacaccaaggaggagctggcaaacgaacgactcatgacccttaaaatcgcagaaatgaaagaggctatgagaacactgatattccctccatctatgcacttcttccaggcgaaacacttgatagagcggtctcaggtattcaatatcttgcggatgatgcccaaaggcgccgccctgcacctgcatgacatcggtatcgtgaccatggactggctggtcaggaatgtcacctaccggccccattgtcacatctgtttcaccccccgtggtatcatgcagtttcggtttgcgcaccctactccgcgcccttctgaaaagtgctcaaagtggattctcctagaggattatcgcaaacgcgtgcaaaatgtaacggagttcgatgacagcctgctgcgcaacttcactctagtgactcagcaccccgaggtcatctacacaaatcagaatgtagtctggtccaaattcgagaccatcttttttaccatctctgggctgatacattacgcacctgtgttcagagactacgtatttaggtcaatgcaggaattctacgaggataacgtgctgtacatggaaatcagagctaggctcttgcctgtctatgaactgtcaggcgagcaccatgatgaagagtggagcgtgaagacttaccaggaggtggctcagaagttcgtggagactcatcccgagtttattgggatcaaaatcatatatagtgatcatagatcaaaggatgtagctgtgattgctgaatccattcggatggcgatgggactccggataaagtttcctactgtggtggccggatttgacctggtggggcatgaagatactggtcactcactgcacgactacaaagaagctctgatgataccagcgaaggatggagtgaagcttccttattttttccatgccggagagactgattggcaggggacgtcaatagatcgcaatattctggacgctctaatgctgaacactactagaataggtcacggattcgcgctttcaaagcatccagctgttcgaacctactcttggaaaaaagatatccccatcgaggtctgtccaatctcaaaccaggtcctgaagcttgtgtctgatctccggaaccaccctgtagccactctgatggctactggccatcccatggttatctcgagcgatgacccggctatgtttggcgcaaagggattgagctatgacttttatgaggtgtttatgggcattggtggaatgaaagcggacttgcgaacactaaagcagctggcgatgaattccattaaatactcaaccctgctggaaagcgagaaaaatacatttatggagatctggaagaagagatgggacaagtttatcgccgatgtcgctacaaagtag

SEQ ID NO: 343591 - DNA, 75 bp, Artificial Sequence
  derived and/or modified sequence
atgctggtggacggccccagcgagcggcccgccctgtgcttcctgttgttagcggtcgccatgtcctttttctag

SEQ ID NO: 343592 - RNA, 1536 nt, Artificial Sequence
  derived and/or modified sequence
augcugguugacggcccaagcgaaaggccagcacucuguuuccugcuguuagccgucgcaaugucauuuuucgggucugcguugagcauugacgaaacccgagcacaucuccuguuaaaagagaaaaugaugcggcuggguggaagacuuguacucaacaccaaagaggaacuggcgaacgaaagauuaaugacacugaaaaucgcagaaaugaaggaggcuaugagaacucucauuuuuccaccuucgaugcauuucuuccaggcuaagcaccugauugaaagaucccaagucuucaacauuuuacguaugaugccuaaaggcgccgcccugcaccugcaugauaucgguaucgugaccauggauuggcucguacguaacgucacauaucggccccauugucacauuuguuuuacaccgcgugggauuaugcaguuccgcuuugcacauccuaccccuaggccuucggaaaagugcaguaaauggauccugcucgaagacuaccguaaacgaguccagaauguaaccgaguucgacgauucucuccuuaggaacuuuaccuugguuacccagcauccagaaguuaucuacaccaaucagaacgucgugugguccaaguucgagacuaucuuuuucacgaucuccggccugauccauuacgccccaguuuuuagggacuacgucuuuagaucuaugcaggaauuuuaugaggauaacguucuuuauauggagauuagggcuaggcugcugccaguguacgaauugucaggagagcaccaugacgaggaguggucggugaagacuuaucaggagguggcucagaaauucguggaaacacaccccgaguuuauuggcaucaagauuauauacagugaucauagaaguaaagacgucgcuguuauagcugaaaguauuagaauggcaaugggccugcguaucaaauuccccacaguugucgcaggauucgauuuagucggccacgaggacaccgggcauucacugcacgauuauaaagaggcccugaugauccccgcuaaggauggcgucaagcuccccuacuucuuucacgccggggaaacagauuggcagggaacuaguauagaccggaauauucuggaugcucugauguuaaauacaaccagaaucggacauggcuucgcauuguccaaacaccccgcagugcgaacuuauucauggaaaaaagauaucccuauugagguguguccuauuaguaaucagguccugaagcuggucuccgaucuacgcaaucacccaguggcuacucugauggcgacaggacauccuauggucauuagcucagaugauccugcgauguuuggcgcuaaaggauuaucauacgacuuuuacgaaguguuuaugggcaucggaggcaugaaagcugaccugcggacucucaaacagcucgccaugaauucuauaaaguacucuacgcugcucgaaagcgaaaagaacacguucauggaaauauggaagaagagaugggauaaauucaucgccgacguggccacuaaguag

SEQ ID NO: 343593 - RNA, 75 nt, Artificial Sequence
  derived and/or modified sequence
augcucguugauggacccuccgaaaggcccgcgcucuguuuccuacuccucgccguagcaaugucuuucuucuag

SEQ ID NO: 343594 - RNA, 1536 nt, Artificial Sequence
  derived and/or modified sequence
augcuaguggacgguccuucugaacggcccgcccuuugcuuccuucugcuggcuguugcuaugucuuuuuucgggagcgccuugucuaucgacgaaacccgugcccaccugcuccugaaagaaaaaaugaugcgcuuaggcggcagacuggugcugaacacuaaagaggagcuagcuaaugaacggcugaugacccucaagaucgcagaaaugaaagaggcgaugcggacacuuauauucccccccucaaugcauuucuuucaggccaaacaucugaucgaacgaucucaaguauuuaacauccugcggaugaugccaaagggagcagcucugcaccugcacgacauagggaucguaacaauggacugguuaguccggaaugugaccuaccgcccucauugccauaucugcuucacaccccggggaauuaugcaauuuagauucgcccaucccacuccccgaccaagugagaaauguagcaaauggauccugcucgaggauuaucggaagcgcguacagaauguaacagaguuugacgauagccuacugagaaauuucacauuggucacccagcaucccgaaguuaucuauacuaaucagaauguuguguggagcaaauuugaaacaaucuucuucaccauuucaggucuaauucauuaugcuccaguguuucgagacuacguguucagguccaugcaggaguuuuaugaagauaacgugcucuacauggaaaucagggcuagauuacucccaguuuaugagcucucaggcgagcaccacgaugaggaauggucagugaagacguaucaagaggucgcacagaaguucgucgaaacccaccccgaauucauaggcaucaaaauaaucuacagcgaccaucggagcaaagacguugccgugaucgcugaguccauaagaauggcgaugggccugcgaaucaaguuuccgacagugguugcuggauucgaucuggugggccacgaagacacuggccacucccugcacgacuacaaagaggccuuaaugaucccagccaaagauggcguaaagcuuccauacuuuuuccacgccggcgagaccgauuggcaaggaaccaguauugacaggaauauccucgacgcguuaaugcugaauacuacgcgcauaggccacggcuuugccuugucuaaacauccagcaguaaggaccuacagcuggaaaaaagauauaccuaucgaagugugucccauaucuaaucagguacugaaacucguauccgauuuacgcaaccacccuguagccacacuuauggccacuggccacccaauggugaucucaagcgaugacccugccauguucggcgcaaaaggcuugagcuacgauuuuuaugaggucuucaugggcauuggugggaugaaagccgaccugaggacucugaagcagcucgccaugaacucgauuaaauauucaacgcuacucgaguccgagaaaaacaccuuuauggagauauggaagaaacggugggacaaauuuaucgcagacgucgcgacgaaguag

SEQ ID NO: 343595 - RNA, 1536 nt, Artificial Sequence
  derived and/or modified sequence
augcuaguagaugggccuagcgagcgaccagcucugugcuuucugcuucuggcaguggccaugaguuucuucggcucagcucucagcaucgaugaaaccagagcacaccuccuccucaaagagaagaugaugaggcugggaggucgucuaguguuaaacacuaaagaagagcuugcuaacgagcgucucaugacucugaagauugcagaaaugaaggaagcuaugcgcacgcugauuuuuccgccaagcaugcacuuuuuccaggcgaaacaucugaucgaaagaagucaagucuucaacauccuucgaaugaugccgaaaggagccgccuuacaccugcaugauaucggcaucguuaccauggacugguuggugcggaaugugacguacagaccgcacugccauauuugcuucacuccaaggggcauuaugcaguuuagguuugcccacccaacuccccggccguccgaaaaguguaguaaguggauccuucuugaagacuaccgaaaaagaguucaaaacgugacagaauuugacgauucucuacugcgaaauuuuacuuugguaacccagcaccccgaggugaucuacaccaaccagaacguggucuggucuaaauuugagacaaucuucuucaccauuucuggacuuauccacuacgcccccguguuucgagacuauguguuuaggucuaugcaggaguucuacgaagacaauguccucuauauggagauucgcgccaggcuuuuacccguauacgaacuuuccggagagcaucacgaugaggaguggaguguuaaaaccuaucaggaggucgcccagaaauucguagaaacccacccagaguuuauagguaucaaaaucaucuacucugaccaccgguccaaggauguggcagugauagcagagucuaucaggauggcaaugggacuuaggaucaaguuccccaccgugguugccggcuucgaccucgucggacaugaggauacaggccacaguuugcaugacuacaaagaggcccugaugauuccugccaaagacggagucaaguuacccuacuuuuuucacgcaggggagaccgacuggcaaggcacuucuauagaccggaacauucuugaugcacuuaugcuuaauacuaccagaaucgggcacggguuugccuuaucuaaacacccugccguccggaccuacucguggaagaaagacaucccuauugaaguuugccccaucagcaaccagguauuaaaacuaguguccgaucuuaggaaccauccagucgcuacuuuaauggccacagggcaccccauggugauauccucagaugacccugccauguuuggagccaagggacuaucuuacgauuucuacgagguauucauggggauuggagguaugaaggccgacuugagaaccuuaaagcagcuggccaugaacucaauuaaauauagcaccuuguuggaauccgaaaagaacacuuucauggagauuuggaagaaacgaugggacaaauucauugccgacguagccacaaaguag

SEQ ID NO: 343596 - RNA, 1410 nt, Artificial Sequence
  derived and/or modified sequence
augaugcgacucgguggaaggcuuguguuaaauacaaaggaggagcuugcaaaugagcggcugaugacacugaaaaucgccgaaaugaaggaagccaugcguacccuuauuuucccaccuucuaugcauuucuuucaggccaaacaucucaucgaacggagucaaguguucaacauucugagaaugaugccuaagggagcugcccugcacuugcaugacaucgggaucguaacuauggacuggcugguuagaaauguuacauaccggccucacugucacauuugcuuuaccccaagaggcauuaugcaguuccgguuugcccauccaacgccuagaccauccgaaaagugcucgaaauggauucuccuggaggacuauaggaaacgcgugcagaauguuacagaguucgacgacagccuguugcgcaauuucacucuuguaacccaacauccagaggucauuuacacaaaccagaaugucgugugguccaaguucgagacaauauuuuucacaauaagcggcuugauccacuacgccccaguauuucgagauuauguguuccgauccaugcaagaguuuuacgaggauaacgugcuguauauggaaauccgugcccggcugcugcccguguacgagcugagcggcgagcaucaugacgaggaguggagugugaaaacuuaccaggagguggcacagaaauucguugaaacucacccugaauuuauuggcaucaaaauuauauauuccgaccacaggaguaaagauguugcagugaucgcagaaagcauuagaauggcuaugggguuacgcauaaaauuuccaacagugguggccggcuuugaccuggugggacaugaagacacaggacauuccuuacaugacuauaaagaagcccuuaugaucccggccaaggauggcgugaaacugcccuauuucuuccaugcaggcgagaccgauuggcagggcacauccauagauagaaauauccuggacgcccugaugcugaacacuaccaggauaggacauggcuuugcucugucaaagcacccggccguccgcacauacagcuggaagaaagacaucccaauugaagugugcccuauuucgaaccagguguuaaaguuaguaucugaucucaggaaccaucccgucgccacauugauggccaccggucacccaaugguaauuagcagugacgacccagcaauguucggggccaaaggacucagcuacgauuucuaugagguguuuauggggaucggugggaugaaggcagaucucagaacacucaaacagcuagcaaugaacucuauuaaguacuccacacugcuggaaucagagaagaauaccuuuauggagauuuggaagaagagaugggacaaguuuaucgccgauguugcgaccaaauag

SEQ ID NO: 343597 - RNA, 75 nt, Artificial Sequence
  derived and/or modified sequence
augcucguggaugggccauccgaacguccugcucucuguuuucugcuacuggcugucgcaauguccuucuucuag

SEQ ID NO: 343598 - RNA, 459 nt, Artificial Sequence
  derived and/or modified sequence
augcucguagauggacccucagaacggccugcccucugcuuccuguugcuugccgucgccaugagcuucuuugguuccgcucuauccauugacgagacucgggcccaccuacuccugaaagagaaaaugaugcgcuugggcggaagacugguuuuaaauaccaaagaggaacuggccaaugagcguuuaaugacccugaaaaucgccgaaaugaaagaagccaugaggacauugauuuuuccuccuuccaugcauuuuuuccaggcuaaacaucuaaucgagcgcucucaaguguucaauaucuuaaggaugaugccaaagggggcagcccugcaccugcaugacauugggauuguaacgauggauuggcugguuaggaacguaaccuaucgcccacacugccauaucugcuucacaccuaggggaauuaugcaguuucgcuucgcacauccuacauag

SEQ ID NO: 343599 - RNA, 1536 nt, Artificial Sequence
  derived and/or modified sequence
auguugguagacggcccuuccgaacgcccagcucugugcuuccugcuguuggccguugccauguccuucuuugguucagcacuauccauagaugagacuagagcacaucuucuucugaaggaaaagaugaugagguuaggagguagauugguucugaauacaaaagaagaguuggcaaaugagagacugaugacacugaaaauugcagaaaugaaagaggccaugcgaacacuuauauucccucccuccaugcacuucuuccaggcuaagcaccugaucgagagaucccaagucuucaauaucuugcgcaugaugcccaaaggagcagcucuucaucuccaugauaucggcaucguuacuauggacuggcucgugcggaacgucacauacaggccccauugccacauauguuuuacgccucguggaaucaugcaauuuagauucgcucacccaacuccgagacccucagagaaauguaguaaauggauucuauuggaggauuauaggaagagaguacaaaacguaacggaguuugaugacagccuucuccggaauuucacguuggucacgcagcaccccgaagugaucuacacaaaccagaacguuguuugguccaaauuugagacgauuuuuuucacuauuaguggccugauucauuacgccccuguguucagggacuacgucuuuagaagcaugcaggaauucuaugaagauaauguguuauauauggagauucgcgcaagacuccuuccuguuuacgagcucagcggcgagcaucacgacgaggaguggagcguuaaaacguaucaagagguugcucaaaaauuugucgaaacccaucccgaguuuauuggcauaaaaauaauuuauucagaccauaggaguaaggaugucgcgguuaucgcugaaagcauacgaauggcaaugggucugcgcauuaaauuccccacaguugucgcagguuucgaucucgugggccaugaggacaccggacacucucugcaugauuacaaggaagcccuaaugauaccugcuaaagauggcguaaaauugcccuauuucuuucaugcgggcgaaacagacuggcagggaaccucuaucgaccgaaacauuuuggacgcccugaugcuuaacacaaccaggauaggacaugguuucgcccugucuaaacaccccgcuguuagaacauauaguuggaaaaaagacauucccauugaaguuugcccaauaaguaaccagguccugaaacucgucucugaccuuagaaaucaccccguugccacauuaauggccacuggucaucccauggucaucaguuccgacgaucccgcuauguuuggcgcuaaagggcucagcuaugacuucuacgagguguuuaugggaaucggcgggaugaaagcugauuugaggaccuuaaagcagcuagcaaugaauagcaucaaguacagcacucuccucgagagcgaaaaaaauaccuuuauggagauauggaaaaagagaugggauaaguucauugccgaugucgcuacaaaguag

SEQ ID NO: 343600 - RNA, 1536 nt, Artificial Sequence
  derived and/or modified sequence
augcugguugauggcccaucugagagacccgcgcucugcuuucuacuucuugcaguugcaauguccuucuuuggcucugcacuaucuaucgacgaaacaagggcucaccugcuuuuaaaggaaaaaaugaugagacucgggggacggcucguccugaacaccaaggaagaacuggcaaacgagagauugaugacacugaaaaucgcugaaaugaaggaagccaugcguacacugauuuuuccucccaguaugcauuuuuuccaggccaagcaucugauugaacgcucacaaguguucaacauucucagaaugaugccuaaaggagccgcacuucacuugcacgacauuggaauuguaaccauggacuggcuuguacgcaauguaaccuaucggccucacugucauaucugcuucacaccacggggcaucaugcaguuuagauucgcacacccgaccccgcggcccucagaaaagugcucaaaguggauucugcuggaagauuaccguaaaagaguucagaauguaaccgaguuugacgacagccuccugcgcaauuuuacgcuugugacucagcaccccgaggugauauauacaaaccaaaacgugguauggucaaaauuugagacaauuuucuucacaaucuccggauuaauucauuaugccccaguuuuucgggauuacgucuuuagauccaugcaggaguuuuaugaggauaacguucuguauauggaaauucgagcccgacuuuuaccuguuuaugaacugaguggggagcaccacgaugaagaauggagcgugaaaaccuaccaagaggucgcccagaaguuugucgaaacucauccagaguucauaggaaucaaaauuauuuacuccgaucacagaaguaaggacguggcagucauugccgaaagcaucagaauggccaugggacuucguauuaaauuccccacagugguagcgggcuucgaucuagugggacacgaagacacaggacacagcuuacacgacuacaaggaagcuuuaaugauucccgcgaaagauggaguuaaacuaccuuauuucuuccaugccggcgagacagacuggcaggguacuucuauagauaggaauauccuggacgcucucaugcuaaauacuacaagaauuggucauggguucgcacuuuccaagcauccagcagugcgcaccuacuccuggaaaaaggacauuccaaucgaagucugcccuauuucaaaccagguacuaaagcucgucagugacuugagaaaccauccagucgcuacccuuauggccacuggccacccaauggugauaucuagcgacgauccagcuauguucggcgccaaaggguugucauacgauuucuaugaagucuucaugggcaucggaggaaugaaggccgaucuacgcaccuuaaagcagcuggcaaugaauucaauuaaauauuccacucuacuugagucugaaaagaauacauuuauggagaucuggaaaaagagaugggacaaauucauugcagacguugcuacuaaauag

SEQ ID NO: 343601 - RNA, 1536 nt, Artificial Sequence
  derived and/or modified sequence
auguugguugacggcccaucugaaagacccgcguuaugcuuccugcugcuggcaguugcaaugagcuucuucggcucagcccugagcauugaugaaacgagagcacaccuccuguuaaaggaaaaaaugaugcgguugggcggccguuuggugcugaauaccaaagaggagcuggccaacgagcgccugaugacacucaagauugcugaaaugaaggaagccaugcgcacacuuauauucccaccaucuaugcacuuuuuccaagccaaacaucugaucgaacgaucucaaguauucaauauacuccggaugaugcccaaaggagcagcacuccaccuucaugacaucggaauuguuacaauggacuggcuugugcguaauguuacauauagaccucacugucacauuugcuuuacuccacgugguauuaugcaguuucguuucgcccacccuaccccucggcccuccgaaaaauguaguaaauggauucugcuagaagauuaccgaaaaagagugcaaaacguaacugaguuugaugauaguuuacuuaggaacuucacacucgugacacaacaccccgaggugaucuacaccaaucagaauguaguuugguccaaguuugaaacgaucuucuucacuaucagcgggcuaauucacuaugcccccguguucagagacuacgucuucagaucaaugcaggaauuuuaugaggacaaugugcuuuauauggagauuagagcaagauuacugccaguuuaugaguuauccggagagcaccaugaugaggaauggucagucaagaccuaucaggagguugcccagaaguucgucgaaacccauccagaguuuauuggcauuaaaauaauuuauucggaccacagauccaaggauguugcugucauagcagaaaguauacgcauggcuaugggccuaagaauuaaauuucccaccguuguagccggcuuugaucugguuggucaugaagacacaggacauucccuucacgauuauaaggaggcucuuaugaucccugcgaaagacgguguaaaacucccguauuucuuucacgcaggagagacagacuggcagggcacaucaauagacaggaacaucuuggaugccuugaugcucaauacuacucggauagggcauggguucgcccuaucaaagcaccccgcugucagaacuuacucauggaaaaaagacaucccuauugaaguuugccccaucagcaaccagguauuaaaacuaguguccgaucuuaggaaccauccagucgcuacuuuaauggccacagggcaccccauggugauauccucagaugacccugccauguuuggagccaagggacuaucuuacgauuucuacgagguauucauggggauuggagguaugaaggccgacuugagaaccuuaaagcagcuggccaugaacucaauuaaauauagcaccuuguuggaauccgaaaagaacacuuucauggagauuuggaagaaacgaugggacaaauuuaucgccgacguagcaacuaaguag

SEQ ID NO: 343602 - RNA, 1410 nt, Artificial Sequence
  derived and/or modified sequence
augaugagacucggggguagguugguucugaauacuaaagaagagcucgccaacgaaaggcugaugacccucaagauagcagagaugaaagaagcaaugcguacacugauuuucccaccauccaugcacuucuuccaagcaaaacauuugaucgaacguucucagguauucaacauauugcgaaugaugccuaaaggugccgcccuccaccugcaugauaucggaauugugacuauggacuggcuagucagaaacgugacauauaggccccauugucauaucugcuuuaccccacgcggcauuaugcaauuuagauucgcccauccaacaccuaggccaagcgaaaagugcagcaaauggauccuccuugaagacuauagaaagagagugcaaaacgugaccgaauuugaugacucccugcucagaaacuuuacucuggugacacagcacccagaggucaucuauacgaaccagaacgucgucugguccaaguuugagaccauuuuuuucaccauuagcggccucauucacuacgcacccguauuuagagacuacguguucaggucuaugcaggaauucuacgaagacaauguucuauauauggagauucgggcuaggcugcuucccguuuacgagcuaucaggggaacaucacgaugaggaauggucugugaaaaccuaucaagaggucgcccagaaguucgucgagacccacccagaauuuaucgguauuaagauuaucuacucugaucacagaaguaaagacguggcagugaucgcugaguccauuaggauggcuaugggauuacggauaaaguuuccgaccguugucgcuggauuugaccuaguuggacacgaagacacaggccacucccuccaugauuauaaagaggcacugaugauuccagcuaaggauggugugaaacucccuuauuucuuccacgccggagaaaccgacuggcaaggaacaucaaucgacaggaacauacuagaugcccuuaugcugaacacuacccgcauaggacacggguucgcccucagcaaacacccugcaguccgcacuuacucuuggaagaaggacauacccaucgaaguuuguccaaucagcaaucaagugcucaaacuggucagcgaucuaagaaaccaucccgucgccacccuaauggcaacuggacauccgaugguuauuuccucagacgauccugcgauguucggcgcaaagggucucagcuacgauuuuuacgaaguguuuaugggcauuggaggcaugaaggcugaucugaggacucugaaacaacucgcaaugaacagcaucaaauauagcaccuuguuggagagugaaaaaaacacauuuauggaaauuuggaaaaagagaugggauaaguuuauugccgauguggccaccaaguag

SEQ ID NO: 343603 - RNA, 459 nt, Artificial Sequence
  derived and/or modified sequence
augcuuguugaugguccaagugaaagaccagcucugugcuuuuuacuccuggcuguugcuaugagcuuuuuugguagugcacuguccauagaugagacucgggcccaccugcuccuuaaggaaaagaugaugcgguuaggcggucgacuugugcucaacacaaaagaggaauuggcaaaugagcgccuuaugacacucaagauugcagaaaugaaagaagcuaugagaacacugauuuucccccccuccaugcacuucuuucaggcaaaacauuugauugagcgaagucagguauuuaacauccugagaaugaugccaaaaggugccgcacugcaucuccacgauauugggaucgucaccauggauugguuaguaagaaacgucaccuaccgcccgcauugucauaucugcuuuacaccuaggggaauuaugcaguuucgcuucgcucacccaacuuag

SEQ ID NO: 343604 - DNA, 180 bp, Artificial Sequence
  derived and/or modified sequence
atgatgatgaagatgatgatgaggatgaagatcaggaagatccgctaccactgccagaggaagcagaacctgatccacaacaatggaaatggcctgggctctgtgcctgtggagaagctggtgctgcaccccagccccatccagaacccccagcagagcgctgtggtgtcctgtgagtag

SEQ ID NO: 343605 - DNA, 2131 bp, Artificial Sequence
  derived and/or modified sequence
gagactcctgcaggttcgagaaagcatgacatgctcccagaatcctggatttggacttcattctggacagcatatgacaaggacgaggacccctattctagccagttaaagctggacagaatttttaaaagcaatgaagccagttccttggatatatccacgggctttgctttgagaaggaactgagtaggcagtgagaagagtcgagtgaagcctggcccgtgagtgcctcaacaactgagatgaacgtcgactcgcttgcaggcaagttgtcactcagcagcgatctgaactatatcctgggttccagaaaaggcagaggttcttaccgaaagcaggggaggaagccgcagcccaaggaggtcgtcacttgccgggaaggtggctcgggccaggctgcactcaaaacccgtgctctgtccacactgctacggggccagagccaaggaagcttccacttcttcccccagacagccccaacagcggctaccccaaggagccagcagccttgtgtcctgggatccccagcccctgcagaatgacccaccaggatctgagcatcacagccaaactcatcaatggaggtgtagcagggctcgtgggggtgacctgcgtgttccccatcgacttggccaagactcgcctgcagaaccagcatgggaaagccatgtacaaaggaatgatcgactgcctgatgaagacggctcgggcggagggcttcttcggcatgtaccgaggggctgcagtgaacctcactctggtcactccagagaaggccatcaagctggcggccaacgactttttccggcggctgctcatggaagatgggatgcagcggaacctgaagatggagatgcttgccgggtgtggggctgggatgtgccaggtcgtggtgacctgtcccatggaaatgctcaagattcagctgcaggatgctggacgcctggccgtccatcatcagggctcggcctcagcaccctccacctccaggtcctacacaactggttcggcttccacccacaggcgcccctctgccaccctcattgcctgggagctgctccgcactcagggcctggctgggctctacaggggcctgggtgccactctcctcagagacattcctttctccatcatctacttcccactgtttgccaaccttaacaacctggggttcaacgagctcgccggtaaggcgtcctttgcacattccttcgtgtcaggctgtgtggcaggttccatagctgcggtcgcagtgacgcctctagatgttctgaaaactcgaatccaaaccctcaagaaaggcctgggcgaggacatgtacagtgggatcaccgactgtgccaggaaactctggattcaggagggaccatctgccttcatgaaaggcgctggctgccgggcactggtcatagcacctctctttgggattgctcaaggggtctattttattgggattggagagcgcatcttaaagtgttttgactagacagagctggaggtcaagtccctgcgcttgccgccctctctctagctgtttcacttagcctagagggggcaagggcaggtggggccactctggcctgcctggtcctctgcgttgtagtgctacctcaatctcgggagaaacagccctatattctaacaagttgagcacagccttcttccccttcgtgtctacactcgttttcctttgtgggcacagctaccaggggcttttggaagcccctaaccacctacttttcaacaaaaatggtactttcgttgtattaattgcaggaccttaacaggtagtcacaatagaagggttgtttctgtattttaacatttctatttcacagtcaaactcggcattcttcagtcagcttgaggatttagcattgttaatcttggactccataacttatgagtcctagcactgattttgaggaaaaggaggatcagaagttcaagggaccgtgaaagccctcagagtcagcacctagtttgagaccaagcaccctttcgaatccctggatggctgagggggctgaggccggctctgactgggcagctcagcccctcccccagagcccagggtcttgcacacccctccctgtaaccaaggaacactctgaaataaaggtgaatggct

SEQ ID NO: 343606 - DNA, 2057 bp, Artificial Sequence
  derived and/or modified sequence
aggttcgagaaagcatgacatgctcccagaatcctggatttggacttcattctggacagcatatgacaaggacgaggacccctattctagccagttaaagctggacagaatttttaaaagcaatgaagccagttccttggatatatccacgggctttgctttgagaaggaactgagtaggcagtgagaagagtcgagtgaagcctggcccgtgagtgcctcaacaactgagatgaacgtcgactcgcttgcaggcaagttgtcagggaggaagccgcagcccaaggaggtcgtcacttgccgggaaggtggctcgggccaggctgcactcaaaacccgtgctctgtccacactgctacggggccagagccaaggaagcttccacttcttcccccagacagccccaacagcggctaccccaaggagccagcagccttgtgtcctgggatccccagcccctgcagaatgacccaccaggatctgagcatcacagccaaactcatcaatggaggtgtagcagggctcgtgggggtgacctgcgtgttccccatcgacttggccaagactcgcctgcagaaccagcatgggaaagccatgtacaaaggaatgatcgactgcctgatgaagacggctcgggcggagggcttcttcggcatgtaccgaggggctgcagtgaacctcactctggtcactccagagaaggccatcaagctggcggccaacgactttttccggcggctgctcatggaagatgggatgcagcggaacctgaagatggagatgcttgccgggtgtggggctgggatgtgccaggtcgtggtgacctgtcccatggaaatgctcaagattcagctgcaggatgctggacgcctggccgtccatcatcagggctcggcctcagcaccctccacctccaggtcctacacaactggttcggcttccacccacaggcgcccctctgccaccctcattgcctgggagctgctccgcactcagggcctggctgggctctacaggggcctgggtgccactctcctcagagacattcctttctccatcatctacttcccactgtttgccaaccttaacaacctggggttcaacgagctcgccggtaaggcgtcctttgcacattccttcgtgtcaggctgtgtggcaggttccatagctgcggtcgcagtgacgcctctagatgttctgaaaactcgaatccaaaccctcaagaaaggcctgggcgaggacatgtacagtgggatcaccgactgtgccaggaaactctggattcaggagggaccatctgccttcatgaaaggcgctggctgccgggcactggtcatagcacctctctttgggattgctcaaggggtctattttattgggattggagagcgcatcttaaagtgttttgactagacagagctggaggtcaagtccctgcgcttgccgccctctctctagctgtttcacttagcctagagggggcaagggcaggtggggccactctggcctgcctggtcctctgcgttgtagtgctacctcaatctcgggagaaacagccctatattctaacaagttgagcacagccttcttccccttcgtgtctacactcgttttcctttgtgggcacagctaccaggggcttttggaagcccctaaccacctacttttcaacaaaaatggtactttcgttgtattaattgcaggaccttaacaggtagtcacaatagaagggttgtttctgtattttaacatttctatttcacagtcaaactcggcattcttcagtcagcttgaggatttagcattgttaatcttggactccataacttatgagtcctagcactgattttgaggaaaaggaggatcagaagttcaagggaccgtgaaagccctcagagtcagcacctagtttgagaccaagcaccctttcgaatccctggatggctgagggggctgaggccggctctgactgggcagctcagcccctcccccagagcccagggtcttgcacacccctccctgtaaccaaggaacactctgaaataaaggtgaatggct

SEQ ID NO: 343607 - protein, 178 aa, Artificial Sequence
  derived and/or modified sequence
MLRAGAPTGDLPRAGEVHTGTTIMAVEFDGGVVMGSDSRVSAGIELEEPPLVLAAANVVRNISYKYREDLSAHLMVAGWDQREGGQVYGTLGGMLTRQPFAIGGSGSTFIYGYVDAAYKPGMSPEECRRFTTDATSTKRRVCGYFLRTQKRENQNQRVHEYMCTGERSLSSSPLLSCS

SEQ ID NO: 343608 - protein, 178 aa, Artificial Sequence
  derived and/or modified sequence
MLRAGAPTGDLPRAGEVHTGTTIMAVEFDGGVVMGSDSRVSAGIELEEPPLVLAAANVVRNISYKYREDLSAHLMVAGWDQREGGQVYGTLGGMLTRQPFAIGGSGSTFIYGYVDAAYKPGMSPEECRRFTTDATSTKRRVCGYFLRTQKRENQNQRVHEYMCTSERSLSSSPLLSCS

SEQ ID NO: 343609 - protein, 154 aa, Artificial Sequence
  derived and/or modified sequence
MLRAGAPTGDLPRAGEVHTGTTIMAVEFDGGVVMGSDSRVSAGIELEEPPLVLAAANVVRNISYKYREDLSAHLMVAGWDQREGGQVYGTLGGMLTRQPFAIGGSGSTFIYGYVDAAYKPGMSPEECRRFTTDGNQPSGRVPGEGFETWEGSRL

SEQ ID NO: 343610 - DNA, 537 bp, Artificial Sequence
  derived and/or modified sequence
atgctgagggcaggcgccccgaccggggatctgcctagggccggagaggtgcacaccggcacgactatcatggccgtcgagttcgatggcggtgtcgtgatgggaagcgattctcgcgtcagcgcagggatcgaactcgaagagcctccactggtgctggcagcggccaacgtcgtgaggaacatcagctataagtaccgtgaagacctgtctgctcacctaatggtagccgggtgggatcagcgcgaggggggacaggtatatggaacactcgggggcatgcttaccagacaaccatttgccattgggggaagcggttcgacatttatctatggctacgtggacgctgcttacaagcccgggatgagtccagaggaatgcaggcggtttaccaccgatgccacttcgaccaaacgcagggtatgcggctactttctgcgcacacagaaaagagagaatcaaaatcagcgggtgcatgagtacatgtgcacgggtgagaggagtctcagtagctcacccctgttgagttgttcatag

SEQ ID NO: 343611 - DNA, 537 bp, Artificial Sequence
  derived and/or modified sequence
atgctgagggctggcgcgcctaccggggatctgcctagggcaggggaagtccacactgggacaacaattatggctgttgagtttgatggcggtgtggtgatggggtcagattcgcgcgtttccgctgggattgaactggaagaaccccccctggtactggcagccgcaaatgtcgtccgaaacatttcctacaaatatcgggaagacctttccgcgcacctcatggtcgcagggtgggaccaaagggaaggaggtcaagtctacggaaccctgggaggtatgctaaccagacagccctttgctatcggcggctccggaagcactttcatatacggatatgttgacgccgcctataaaccaggaatgagcccagaggagtgtagacgattcaccaccgatgccacctccaccaagcgtagagtgtgcgggtactttctgcgtactcagaaaagggaaaaccagaatcagagggtccacgagtatatgtgcactggggaacgttccctatcatcgagcccactccttagctgttcatag

SEQ ID NO: 343612 - DNA, 537 bp, Artificial Sequence
  derived and/or modified sequence
atgttgcgcgcaggcgcccccaccggcgacctcccccgcgccggcgaggtgcatacaggcactacaatcatggccgtagagtttgatggaggcgtcgtaatgggcagcgactcacgcgtttcagccggcattgaactcgaggaacccccgcttgtgctcgccgccgccaacgtagtgaggaacatttcctacaagtacagagaggacctcagcgcacacctgatggtagcagggtgggaccagagagaaggaggccaggtttatggtacgcttgggggtatgctaacaagacaaccttttgccattggcggaagcggctccacattcatctatggctacgttgacgccgcatataagcccggtatgtcaccggaagaatgtagaagattcaccacggacgccactagcacaaaaagaagagtgtgtggatattttctgaggacccagaagcgcgagaaccagaatcaaagggttcacgagtacatgtgtacaggcgagcggtctctcagctcttcaccgcttttgtcctgtagctag

SEQ ID NO: 343613 - DNA, 537 bp, Artificial Sequence
  derived and/or modified sequence
atgctccgcgcgggcgcacctacaggagatctgcctcgggcgggtgaggtgcatacaggaaccaccatcatggctgtggagttcgatggcggagtggtgatggggagcgattctcgggtctcagccggaatcgagctggaagagccccctctggtcttagcagcagcgaatgtggtgcgcaacatctcttataagtatcgggaggacctttcagcccatctcatggtggccggttgggaccagagagagggcggacaggtttacggcacccttgggggcatgctaaccaggcaacccttcgcaatcgggggcagcggcagtacattcatttacgggtacgtagacgcagcctataagccggggatgagcccagaagagtgcaggaggttcaccacagacgcaacctctacaaagcggcgagtgtgtggctattttctgcggacacagaagagagaaaaccagaaccagcgggtgcatgagtacatgtgtacttctgagcggtcactgtcctcctcgcctctcctgagctgctcctag

SEQ ID NO: 343614 - DNA, 537 bp, Artificial Sequence
  derived and/or modified sequence
atgctccgcgccggcgcccccaccggagatttgccaagggccggcgaggtccatacgggcactaccattatggccgtcgagtttgatgggggtgtggttatgggcagcgattcgcgggtatcagcggggatagagctggaggagccacccttagtgctggcagcagccaatgtagtgaggaatataagttacaagtatcgtgaggatcttagtgctcaccttatggtagcaggctgggatcagagagaaggcgggcaggtatatgggacgctgggaggcatgctaactaggcagccatttgctatcggtggcagcggatcaaccttcatttacggatacgtggacgccgcttataaacccgggatgagtccagaggagtgtcggcgcttcaccaccgacgccacctccaccaagcgcagggtctgcggatacttcctcagaacacaaaagagggagaaccagaatcagcgcgttcatgagtacatgtgtactagcgaaagatcattgagcagttctcctctgctaagctgcagttag

SEQ ID NO: 343615 - DNA, 537 bp, Artificial Sequence
  derived and/or modified sequence
atgcttcgagcaggggcccccaccggtgatctgccacgcgccggcgaggtacacactgggacaacaatcatggctgtggaatttgacgggggagtggtgatgggtagcgattcacgagtgtccgccggcatcgagttagaagaacccccccttgtgctggctgccgctaacgtggttcgtaacattagctataagtacagagaggacctgtctgcacatctaatggtggctgggtgggatcaacgggaggggggccaggtctatggtacactgggggggatgttgacgaggcagccctttgccatcgggggatccggcagtacatttatttacggctatgttgacgctgcatataagcccgggatgtcccctgaagaatgtcggagatttactacagatgcgacgagtaccaagcgccgcgtgtgcggctacttcttaaggactcaaaagagggagaaccaaaatcagcgcgtgcacgagtatatgtgcacatcagaacgcagtctcagctccagtcctctgctgtcatgttcctag

SEQ ID NO: 343616 - DNA, 537 bp, Artificial Sequence
  derived and/or modified sequence
atgcttcgggcaggagctcccactggagatttgccccgcgccggcgaggtgcacaccggcactacgataatggccgtcgaattcgatggcggagtggtaatgggtagcgattctcgggtgagcgcaggtatcgaactggaagaaccccccttggtccttgctgccgccaatgtcgtgagaaacatcagctataagtatagagaggacttgtccgcgcacctgatggtggcaggctgggatcagcgcgaggggggtcaggtgtacggcacactcggaggaatgttaactcgccagcccttcgctatcggcggatcaggctccacctttatctatggctacgtcgacgccgcctacaaacccggtatgtccccagaggagtgtagacgctttaccaccgacgctactagcaccaagcgtcgcgtctgcggatatttcctgcggacccagaagcgagaaaaccagaaccagcgcgtgcatgaatacatgtgtacgggagagcggtcactgtcaagtagcccactgctgtcttgtagttag

SEQ ID NO: 343617 - DNA, 537 bp, Artificial Sequence
  derived and/or modified sequence
atgctgcgggcaggggctcctactggcgaccttccacgcgccggcgaagtccacacaggcactaccatcatggctgtagagtttgatgggggtgtggtaatgggatccgattcccgggtgagcgccggaatagaactggaggagcctcctctcgtactggccgctgcaaatgtggtgcgcaatataagctataaatatcgtgaggatctctcggcacacctgatggtagccggctgggaccaacgggaagggggtcaggtgtacggcaccttaggagggatgctgacaagacagcccttcgctatcggcggcagtggtagcactttcatctatggatacgtcgatgctgcctataaacctggcatgagccccgaagagtgcaggcggtttacgactgacgccacatccaccaagaggcgtgtgtgcgggtactttcttcgtacacagaagagagagaatcaaaaccaaagagttcacgagtacatgtgtactggcgagagatctctgtcttccagccccctgctcagttgctcttag

SEQ ID NO: 343618 - DNA, 465 bp, Artificial Sequence
  derived and/or modified sequence
atgctccgggctggagcccctacaggcgatctcccacgcgcgggagaagtgcatacagggacgactatcatggccgttgagttcgacggcggcgtggttatgggatccgatagccgagtcagtgcagggatagaactcgaggagcctccacttgtccttgctgctgcgaacgtggtacgaaacatcagttacaaatatcgagaggacctgtccgctcatcttatggtggccggatgggaccagcgggagggagggcaggtgtacggaactcttggcggtatgctgaccagacagccttttgccatcggcggcagcggctcgaccttcatctatgggtatgtggatgctgcatataagccagggatgtctcccgaggaatgccgccggttcacgactgacgggaatcagccatctgggcgcgttcccggtgagggcttcgagacatgggaggggagccgcttatag

SEQ ID NO: 343619 - DNA, 465 bp, Artificial Sequence
  derived and/or modified sequence
atgctgagagccggcgcccctactggagacttaccccgtgccggtgaggtccatacaggaactacaatcatggctgttgagttcgacggcggggtagttatgggtagtgatagtagggtcagcgctggtattgaattggaagagcctcccctcgttttagctgcagcaaatgtggtgagaaatatctcctataaatatcgtgaagatctgagcgctcacttaatggtggctgggtgggaccagagagagggtggtcaggtgtatggtacattgggtggcatgctcacaaggcagccttttgctatcggaggaagcgggtcgacattcatttacgggtatgttgatgccgcctataagcccggcatgtctcccgaggagtgccggcggtttacgaccgatgggaatcaaccctccggacgtgtgcccggtgaggggtttgagacgtgggaggggagcaggctgtag

SEQ ID NO: 343620 - DNA, 465 bp, Artificial Sequence
  derived and/or modified sequence
atgctgagagctggggccccaacaggcgatttaccgcgagctggggaagttcataccggaaccaccatcatggccgtagagtttgatggtggcgttgtcatgggctcagattccagagtgtctgcaggtattgaactcgaggaaccacctctcgtgctggcggccgcgaatgtcgtaaggaatattagctacaagtatagagaagatctatccgcccacctcatggtcgccgggtgggaccagagggaaggtggccaagtctatggcaccctaggcggtatgttgacgcgacagccatttgccatcggcgggagcgggagcacttttatctacggctatgtggatgccgcctataaacctggcatgtcgcccgaagaatgccgacgattcacaaccgacggtaaccagccatccggccgtgttccgggcgaggggttcgagacctgggagggatcccgcttatag

SEQ ID NO: 343621 - DNA, 465 bp, Artificial Sequence
  derived and/or modified sequence
atgctgagagccggcgcgcctactggagacctgccccgggccggcgaggtgcacaccggcactaccattatggctgtggagttcgacggtggcgtggtgatgggatccgactcccgagtgagtgcaggaatagagctcgaagagccaccactggtgctggccgccgcaaacgtcgtcagaaatatctcttacaaatatcgcgaagacctgtctgcacacttaatggtggccggatgggatcaacgcgaaggcgggcaggtctacggaaccctaggaggtatgcttacacgccaaccattcgcaattgggggaagcggctcaactttcatctatgggtacgtcgatgccgcctacaaacctggcatgtcgcctgaagagtgccggagattcactacagacgggaaccagccctccggccgcgtgcccggcgaaggcttcgaaacatgggaaggtagtaggctatag

SEQ ID NO: 343622 - DNA, 465 bp, Artificial Sequence
  derived and/or modified sequence
atgttgcgtgcaggtgcccccaccggggacttgccccgagcaggcgaagtgcacacaggcaccacgatcatggccgtggagttcgacggcggagtggtcatggggagcgacagccgggtaagcgctggaattgaactcgaggaacctcctttggtgctggccgcagccaacgtagtccgaaacatttcctataaataccgcgaagacctatccgcccatctgatggtggcagggtgggatcaacgtgagggcgggcaagtctatggcaccctgggcggtatgcttacccgacagccctttgccattggcgggtcgggatccaccttcatatacggctacgttgacgcagcctacaaacccgggatgtcgcctgaggaatgcagacgtttcacgacagacggaaatcagccgtccggcagagtgccaggggagggcttcgaaacctgggaggggtcccgtctctag

SEQ ID NO: 343623 - DNA, 465 bp, Artificial Sequence
  derived and/or modified sequence
atgcttcgcgccggtgctccaactggcgacctgccaagggccggagaggtgcacactgggaccacaatcatggctgtggagtttgatgggggagttgtcatgggaagtgacagccgggtgtccgccggcatagagctcgaggaaccgccccttgtgctggcagcagccaatgtagttaggaacatctcttacaaatatcgggaagacctttccgcccatcttatggtcgccggatgggatcagagagagggcggacaagtgtatgggactctcggcggtatgctgacacggcagcccttcgcgatcggtggatccgggagtacattcatttatggatatgtagacgcggcatacaagccaggtatgtcccctgaagaatgccggagatttactaccgacggtaaccaaccatccgggagagtgcccggggaggggttcgagacttgggagggcagccgattgtag

SEQ ID NO: 343624 - DNA, 465 bp, Artificial Sequence
  derived and/or modified sequence
atgctgcgggcaggcgcacctaccggcgatctccccagggctggagaagtgcatacgggtaccaccataatggccgtcgagtttgatggaggggttgtaatgggttcagattctcgtgtttcagctggaattgagctcgaagagcctcctctggttctggcagcagccaatgtggtccggaatatcagttacaaatatagggaagatctgtcggctcatttaatggttgccggttgggatcagagggagggaggtcaagtttacggcactctgggtgggatgctcactcggcagccttttgcaattgggggctcaggcagcacgtttatttacgggtacgtggacgccgcttacaaacccggcatgagtccagaggagtgtcggagatttacaaccgacggcaatcagccctcaggcagggtgccgggggagggcttcgaaacgtgggaagggtctaggctgtag

SEQ ID NO: 343625 - DNA, 465 bp, Artificial Sequence
  derived and/or modified sequence
atgcttcgagcaggcgctcccactggagatctccccagggccggggaggtacacaccggcacaactatcatggccgtggaattcgatggaggtgtggttatgggctctgatagcagggtctcagctgggattgagctcgaggagcctccactggtgctcgccgctgcaaacgtcgttcggaacatttcctataaataccgtgaggatctgagcgcacacctgatggttgccggatgggatcagagggaaggtgggcaagtgtacggcacactaggaggtatgctgactaggcagcctttcgccatcggcggcagtggtagcacttttatctacggctacgtagatgccgcttacaagcccggaatgtctcccgaggagtgccggcggtttaccaccgatggcaaccagccctctggacgcgtaccaggcgagggctttgaaacatgggaggggtcacgtctgtag

SEQ ID NO: 343626 - DNA, 537 bp, Artificial Sequence
  derived and/or modified sequence
atgctgcgggccggggcccccaccggggacctgccccgggccggggaggtgcacacaggcaccaccatcatggctgtggagtttgatggaggagtggtgatgggcagtgacagccgggtgtctgctggcatcgagctggaggagccccccctggtgctggccgccgccaacgtggtgaggaacatctcctacaagtaccgggaggacctgagcgcccacctgatggtggccggctgggaccagcgggagggcggccaggtgtatggcaccctgggcggcatgctgacccggcagccctttgccatcggcggcagcggcagcaccttcatctacggctacgtggatgctgcctacaagccaggcatgagccctgaggagtgccgccgcttcaccacagatgccaccagcaccaagagaagagtgtgtggctacttcctgcggacccagaagcgggagaaccagaaccagagggtgcatgagtacatgtgcaccggggagaggagcctgagcagcagccccctgctgagctgcagctag

SEQ ID NO: 343627 - DNA, 537 bp, Artificial Sequence
  derived and/or modified sequence
atgctgcgggccggggcccccaccggggacctgccccgggccggggaggtgcacacaggcaccaccatcatggctgtggagtttgatggaggagtggtgatgggcagtgacagccgggtgtctgctggcatcgagctggaggagccccccctggtgctggccgccgccaacgtggtgaggaacatctcctacaagtaccgggaggacctgagcgcccacctgatggtggccggctgggaccagcgggagggcggccaggtgtatggcaccctgggcggcatgctgacccggcagccctttgccatcggcggcagcggcagcaccttcatctacggctacgtggatgctgcctacaagccaggcatgagccctgaggagtgccgccgcttcaccacagatgccaccagcaccaagagaagagtgtgtggctacttcctgcggacccagaagcgggagaaccagaaccagagggtgcatgagtacatgtgcaccagcgagaggagcctgagcagcagccccctgctgagctgcagctag

SEQ ID NO: 343628 - DNA, 465 bp, Artificial Sequence
  derived and/or modified sequence
atgctgcgggccggggcccccaccggggacctgccccgggccggggaggtgcacacaggcaccaccatcatggctgtggagtttgatggaggagtggtgatgggcagtgacagccgggtgtctgctggcatcgagctggaggagccccccctggtgctggccgccgccaacgtggtgaggaacatctcctacaagtaccgggaggacctgagcgcccacctgatggtggccggctgggaccagcgggagggcggccaggtgtatggcaccctgggcggcatgctgacccggcagccctttgccatcggcggcagcggcagcaccttcatctacggctacgtggatgctgcctacaagccaggcatgagccctgaggagtgccgccgcttcaccacagatggcaaccagcccagcggccgggtgcctggagagggctttgagacctgggagggcagccggctgtag

SEQ ID NO: 343629 - DNA, 537 bp, Artificial Sequence
  derived and/or modified sequence
atgctgcgggccggcgcccccaccggcgacctgccccgggccggcgaagttcacaccggaacaacgatcatggcggtggagtttgatggaggcgtagtgatggggtctgactccagagtctctgccgggattgagcttgaagaacccccacttgtattggctgcagcgaacgttgtcagaaacattagctataaataccgggaggatctgagcgcccacctgatggtggccgggtgggatcagcgtgagggagggcaggtgtatggcaccctgggaggtatgctgaccagacagccttttgccatcggcgggagtggatccacctttatttatgggtatgtcgacgccgcttacaaacctggaatgagtcctgaagaatgccggcgctttaccacagacgccacatcaacaaaaaggagagtgtgcggctactttctgcggacccaaaaaagagagaatcagaaccagcgggtccacgaatacatgtgtacaggcgagagaagcctttctagctctcctctgctgagctgctcttag

SEQ ID NO: 343630 - DNA, 537 bp, Artificial Sequence
  derived and/or modified sequence
atgctgcgggccggcgcccccaccggcgacctgccccgggccggcgaagtacataccggaaccaccataatggccgtggagttcgacggtggggtggtgatggggtcggatagtagagtttccgccggaatagaattggaggaaccacccctagtcctggcggccgctaatgttgtccgaaacatcagttataagtatcgggaagatttgagcgctcatctcatggttgctgggtgggaccagcgagagggagggcaggtatacggaaccctgggaggaatgcttactcgacaacccttcgcaatcgggggttccggctcgacgtttatctacggatacgtggacgcagcttacaagccggggatgagcccagaggagtgtcgaagattcacgacagatgccacgagcacaaaaagacgggtgtgtggctacttcctgcgcacccagaaacgcgagaaccagaatcaacgggtgcatgaatacatgtgcacaggggagcgctctctctcttcttcccctctgctcagctgttcctag

SEQ ID NO: 343631 - DNA, 537 bp, Artificial Sequence
  derived and/or modified sequence
atgctgcgggccggcgcccccaccggcgacctgccccgggccggcgaggttcatactggcaccactattatggctgtggagtttgatggtggcgttgttatgggctccgatagcagggtaagcgcgggcatcgagttggaggagccaccactggtgttggcggccgcaaatgtcgtgcggaacatctcgtataagtacagggaagacctgagtgcacacctgatggtggctggatgggaccaacgggagggtggacaagtctacgggactcttgggggcatgttgacgcgccaaccatttgccatcggaggcagcgggtcaaccttcatttacggttatgtcgacgccgcctacaagcctggaatgtctcctgaagaatgtcgcagatttacaactgatgccacgtctaccaaacgcagggtgtgcggctacttcttgagaacccagaagcgcgaaaaccaaaaccaacgagtgcatgaatatatgtgtaccggagagcgcagtctttccagtagtcccctcttgtcatgctcctag

SEQ ID NO: 343632 - DNA, 537 bp, Artificial Sequence
  derived and/or modified sequence
atgctgcgggccggcgcccccaccggcgacctgccccgggccggcgaggtccacactggaacaacaataatggcggtagagtttgatggaggcgtggtgatggggagcgactcaagggtatcagccgggattgaactggaggagccaccgctagtgctggcggctgccaatgtggtgcggaacataagctacaaatatagagaagacctgtcagcacacctgatggtagctggctgggaccaacgtgagggggggcaggtctatggcacattgggcggtatgcttactaggcagccattcgcaatcggagggtcggggtccacatttatttacgggtatgtggatgctgcgtataaacccggcatgagccctgaggaatgccgcagatttaccaccgatgctacctccacaaagaggcgcgtatgtggatacttcctgagaacacagaagagggagaatcaaaaccaacgcgtgcacgaatatatgtgcacctccgaacggtcactctcatcaagtcctctgctaagctgttcgtag

SEQ ID NO: 343633 - DNA, 537 bp, Artificial Sequence
  derived and/or modified sequence
atgctgcgggccggcgcccccaccggcgacctgccccgggccggcgaggttcatactggtacaactatcatggcagttgaatttgacggcggtgtagttatgggaagcgactccagagtgtcggccgggattgagcttgaggaacctcctctggtgctggctgcagctaacgtggtccggaatatatcctacaagtaccgagaagacctctccgcacacctgatggttgcagggtgggatcagcgggagggcggacaggtgtacggaactctgggcggcatgctaacaaggcagccctttgccatcggcggaagcggctcaactttcatctacggttacgtggatgcggcttacaaacctggcatgtctcccgaagaatgccggaggtttactacagacgccacatctactaaacggcgagtatgtggatactttctacgcacacagaaacgcgagaatcagaaccagagagtgcacgagtacatgtgtacttctgagcgtagcttgtcctccagtccactgctgagctgctcatag

SEQ ID NO: 343634 - DNA, 537 bp, Artificial Sequence
  derived and/or modified sequence
atgctgcgggccggcgcccccaccggcgacctgccccgggccggcgaggtgcacaccggaacaaccattatggcagtggagttcgacggtggcgtagttatgggatctgacagccgggtgtccgcagggatagaactggaggaaccaccacttgtgcttgccgctgctaacgttgtcaggaatatttcttacaagtatcgggaggatctgtctgcccaccttatggtagcaggctgggatcaaagggaaggaggccaagtgtacggcactctgggagggatgttgacccgacaaccctttgccatcggcggctccggatctacgttcatctatgggtatgttgacgcagcatacaaacctggaatgagtcctgaagagtgccgacggttcaccaccgatgctacctcgaccaaacggagagtgtgtggctatttcctcagaacacagaagcgcgagaaccagaaccagcgggttcacgaatacatgtgtacgtcagagagaagcttgtcatcaagtcctctcctaagttgtagctag

SEQ ID NO: 343635 - DNA, 537 bp, Artificial Sequence
  derived and/or modified sequence
atgctgcgggccggcgcccccaccggcgacctgccccgggccggcgaggtgcatactgggaccaccattatggccgtcgaatttgatggcggtgtcgtgatgggctcggattctagggtgtccgccggtattgagctcgaagaaccccctctggtgcttgctgcggcaaatgtggtgaggaacatttcttacaaatacagggaggatttgtcagcccatctcatggtggctggctgggaccagcgcgagggtgggcaggtctatggaactctcgggggaatgctaacgcggcaaccttttgccattggcgggtcaggtagtacatttatctatggatatgtcgacgctgcttataagcctggtatgagccccgaagagtgcagacgctttactaccgacgctacctcaactaagcggcgagtctgtggttactttctcagaacgcagaagcgagaaaatcagaatcagagagtacacgaatacatgtgtactggcgagagatccctgagctcgtcccccctgctgtcctgttcctag

SEQ ID NO: 343636 - DNA, 537 bp, Artificial Sequence
  derived and/or modified sequence
atgctgcgggccggcgcccccaccggcgacctgccccgggccggcgaggtgcacacaggaacaacgattatggcggtcgagtttgacggtggggtcgttatgggttctgattccagggtgagcgctggaatagaacttgaagagccgcctttagttttagccgcagctaacgttgtgagaaacatcagctataaataccgtgaagatttgtctgcacacctcatggtcgcagggtgggaccagagggagggtggccaggtctacggtacactgggcggcatgctgacacgccagccattcgccattggagggagcgggtcgacttttatctatggttatgtagacgccgcctataagcctggaatgagcccggaagagtgccgcaggttcacaactgatgccactagcaccaagcggcgagtgtgtggttacttcttaaggacccagaaaagggaaaaccagaaccaaagagtgcacgagtatatgtgtaccggcgaaagaagtctttcctcttctcctctgctgtcatgctcatag

SEQ ID NO: 343637 - DNA, 465 bp, Artificial Sequence
  derived and/or modified sequence
atgctgcgggccggcgcccccaccggcgacctgccccgggccggcgaggtacacaccggaaccactattatggcagtcgaatttgacggcggcgtggtgatgggaagtgattccagggtgagcgccggtatcgagctggaggagcctccgcttgtcctggctgctgcaaacgtggttcggaacatctcatacaaataccgagaggatttatctgctcacttaatggtcgctgggtgggatcaaagggaaggaggccaagtctacggaacgctgggcgggatgctgacacgtcagccctttgctatcggtggttccggaagcactttcatctacggatacgtggatgccgcctacaaaccagggatgtccccggaggagtgcagacgcttcaccaccgatgggaaccagccgagcggaagagtgccaggagaggggtttgaaacttgggaagggagtcgcctgtag

SEQ ID NO: 343638 - DNA, 465 bp, Artificial Sequence
  derived and/or modified sequence
atgctgcgggccggcgcccccaccggcgacctgccccgggccggcgaggtccatacaggaacaaccattatggccgtagagttcgatggcggcgtagttatgggctcagacagccgggtgtctgcaggaattgaactcgaggagccacccctcgtgttggccgcagctaatgtggtgaggaacatctcttacaagtaccgtgaggatctgtcggcacacttaatggtggccgggtgggaccagagagagggaggccaagtgtatggtacgctaggcggcatgcttacgagacaacccttcgcgatcggcggtagcggtagcacctttatctacggttacgtggacgccgcctacaagcccggcatgagccctgaggaatgtagacgttttacaaccgacggaaatcaacccagcggaagggttccaggtgaggggttcgagacctgggagggatctaggttgtag

SEQ ID NO: 343639 - DNA, 465 bp, Artificial Sequence
  derived and/or modified sequence
atgctgcgggccggcgcccccaccggcgacctgccccgggccggcgaggtccacacagggacaaccatcatggctgtggagtttgatggcggagtagtgatgggatcagacagccgggtatcagccgggattgaactcgaggaacctccccttgtccttgccgcagctaacgtagttagaaatatttcctataagtaccgagaggacttaagtgcacatttgatggtggcagggtgggatcagcgcgagggcgggcaagtttatgggaccctggggggcatgctgacaaggcagcctttcgcaatcggaggatctggcagcaccttcatctacggttacgttgacgccgcatacaagcccggcatgagtcctgaagaatgcaggcgcttcacaaccgacggcaatcagccatctggtagagtgccaggtgagggctttgaaacatgggagggaagccggctgtag

SEQ ID NO: 343640 - DNA, 465 bp, Artificial Sequence
  derived and/or modified sequence
atgctgcgggccggcgcccccaccggcgacctgccccgggccggcgaagtgcatacaggaactactatcatggctgtagaatttgatggcggagtagttatgggcagcgattctcgagtatccgctggtattgagttggaagaacccccattggttcttgctgccgcgaacgtggtgcgaaatatcagctataaatatagggaagacctctcagcccatctgatggttgccggttgggaccagcgagaaggcggacaggtatacggcactttgggtgggatgctgacccgccagccattcgctatcgggggtagtggcagcacatttatatacggctacgtggacgcagcatacaaacccgggatgtctcccgaagagtgtcggaggttcactacggacggcaaccagccatcagggagggtgcccggagaaggatttgaaacatgggaaggttccagactctag

SEQ ID NO: 343641 - DNA, 465 bp, Artificial Sequence
  derived and/or modified sequence
atgctgcgggccggcgcccccaccggcgacctgccccgggccggcgaggtgcacaccggcactacgataatggctgtcgaattcgatggcggagtagtcatgggatcagacagtcgggtgtccgcaggcattgaactggaagaaccaccgcttgtgctggccgctgcaaacgttgtccgcaacatctcgtacaagtatagggaggacctgagcgctcatttgatggtagcaggttgggatcagcgagagggaggccaggtatatgggaccctgggggggatgctgactaggcaaccgtttgcaataggcggaagcggctcaactttcatttacggttatgtggatgctgcctacaaacccgggatgagtcctgaagaatgccgccggtttaccacggacggcaaccagccaagcggtcgggtgccaggagaaggattcgaaacttgggaaggcagtcggctgtag

SEQ ID NO: 343642 - DNA, 465 bp, Artificial Sequence
  derived and/or modified sequence
atgctgcgggccggcgcccccaccggcgacctgccccgggccggcgaggtgcacaccggcaccactataatggccgtggagtttgatggcggcgtggtcatgggatcggactcgagagtgtcagccggcatagaattggaggagcctcccctcgtacttgctgcagcaaatgtggtgcggaacataagttataaatatcgtgaggacctctctgcccatttaatggtagccgggtgggaccagcgggaagggggccaggtgtatgggactttggggggtatgctgactagacagccattcgcgattggtggaagtggaagcacattcatctacggctacgtggacgccgcctacaagccagggatgagccctgaagaatgtaggcggtttaccaccgatggaaatcagcccagcgggcgggtacccggagagggcttcgagacatgggagggtagccgtctctag

SEQ ID NO: 343643 - DNA, 465 bp, Artificial Sequence
  derived and/or modified sequence
atgctgcgggccggcgcccccaccggcgacctgccccgggccggcgaggtccacactggaaccacaatcatggccgtggaattcgatgggggggtggtgatgggcagtgacagccgggtctccgccggtatcgaactcgaagagccaccactggtcctggccgcagctaacgtcgtaaggaatatctcttacaagtaccgcgaagacctgtccgcgcatttaatggttgcgggttgggaccagcgggaaggcggtcaggtgtatggaaccctgggaggcatgctcacacgccaaccttttgcgattgggggatcgggctcaacgtttatctacggttatgtggatgccgcttataagcccggcatgtccccggaagaatgccgtcggtttactactgacggcaatcagccgtccggccgtgtacccggggagggctttgagacttgggaggggtcccgactgtag

SEQ ID NO: 343644 - DNA, 465 bp, Artificial Sequence
  derived and/or modified sequence
atgctgcgggccggcgcccccaccggcgacctgccccgggccggcgaggtgcacaccgggacgacaattatggccgtggaattcgacggtggggttgtgatgggctccgactcacgcgtgagtgcaggcatcgaactggaagagcccccactggtcctggctgcagccaacgtagttcgaaacatcagctataagtatagagaggatctctcggctcaccttatggtggccggatgggaccagcgagaaggtgggcaggtgtatggcacccttggtggaatgctcactaggcagccttttgcaatcggcggttccggatcaacgtttatttacggctatgtggatgccgcatacaaacccgggatgtccccggaggaatgcagaagatttacgacggatgggaatcagccctccgggagggtccctggcgaaggatttgagacatgggaaggatccagactatag

SEQ ID NO: 343645 - DNA, 537 bp, Artificial Sequence
  derived and/or modified sequence
atgcttcgggctggtgctcccaccggcgacttacccagggcgggtgaggtccatacagggacaacaataatggctgtggagttcgacggcggagtggtgatgggaagcgattctcgtgtatcggctgggatcgaactggaagaaccgcctttggtactggccgcagcaaacgtcgtgcggaacatttcttataaatatagagaagacctgagtgctcatctgatggtggccggatgggaccaaagggagggaggtcaggtgtatggcacgttgggagggatgctaaccaggcagcctttcgccataggaggatcaggctctacatttatatacggctacgtggacgcagcttacaaacccggtatgtctcccgaggagtgtagaaggttcaccacggacgctacttcgacaaagcgaagggtctgtgggtatttcctgaggacccagaagcgcgagaatcaaaaccagagggtccacgagtacatgtgtacaggggagagaagtttaagttctagccccctgctgtcctgctcctag

SEQ ID NO: 343646 - DNA, 537 bp, Artificial Sequence
  derived and/or modified sequence
atgttacgtgccggtgcccctactggagacctccctagagctggagaggtccacaccggcaccactataatggcagtcgagtttgacggtggagtggtaatgggctcagatagcagggtcagcgcaggaattgaattggaggagcctcccctggtcttggcagctgctaatgtagtaaggaacatcagctataaatatagagaggacctaagcgcccacttgatggtcgctggctgggatcaacgggaagggggtcaggtctacgggaccctgggaggaatgctgactcggcagccgtttgcaatcgggggttcaggctccactttcatttatggttacgtggacgctgcttacaagcctggcatgtcccccgaggaatgtaggcgcttcacaacagatgctacttctaccaagcgtagagtctgtggatatttcctgcgcacacagaaaagagaaaatcagaaccaacgcgtgcacgagtacatgtgtaccggggaacgctctctgagttctagtcctctgttgtcttgttcttag

SEQ ID NO: 343647 - DNA, 537 bp, Artificial Sequence
  derived and/or modified sequence
atgctcagagccggagcccctaccggcgatctgccacgtgcgggagaggtgcacaccggtaccactataatggctgtagaattcgacgggggagtggtcatgggctctgactccagggtcagtgccggtattgagttggaggaaccacctttagtactggccgctgccaatgttgttcggaatataagttacaagtatcgcgaagacctcagtgctcaccttatggttgccggatgggatcagcgggagggtggccaagtctatggaaccctcggtggcatgcttacaagacagccattcgctatcggcggaagcggatccacattcatatacggatatgtcgatgctgcatataagcctgggatgtcccccgaggaatgccgccgtttcactacagatgcaacgtccacaaagcgaagggtctgcggctacttcctgaggacccagaaacgtgagaaccagaaccaacgggttcacgaatatatgtgtaccggcgaaagatcactttcttctagcccgctcctttcctgctcatag

SEQ ID NO: 343648 - DNA, 537 bp, Artificial Sequence
  derived and/or modified sequence
atgttaagagcaggcgcacccacaggcgatctgcccagggccggagaggtgcacactgggactacgattatggcagttgagtttgatggaggggtagttatgggatctgactctcgggtgtctgcaggcattgagcttgaagaaccccctcttgtgctcgcagccgctaatgtggtacgaaacatcagttacaagtatcgagaagatttgtcagctcacctcatggtggccggatgggatcagcgagagggaggacaggtatacggtactcttggcggaatgctcacgagacagcctttcgcaatcggtggctcggggtctacctttatttacggttacgtggacgcggcatacaagccaggcatgagtccagaggagtgcagaagatttaccacagacgccacatctacgaagcgccgagtgtgtggctattttcttaggacgcagaaaagggagaaccagaatcaaagggtgcatgagtatatgtgcacttctgagcgctcactgtcttcctcccctttactgtcatgttcctag

SEQ ID NO: 343649 - DNA, 537 bp, Artificial Sequence
  derived and/or modified sequence
atgttgagagcgggtgctccgaccggagatcttccaagggctggtgaagttcataccggtacaactattatggcagtcgaatttgatgggggagtggtgatgggatcagatagccgggttagcgccggtattgagcttgaagagccccctctggtgttagcggctgccaatgtggtgcgcaacattagctacaagtacagggaagacctgtcagcccatctgatggtggctgggtgggatcaacgcgagggagggcaggtttatggaaccttgggcggaatgcttacccggcaacccttcgctatcggaggttcaggttctacattcatctacggttacgtggacgccgcatacaaacctgggatgagccccgaagaatgtagaaggttcactaccgacgcaacctctaccaaaaggagggtctgtggatatttcctgagaacccagaaacgagagaatcagaatcagcgcgtgcacgagtatatgtgtacatcggaaaggtctttgtcctcatcacctttactaagctgctcctag

SEQ ID NO: 343650 - DNA, 537 bp, Artificial Sequence
  derived and/or modified sequence
atgttaagggcaggtgcccctacaggggatctccctagggcgggagaggtacacaccggaaccaccatcatggcagtcgaattcgacgggggagtggtgatggggtcagattcccgggtctcagccggtatcgagcttgaagagccccctttggtcttggctgccgctaacgtggtcagaaatatcagctacaaataccgcgaggacctcagtgcccatctcatggtcgccggatgggaccagagagaaggaggtcaggtatacgggaccctcggtgggatgctgacacggcagccgttcgcaatcgggggtagcggctccacatttatctatggatacgtggatgctgcttacaagcctgggatgtcacctgaggagtgtcggagattcacgacagacgctacaagcaccaaacgaagggtgtgtgggtactttttgcgaacccagaaacgtgagaatcaaaatcagcgcgtccatgagtatatgtgtacaagcgagaggtctttgagtagtagtcctttgctcagctgttcttag

SEQ ID NO: 343651 - DNA, 537 bp, Artificial Sequence
  derived and/or modified sequence
atgctcagggctggggcacccaccggcgacctccctcgggcaggagaggttcacaccggcactaccattatggctgtcgagttcgatggcggtgtggtcatgggaagtgatagtagagtatccgccggtatcgagcttgaggagcctcccctggtgctagctgccgctaatgtggtccgtaacatttcctataagtacagagaagacctcagcgcccaccttatggtcgccggttgggatcaaagggaggggggtcaggtctacggcacactagggggaatgttgacaagacagccattcgctatcggaggctctggctccactttcatctatggctatgtggacgccgcatataaaccgggaatgtcccctgaagaatgcaggcggtttaccacggatgcaaccagtacaaaacggcgagtctgcggctacttcctgcgcactcagaagcgggagaaccagaatcagcgcgtgcatgaatacatgtgcaccggcgaacgatctctgtccagttctccattgctgagctgctcttag

SEQ ID NO: 343652 - DNA, 537 bp, Artificial Sequence
  derived and/or modified sequence
atgttgagagcaggtgcacctacaggtgatctgcccagggctggagaggtacacactggtacaacaattatggccgtcgagtttgacggaggcgtggttatgggatcagactcaagagtgtcagcaggcatcgagctggaagaacccccactcgtgctggcagctgctaacgtggtacggaacatttcttataaatacagagaggatctaagcgctcacctgatggtagctggatgggatcagcgtgaaggaggtcaggtgtatggaaccctagggggtatgctgactcgtcagccgttcgctatcggcggatcagggtccacctttatttatggctacgtggatgccgcatataaacctggcatgtctcccgaggagtgtcgacggtttacaacggacgcgacaagtaccaagcggcgtgtttgcggctattttcttagaacccagaagcgggaaaatcagaatcagagagtccatgaatacatgtgcaccggggagcgatccttgagttcaagccccttgctgagttgctcttag

SEQ ID NO: 343653 - DNA, 465 bp, Artificial Sequence
  derived and/or modified sequence
atgcttagagccggtgctccgacaggggatctgcctagggctggagaggtacacactggaaccactattatggcggtcgagtttgatggtggtgtggtgatgggatccgactctcgtgtgagcgcgggtatcgagctggaggagccaccgcttgtcctggcagcagctaatgtggtgcgtaacatttcctacaagtatagggaggacctgtctgctcatctcatggtcgccggatgggaccagcgagagggtggtcaggtgtacggtactctgggcggaatgctgactaggcaaccattcgccatcgggggtagtggctcaacctttatctacgggtacgtcgatgcggcttataaaccgggtatgagtcctgaagaatgcaggcgattcactaccgacggaaaccagccgagtggacgagtccctggcgaaggttttgaaacgtgggaggggtcccggctgtag

SEQ ID NO: 343654 - DNA, 465 bp, Artificial Sequence
  derived and/or modified sequence
atgctgagggctggggcaccaactggagacctgccccgtgccggtgaagtccataccggcacaacaattatggctgtggaatttgatgggggtgtggtaatgggctctgactctcgggtgtccgcaggcatcgagctggaagagcccccactcgtgctggcagccgcaaacgtcgtgagaaacatttcctacaagtaccgcgaagatctgtctgcccacttaatggtagcaggctgggaccagagagagggcggacaggtgtacggtaccctgggcggtatgctcaccaggcagccttttgccattggtggcagtggatctacctttatttacggatatgtggatgctgcttacaaaccagggatgagtcctgaagaatgcagaagattcaccactgatgggaatcagccaagcggcagagtgccaggcgaagggttcgagacttgggagggctcccggctgtag

SEQ ID NO: 343655 - DNA, 465 bp, Artificial Sequence
  derived and/or modified sequence
atgctgcgggctggtgcacctacgggagacctgcctagggccggagaagtccataccggtacaactataatggctgtcgagtttgatggcggagtggtgatgggctctgattccagggttagcgcgggaattgagcttgaggaaccccctctcgtcttagcggctgctaacgtcgtgaggaatatttcttataaataccgggaggatctgtctgcccacctcatggttgccggatgggaccaaagggaaggaggacaagtgtacggtacccttggtggcatgttaacacgtcagccattcgccattggagggtctggttctactttcatctacggctacgttgatgctgcatataaacctggtatgagccccgaggaatgcaggcgattcacaacggacggaaaccagccctctggcagagttcctggagagggctttgaaacgtgggagggctcccgattgtag

SEQ ID NO: 343656 - DNA, 465 bp, Artificial Sequence
  derived and/or modified sequence
atgcttcgcgcaggagcaccaacgggagatcttcctagggccggtgaggtccacacaggtaccactatcatggctgtcgagtttgacggcggagtagtaatggggagcgattccagggtaagtgccggaatagagctggaagaaccaccactcgttctggcggcagccaatgttgttaggaatatttcatataagtaccgggaggatctgtctgcccacttgatggtggcaggctgggaccagcgggagggaggtcaagtgtatggcaccttaggtggtatgctgacccggcaaccctttgccatagggggttccggcagcactttcatttacgggtacgttgatgctgcttataagccgggaatgagccctgaggagtgtcgccgattcaccacagatggcaaccaaccctcaggcagggtgccaggtgaggggttcgaaacctgggagggatctagactgtag

SEQ ID NO: 343657 - DNA, 465 bp, Artificial Sequence
  derived and/or modified sequence
atgctgagagccggtgcaccaaccggcgatctcccacgggctggtgaagtgcacacgggcactacaatcatggctgtggaatttgatgggggagtcgtgatggggtcagatagccgggtaagtgcgggaatagagctcgaggaacctccactcgtcctggccgctgcaaacgttgtgcgcaatatttcatacaagtatagagaggacctctctgctcaccttatggtggcaggatgggaccagcgggaagggggacaggtctacggcacgcttggtggaatgctgacacggcaaccatttgccattggcggaagcgggagtacatttatatatgggtacgtggacgccgcttacaaacccggaatgtcccccgaggaatgccgaaggtttacaacagatggtaatcagcctagtggacgggtgcctggcgaaggttttgagacctgggagggctctcggctttag

SEQ ID NO: 343658 - DNA, 465 bp, Artificial Sequence
  derived and/or modified sequence
atgcttcgggcaggcgctcctacaggtgatctccctcgcgcaggcgaggtccacaccggtaccacgattatggccgtggagttcgatgggggagtcgtgatgggctccgactcaagagtcagtgccggaatcgagctggaagagcctcccctggtgctggccgctgcaaatgtagtgcgaaatatcagctataaataccgcgaggacctgagtgcacatctcatggtggccggttgggaccagcgcgaaggaggccaggtttacggcacacttgggggtatgcttacgcgtcagccgttcgcaattgggggtagtggatcgacgttcatctacgggtatgtggatgcggcatataaacccggaatgtctccagaagaatgcagacggttcaccacagacggtaatcagcccagcggacgcgtccctggtgaagggttcgagacttgggagggctcaaggctgtag

SEQ ID NO: 343659 - DNA, 465 bp, Artificial Sequence
  derived and/or modified sequence
atgctgcgggctggagctcctaccggcgacttaccaagagctggagaagtgcacactggaaccactatcatggcagtcgagttcgatgggggtgtggtgatgggatcagatagcagagtgagcgccggaatcgaattggaggagccccctttggtgctggccgcagccaatgtggtgcgcaatattagctacaagtaccgagaagatctcagtgctcacctgatggtagcgggttgggatcagagggagggcggacaggtgtacgggactctgggtggcatgctgactcgccagccattcgccatcggtggttctggatctacattcatttacggttatgtagacgcggcatataaaccaggtatgagccctgaggagtgtcgcaggttcaccaccgacggcaaccaaccgtccggaagagtgccaggggagggttttgagacatgggaaggatcccggttgtag

SEQ ID NO: 343660 - DNA, 465 bp, Artificial Sequence
  derived and/or modified sequence
atgttacgggctggcgcaccaaccggagatctacccagagctggcgaggtgcacacaggtacaactatcatggcagtcgaattcgatggaggtgtggtgatggggagcgattcccgcgtcagcgccggtattgaactggaggaacctcctctcgtcctggcagcggctaacgtggtacggaacataagctacaaataccgcgaggacctgagcgcacatctgatggtggccggatgggatcagcgggagggtggccaggtgtatggaacccttgggggaatgttaacacggcaacccttcgcaatcggcggaagtggcagcacgttcatttacgggtacgttgacgcagcatacaagcctggaatgtcaccagaggaatgtcggaggtttaccacagacggaaaccagcctagtggtcgagtgcctggcgaaggctttgagacgtgggagggttcacgcctatag

SEQ ID NO: 343661 - DNA, 640 bp, Artificial Sequence
  derived and/or modified sequence
ggatgctgcgggcgggagcaccaaccggggacttaccccgggcgggagaagtccacaccgggaccaccatcatggcagtggagtttgacgggggcgttgtgatgggttctgattcccgagtgtctgcagggatagaactggaggaacctccacttgttttggctgctgcaaatgtggtgagaaatatcagctataaatatcgagaggacttgtctgcacatctcatggtagctggctgggaccaacgtgaaggaggtcaggtatatggaaccctgggaggaatgctgactcgacagccttttgccattggtggctccggcagcacctttatctatggttatgtggatgcagcatataagccaggcatgtctcccgaggagtgcaggcgcttcaccacagacgctacttctactaaaagaagagtatgtggatactttctaagaactcaaaaacgagaaaaccaaaatcagagggtgcatgaatatatgtgcacaggtgagaggtcactatcctcctctccactgctttcttgttcctgaacctgatactttggctccaagccttcagcagcagctaagttcttagccaagctatctgttgccatagcttcagtggtttctgtatcactacatgcatcttc

SEQ ID NO: 343662 - DNA, 661 bp, Artificial Sequence
  derived and/or modified sequence
cgaggagagcggtgccttgcagggatgctgcgggcgggagcaccaaccggggacttaccccgggcgggagaagtccacaccgggaccaccatcatggcagtggagtttgacgggggcgttgtgatgggttctgattcccgagtgtctgcagggatagaactggaggaacctccacttgttttggctgctgcaaatgtggtgagaaatatcagctataaatatcgagaggacttgtctgcacatctcatggtagctggctgggaccaacgtgaaggaggtcaggtatatggaaccctgggaggaatgctgactcgacagccttttgccattggtggctccggcagcacctttatctatggttatgtggatgcagcatataagccaggcatgtctcccgaggagtgcaggcgcttcaccacagacgctacttctactaaaagaagagtatgtggatactttctaagaactcaaaaacgagaaaaccaaaatcagagggtgcatgaatatatgtgcacaagtgagaggtcactatcctcctctccactgctttcttgttcctgaacctgatactttggctccaagccttcagcagcagctaagttcttagcaagctatctgttgccatagcttcagtggtttctgtatcactacatgcatcttc

SEQ ID NO: 343663 - DNA, 673 bp, Artificial Sequence
  derived and/or modified sequence
cgaggagagcggtgccttgcagggatgctgcgggcgggagcaccaaccggggacttaccccgggcgggagaagtccacaccgggaccaccatcatggcagtggagtttgacgggggcgttgtgatgggttctgattcccgagtgtctgcagggatagaactggaggaacctccacttgttttggctgctgcaaatgtggtgagaaatatcagctataaatatcgagaggacttgtctgcacatctcatggtagctggctgggaccaacgtgaaggaggtcaggtatatggaaccctgggaggaatgctgactcgacagccttttgccattggtggctccggcagcacctttatctatggttatgtggatgcagcatataagccaggcatgtctcccgaggagtgcaggcgcttcaccacagacgctacttctactaaaagaagagtatgtggatactttctaagaactcaaaaacgagaaaaccaaaatcagagggtgcatgaatatatgtgcacaagtgagaggtcactatcctcctctccactgctttcttgttcctgaacctgatactttggctccaagccttcagcagcagctaagttcttagcaagctatctgttgccatagcttcagtggtttctgtatcactacatgcatcttcatcatcacccat

SEQ ID NO: 343664 - DNA, 534 bp, Artificial Sequence
  derived and/or modified sequence
gcgcgttgtgcgctgtcccaggttggaaaccagtgccccaggcggcgaggagagcggtgccttgcagggatgctgcgggcgggagcaccaaccggggacttaccccgggcgggagaagtccacaccgggaccaccatcatggcagtggagtttgacgggggcgttgtgatgggttctgattcccgagtgtctgcagggatagaactggaggaacctccacttgttttggctgctgcaaatgtggtgagaaatatcagctataaatatcgagaggacttgtctgcacatctcatggtagctggctgggaccaacgtgaaggaggtcaggtatatggaaccctgggaggaatgctgactcgacagccttttgccattggtggctccggcagcacctttatctatggttatgtggatgcagcatataagccaggcatgtctcccgaggagtgcaggcgcttcaccacagacggtaaccagccaagtggaagggtacctggggagggctttgaaacatgggaaggaagtagattatga

SEQ ID NO: 343665 - DNA, 1089 bp, Artificial Sequence
  derived and/or modified sequence
gctgcgcgttgtgcgctgtcccaggttggaaaccagtgccccaggcggcgaggagagcggtgccttgcagggatgctgcgggcgggagcaccaaccggggacttaccccgggcgggagaagtccacaccgggaccaccatcatggcagtggagtttgacgggggcgttgtgatgggttctgattcccgagtgtctgcagggatagaactggaggaacctccacttgttttggctgctgcaaatgtggtgagaaatatcagctataaatatcgagaggacttgtctgcacatctcatggtagctggctgggaccaacgtgaaggaggtcaggtatatggaaccctgggaggaatgctgactcgacagccttttgccattggtggctccggcagcacctttatctatggttatgtggatgcagcatataagccaggcatgtctcccgaggagtgcaggcgcttcaccacagacggtaaccagccaagtggaagggtacctggggagggctttgaaacatgggaaggaagtagattatgaggaacaggaagagaaatacaggggtggccatttaagttaatgccgggcctggtacacttttaagagtgaaaaggggcaggacaaatgcaaagctcaatggggctcttgggcaatacggataaaccagggctgttctgagtaaatcaaatgaggatacacagtcactgtgagaaccagtggtgtgctaagcacagtggctcacacctgtaatgccaacaatttgggaggctgaggcaggaggattacttgagcccaggagtttgaggccagcctaggcaagatggtgaaaccctgtctccacaaaaaacaataaaaaaaagtaaaaaaaaaatgaactgggcatagtggtgcacacctgtagtcccagctactcaggaggctgaggtggaaagatcatctgagccggggagatcaaggctgtagtgagcggtgattgcaccactgcgctgcagcctaggtgacagagagagaccctgtctggagaaaaaaaaaaaaaaaaaagaaccagtggtgtgctgaggtgtgctgaggctggcttgggaccactcatga

SEQ ID NO: 343666 - DNA, 537 bp, Artificial Sequence
  derived and/or modified sequence
atgctgagagccggcgcccccaccggcgacctgcccagagccggcgaggtgcacaccggcaccaccatcatggccgtggagttcgacggcggcgtggtgatgggcagcgacagcagagtgagcgccggcatcgagctggaggagccccccctggtgctggccgccgccaacgtggtgagaaacatcagctacaagtacagagaggacctgagcgcccacctgatggtggccggctgggaccagagagagggcggccaggtgtacggcaccctgggcggcatgctgaccagacagcccttcgccatcggcggcagcggcagcaccttcatctacggctacgtggacgccgcctacaagcccggcatgagccccgaggagtgcagaagattcaccaccgacgccaccagcaccaagagaagagtgtgcggctacttcctgagaacccagaagagagagaaccagaaccagagagtgcacgagtacatgtgcaccggcgagagaagcctgagcagcagccccctgctgagctgcagctag

SEQ ID NO: 343667 - DNA, 537 bp, Artificial Sequence
  derived and/or modified sequence
atgctgagagccggcgcccccaccggcgacctgcccagagccggcgaggtgcacaccggcaccaccatcatggccgtggagttcgacggcggcgtggtgatgggcagcgacagcagagtgagcgccggcatcgagctggaggagccccccctggtgctggccgccgccaacgtggtgagaaacatcagctacaagtacagagaggacctgagcgcccacctgatggtggccggctgggaccagagagagggcggccaggtgtacggcaccctgggcggcatgctgaccagacagcccttcgccatcggcggcagcggcagcaccttcatctacggctacgtggacgccgcctacaagcccggcatgagccccgaggagtgcagaagattcaccaccgacgccaccagcaccaagagaagagtgtgcggctacttcctgagaacccagaagagagagaaccagaaccagagagtgcacgagtacatgtgcaccagcgagagaagcctgagcagcagccccctgctgagctgcagctag

SEQ ID NO: 343668 - DNA, 465 bp, Artificial Sequence
  derived and/or modified sequence
atgctgagagccggcgcccccaccggcgacctgcccagagccggcgaggtgcacaccggcaccaccatcatggccgtggagttcgacggcggcgtggtgatgggcagcgacagcagagtgagcgccggcatcgagctggaggagccccccctggtgctggccgccgccaacgtggtgagaaacatcagctacaagtacagagaggacctgagcgcccacctgatggtggccggctgggaccagagagagggcggccaggtgtacggcaccctgggcggcatgctgaccagacagcccttcgccatcggcggcagcggcagcaccttcatctacggctacgtggacgccgcctacaagcccggcatgagccccgaggagtgcagaagattcaccaccgacggcaaccagcccagcggcagagtgcccggcgagggcttcgagacctgggagggcagcagactgtag

SEQ ID NO: 343669 - protein, 225 aa, Artificial Sequence
  derived and/or modified sequence
MPGTQTPAPAEDPHSGCRDPVPARPQACHPKSQETRFEGPLPPPPPAAAAPPPPAPAQTAQAPGFVVPTHAGTVGTLPLGGYVAPGYPLQLQPCTAYVPVYPVGTPYAGGTPGGTGVTSTLPPPPQGPGLALLEPRRPPHDYMPIAVLTTICCFWPTGIIAIFKAVQVRTALARGDMVSAEIASREARNFSFISLAVGIAAMVLCTILTVVIIIAAQHHENYWDP

SEQ ID NO: 343670 - protein, 63 aa, Artificial Sequence
  derived and/or modified sequence
MPGTQTPAPAEDPHSGCRDPVPARPQACHPKSQETRFEGPLPPPPPAAAAPPPPAPAQTAQAP

SEQ ID NO: 343671 - DNA, 678 bp, Artificial Sequence
  derived and/or modified sequence
atgcccggcacccagacccccgcccccgccgaggacccccacagcggctgcagagaccccgtgcccgccagaccccaggcctgccaccccaagagccaggagaccagattcgagggccccctgcccccccccccccccgccgccgccgccccccccccccccgcccccgcccagaccgcccaggcccccggcttcgtggtgcccacccacgccggcaccgtgggcaccctgcccctgggcggctacgtggcccccggctaccccctgcagctgcagccctgcaccgcctacgtgcccgtgtaccccgtgggcaccccctacgccggcggcacccccggcggcaccggcgtgaccagcaccctgcccccccccccccagggccccggcctggccctgctggagcccagaagacccccccacgactacatgcccatcgccgtgctgaccaccatctgctgcttctggcccaccggcatcatcgccatcttcaaggccgtgcaggtgagaaccgccctggccagaggcgacatggtgagcgccgagatcgccagcagagaggccagaaacttcagcttcatcagcctggccgtgggcatcgccgccatggtgctgtgcaccatcctgaccgtggtgatcatcatcgccgcccagcaccacgagaactactgggacccctag

SEQ ID NO: 343672 - DNA, 192 bp, Artificial Sequence
  derived and/or modified sequence
atgcccggcacccagacccccgcccccgccgaggacccccacagcggctgcagagaccccgtgcccgccagaccccaggcctgccaccccaagagccaggagaccagattcgagggccccctgcccccccccccccccgccgccgccgccccccccccccccgcccccgcccagaccgcccaggccccctag

SEQ ID NO: 343673 - DNA, 678 bp, Artificial Sequence
  derived and/or modified sequence
atgcccggaacacaaactcccgcacccgctgaagatccacactccggctgccgagatcctgtgccagcccgccctcaggcatgtcacccgaaaagccaggagacccggttcgaaggtccactcccacctccccctcctgcagccgccgctccaccgccacccgctcccgcccagaccgcccaggcgccaggtttcgttgtgcctactcacgccgggacggtggggactctgcccctcggcgggtatgttgctccagggtacccactgcaactgcagccatgtacagcatatgtccctgtgtaccctgtgggaactccttacgctggagggacgcctggtggcaccggcgtcacaagcacactgccacctcctccacagggcccgggcctcgcactcttggaacctagacgccctccccatgactacatgccaattgcagtcctgaccacaatctgctgtttctggcctaccggaattatcgctatcttcaaggctgtgcaggtgcgaaccgccttagccagaggagacatggtgagtgcagagatcgcctctagagaagccaggaattttagctttatatcgcttgctgtggggattgccgctatggtgctctgtaccatactgaccgtggtcatcatcatcgctgctcagcaccatgagaactactgggacccatag

SEQ ID NO: 343674 - DNA, 678 bp, Artificial Sequence
  derived and/or modified sequence
atgccgggaacccagacccccgcccccgcagaggatccccatagcggatgcagagatcctgtgccagcacgtcctcaggcttgccaccccaaaagccaggagactagatttgaagggcctttgccacccccaccgccagctgctgccgctcctccaccccctgcccccgcccagaccgcgcaggcccctgggttcgtcgtgccaacccatgcaggcaccgtcggcacactccctctcggggggtatgtggctcctggataccctcttcaactgcagccatgcacagcctatgtgcctgtgtaccccgtgggtactccatatgcaggggggactccgggcgggaccggggtgactagtacactcccaccgccacctcagggtccggggttggcgctcctagagcctaggaggcccccccacgactatatgccgattgccgtgctgaccaccatatgttgcttttggcccaccgggattattgccatcttcaaggcagtgcaggtccgcaccgcactcgccagaggcgacatggtaagcgcagagatcgcatctcgagaggcacgcaatttctcctttatttcactagctgtcggtattgctgccatggtcctttgtactatcctcacagtcgtaatcattatcgctgcccaacatcatgagaactactgggacccttag

SEQ ID NO: 343675 - DNA, 678 bp, Artificial Sequence
  derived and/or modified sequence
atgcctggtactcagacaccagcccctgctgaggacccacattctggctgtagggatcctgtgcccgccagaccccaggcatgccaccccaagtctcaggaaacgcggtttgaaggccccctaccaccccctcccccagccgcagccgccccgcccccgcctgcacctgcccagacagcccaggccccgggatttgtggtgcccacccatgctggtactgtgggtacacttcctttaggtggttacgttgcccccggctaccccctacagcttcaaccatgtacagcttatgtgcccgtctaccccgtgggaacgccttatgctggcggaacccctggcgggacaggagtcacttccactcttcccccacctccgcagggacccggattggcgttattggagccccggagacctccccacgattatatgccaattgccgtgcttaccacgatttgctgcttctggccaacgggaattattgcaatcttcaaagccgtgcaggtgaggacagccctagccagaggggatatggtgtccgccgaaattgcaagcagggaagcccgcaacttctcatttatctccctggctgtgggtatcgctgccatggtcctgtgcactattctgacagttgtcatcataattgctgcacagcatcatgaaaactactgggacccttag

SEQ ID NO: 343676 - DNA, 678 bp, Artificial Sequence
  derived and/or modified sequence
atgcctggtactcagacccccgcacccgcagaggatccccattccggctgccgcgacccagtcccggcgaggccgcaagcctgccaccctaagtcacaggaaaccagattcgagggaccactgccaccaccaccacccgcggccgccgccccacctcctccagcgcccgcccagactgctcaggccccaggttttgtggtccccacccacgctgggactgttggtactttaccactgggcggctatgttgcacccggttatccccttcaactccaaccatgcaccgcctatgtgccagtgtatcctgtcggtacgccatatgctggcggtacgccaggaggaaccggagtgacctccacattacctccaccacctcagggacctggactcgcattgctggagcctcgcagaccaccccacgattatatgccaatcgcagtgttaacaaccatttgttgtttctggcctacgggaatcatagccatttttaaggcagtgcaggtcagaacagctctggcccgcggcgatatggtgtctgccgaaattgcatcccgcgaggccaggaatttcagcttcataagcctggcggttggtatagctgccatggtgctctgtacaattctcaccgtcgtgattatcattgccgcacagcaccacgagaactattgggacccatag

SEQ ID NO: 343677 - DNA, 192 bp, Artificial Sequence
  derived and/or modified sequence
atgccaggcacccagacgcctgcacccgctgaggatccccattccggatgccgggacccagtgcctgccagaccccaggcatgccatcctaaatcccaggagaccagattcgaaggtccgctgccaccccccccacccgcggctgcggcgccccctccgcccgcaccagcacagacagctcaggccccttag

SEQ ID NO: 343678 - DNA, 192 bp, Artificial Sequence
  derived and/or modified sequence
atgccaggaacacagaccccagctcccgctgaagacccgcacagtggctgcagggatcccgtgcccgcacggccacaggcttgtcatcccaagagtcaagaaacgcgtttcgagggtccacttccccccccccccccagctgcagcagctccacctcctccagctcctgctcagacagcccaggccccatag

SEQ ID NO: 343679 - DNA, 678 bp, Artificial Sequence
  derived and/or modified sequence
atgcctggaacacagacccctgccccagcggaggatccccattccgggtgccgcgaccctgtcccagctcggccccaggcttgtcacccgaaatcacaggagacacggttcgagggcccactgccaccaccccccccggccgccgctgctcctccacctcctgcccctgcacagactgcacaagctcccgggttcgtggtacctacgcacgccggtactgtgggcacactccccctcggaggttatgtggctccaggttacccgcttcagttgcaaccttgtaccgcatacgttcccgtgtatcccgtcggcaccccttatgccggaggtacacccggggggacgggggtgacatccaccctgccgccaccaccccagggccctgggttggctctcctggagcctcgaagaccaccgcatgattatatgccaatcgctgtactcacaacaatctgttgtttctggcctaccggaatcattgccatttttaaggcagtccaggtccggaccgcattagctagaggcgatatggtttccgcagaaatcgcaagccgagaagcccggaacttttccttcatttcgttagccgttggtatagcggcaatggttctctgcaccatcctcaccgtggtgatcatcatagccgcccagcatcacgagaactattgggatccctag

SEQ ID NO: 343680 - DNA, 192 bp, Artificial Sequence
  derived and/or modified sequence
atgccagggacgcaaacacccgctcctgctgaggacccgcattctggctgtcgagaccccgtcccggcacggccacaggcgtgccacccaaaatcacaagagacccgtttcgagggcccactgccaccaccccccccagctgctgcagccccccccccccccgccccagctcagactgcccaggccccatag

SEQ ID NO: 343681 - DNA, 678 bp, Artificial Sequence
  derived and/or modified sequence
atgccaggaactcagactcccgctcctgcagaagatccacactccgggtgccgagaccctgttcccgcccgaccgcaggcatgccacccaaagtctcaagagacacgattcgagggtcccttgccacctcctcccccagctgcagccgctcctccacctcccgctccagcgcagactgctcaggcacccggattcgtggtgccaactcacgcgggaacagtgggcaccctgcctctcggaggatatgtcgctcctgggtaccctctccagctgcagccatgtaccgcctatgtgcccgtctatccagtgggtactccttacgctggcgggacacccggcggcacgggcgtgaccagcacactgccaccccctcctcaaggcccaggactcgctctgctggagcctcgcagacctccacatgactatatgcccattgctgtcttaaccaccatctgttgtttctggccgactggcatcatagctatttttaaagctgtccaggtgcgcacagctctggcacggggcgacatggtgtcagccgaaatcgcttctcgagaggcacggaatttctctttcatctctttggctgtagggatcgccgccatggtcctgtgcaccattctgactgttgtaattatcattgcagcacagcaccatgagaattactgggacccctag

SEQ ID NO: 343682 - DNA, 192 bp, Artificial Sequence
  derived and/or modified sequence
atgcctggcactcagacgccagccccagccgaggatccacactccggctgccgcgatccagtccccgcccggcctcaggcctgtcaccccaaaagtcaagagacgaggtttgaaggcccactgcctcctccaccgcctgcagccgcagctcctccgccccctgcgccagctcagactgcccaggcgccctag

SEQ ID NO: 343683 - DNA, 192 bp, Artificial Sequence
  derived and/or modified sequence
atgcctggtactcagacccctgcccccgccgaggacccgcattcagggtgtcgcgatcctgtcccggcccgtccgcaggcgtgccatccaaagtcacaagaaaccagatttgaggggcctttacccccacctcctcctgctgcggccgctcccccaccaccagccccagctcagaccgcccaagctccctag

SEQ ID NO: 343684 - DNA, 192 bp, Artificial Sequence
  derived and/or modified sequence
atgcccggaacgcagacgcccgctccggctgaagatcctcatagcggttgccgggacccagtacctgccagaccccaggcctgccacccaaaatcacaggagacaagatttgaaggccctctcccgccgcctcctccagcggctgctgcacccccgcctcccgctcctgcccagacggcccaggcgccctag

SEQ ID NO: 343685 - DNA, 678 bp, Artificial Sequence
  derived and/or modified sequence
atgccgggaacccagacgccagctccagccgaagacccccactctggatgccgtgacccagtgccagcccgccctcaggcctgccacccaaaatctcaggaaacaagatttgagggtcccctgcccccacctcctcccgccgctgcagcccctcctccacccgcacctgcccagactgcacaggcacctgggttcgtcgtaccaacccacgcaggcaccgtggggacccttccccttgggggctatgtggcccctggttacccactacagctgcagccctgcacggcttatgtgcccgtgtatcctgttggtaccccttacgcaggcgggactcctggcggaactggggtaactagcaccctgccgccaccgcctcagggaccaggactggctctcttggagcctcgaaggcctccacatgactacatgccgattgcagttctgaccaccatttgctgcttttggcctaccgggatcatagctatcttcaaagccgtccaggtgagaaccgctctcgcccgaggagatatggtgagcgcagagatcgcaagcagggaggcccggaatttctcattcataagcctggctgtgggtatcgcggctatggtactttgcacaatcctgacggtcgtgataatcatcgctgcacagcatcatgagaactattgggatccttag

SEQ ID NO: 343686 - DNA, 192 bp, Artificial Sequence
  derived and/or modified sequence
atgcctggcacacagactccagctcccgccgaagacccgcattcaggttgtcgcgacccagtccccgcacgaccacaggcatgtcaccccaaaagccaagaaacaaggttcgagggaccactacccccacctccaccagccgctgctgctcctccccctcctgccccggcacagactgcgcaggcgccttag

SEQ ID NO: 343687 - DNA, 678 bp, Artificial Sequence
  derived and/or modified sequence
atgcccggaactcagacgcctgccccagccgaggatccacactcgggttgccgggatccagttcccgcccgtccgcaggcatgtcatcccaaatctcaggagacacgctttgaaggtccgctcccacctcccccaccagccgcggccgccccacccccaccggctcccgcgcagactgcccaggcacccggcttcgtggtccccactcacgctggtaccgtcggcaccttaccccttggtggatacgtggcaccaggttaccccctgcagctgcagccatgcactgcttacgtgcccgtgtatccagtgggaactccctacgcaggaggcactcccggaggcaccggcgttacatcgaccctgcctcctcctccccaaggacccgggctggccttgctcgagccgcggaggcctccacacgactatatgccaattgctgtcctgaccactatttgctgtttttggcctacgggcataatcgcgatttttaaagcagtgcaggttcggacagccctggctcgaggcgacatggtcagtgccgagatagcaagccgcgaggcccggaatttcagctttattagcctagccgtcgggattgccgccatggtcctgtgcaccatccttaccgtcgttattataatcgccgcccagcaccatgagaattattgggatccctag

SEQ ID NO: 343688 - DNA, 678 bp, Artificial Sequence
  derived and/or modified sequence
atgcccgggacccaaacacccgccccagccgaggatccccatagtggctgtcgagatccagtgccagctcggccgcaggcctgccacccaaagtcccaggagaccagatttgagggtcctctgccccctcctccgccggccgcggccgcaccccctccacccgctcctgcccagacagcccaggccccggggtttgttgtcccaacccacgcgggcactgtcgggacactccctttgggtggatacgtcgccccgggttatcccctgcagcttcaaccatgcaccgcttacgtccctgtgtaccctgtgggaactccctacgccggcggaacaccagggggtaccggtgttacttcaactctcccccctcctccccaggggccgggtttagctttacttgagcctaggcgaccacctcatgattatatgccgatcgccgtcctcactaccatttgttgtttctggccaacagggattatcgccattttcaaggctgttcaggtgagaacagccctggcgaggggcgacatggtatctgctgaaatcgcttcgagagaagccaggaattttagtttcatcagtcttgccgtgggaattgccgctatggtcctgtgcacaatcctcaccgtggttatcattatcgcggcccagcatcatgaaaactattgggatccatag

SEQ ID NO: 343689 - DNA, 192 bp, Artificial Sequence
  derived and/or modified sequence
atgccaggaactcaaacccctgcacccgccgaagatcctcatagcggatgcagggatccagtgcccgccaggccccaggcttgtcaccccaaatcccaggaaactagatttgagggtcctctcccaccgcccccgcctgccgccgccgccccaccacccccagctcccgcacagaccgctcaggcaccttag

SEQ ID NO: 343690 - DNA, 678 bp, Artificial Sequence
  derived and/or modified sequence
atgcccggcacccagacaccggccccagcagaagatccccattcaggctgtcgagatccagtccccgcccggcctcaggcttgtcatcctaaaagccaagagactcgcttcgaaggtcccctgcccccccccccccctgccgctgcagctcccccaccccctgcccctgcccagacagcccaggctccaggatttgttgttccaacacacgctggtactgtgggcactctgcctctgggcgggtacgtcgccccgggctaccccctgcagctccagccttgcaccgcgtatgttcccgtgtaccctgtcgggaccccctatgccggcggaacaccgggaggcaccggcgtgaccagtacgcttccccctcctccacagggacctggactggctttactcgagccaagaaggcccccccatgactatatgcctattgccgtgttaaccacgatttgctgtttttggcctacaggcatcattgccatttttaaggctgtgcaggtccgtacagccctggcccgcggggatatggtgtccgccgaaatcgcatcgcgagaggctcgtaatttttctttcatctctctggctgtggggatcgccgcaatggttctttgcacaattctcactgtggttatcatcattgcagcccagcatcacgaaaattattgggatccatag

SEQ ID NO: 343691 - DNA, 678 bp, Artificial Sequence
  derived and/or modified sequence
atgcccgggacacagactccggctcctgctgaagaccctcactctgggtgtagagaccctgtcccggctcggccgcaagcctgtcaccccaaatctcaagagaccaggttcgagggccctttgccaccgccaccccccgctgccgcagcccccccaccacctgcacccgctcaaaccgctcaagcacctgggttcgtggtgcccacccacgcgggaaccgtcggcactcttcctctgggggggtatgtcgctcccgggtaccccttgcagctacagccttgcacagcttacgtgcccgtgtatcctgtcggaactccatacgcagggggaactccggggggcaccggagtaacaagcacgttgcctccaccacctcaaggacccggccttgccctcctcgagcctcgacgcccgccccatgactatatgcctattgcagtcctgactacgatctgttgcttctggccgactgggattattgctatttttaaagcggtgcaggttcgaactgctctcgcccgcggagacatggtgagcgccgagattgcaagtagggaggcaagaaatttttcattcattagcctagctgttggcatcgccgctatggtgctgtgcactatactgaccgtcgttataataatcgccgcccagcaccacgagaattactgggacccgtag

SEQ ID NO: 343692 - DNA, 678 bp, Artificial Sequence
  derived and/or modified sequence
atgccaggcactcagacgcccgcaccagctgaggatccacatagtggatgccgggatcctgtgcctgcccggccccaagcttgccacccaaaatcacaggagacaagattcgaaggtcccttgcctccacctccgcctgctgccgctgcgccgccacccccagccccggcacagactgcacaggccccaggattcgtcgttcccacccatgccggaactgtcggaactctccctctcggaggatatgtggctcctgggtatcccctccagctccagccatgtaccgcgtacgttccggtgtatcctgtcgggacaccctatgctggtggcacacccggcgggaccggagtcacaagtaccctcccgcctcccccgcagggtccaggtttagcccttcttgaacctcggaggcccccccatgactacatgccgatcgccgttctaaccactatctgctgtttttggcccacaggaatcatcgctatctttaaggccgttcaggtcaggactgccctcgctagaggtgatatggtttctgctgagattgcttcccgcgaggcaaggaattttagctttatttcactggccgtgggtatcgcagcaatggttctgtgtacaatcctcaccgtggtgattatcatcgcagcacagcaccatgaaaattattgggatccctag

SEQ ID NO: 343693 - DNA, 678 bp, Artificial Sequence
  derived and/or modified sequence
atgccgggaacacaaactccggcccctgcggaggacccgcactctggctgcagggatcccgtgcctgcccggccccaggcgtgccaccctaagagccaggagaccagatttgaggggcccctcccgccaccacccccggccgctgcagctcccccccctcccgcccctgcccaaaccgctcaggctccaggattcgtggtgcccacacacgccggaacagtaggtactctccctctgggaggatatgtggcccctggctaccctctacaactgcagccctgcactgcttatgtgcctgtgtaccccgtgggaaccccctatgccggtgggacacccggaggcaccggagtcacctctactctgccgccccccccacagggaccagggctggcgcttctggagccacggagaccaccccacgactacatgccaattgcagttttaactacgatatgctgcttctggcccacgggtattatcgccatatttaaagcggtccaggtgcgcacagccctggcccgaggcgacatggtctcggccgagatcgcatccagagaggcccggaatttcagtttcatatcactggccgtgggaatcgctgctatggtgctctgtaccatcctgactgtagttatcatcatcgctgcccagcatcacgaaaactactgggacccctag

SEQ ID NO: 343694 - DNA, 678 bp, Artificial Sequence
  derived and/or modified sequence
atgccgggaacccagacaccagctccggctgaagatcctcactcaggctgtcgggatcccgtccctgcaaggccacaggcatgccacccgaaatcccaagagacacgcttcgaaggtcccctgccccccccccccccggccgctgctgcaccccctcctccggcaccggcccagacagcgcaggcccccgggttcgttgtgcctacacatgctggcaccgtaggtacactgccacttggcggctacgttgcaccgggatacccactacaactgcagccctgtacagcttacgttcccgtctaccccgtcggtacaccttatgctggcggcacgccaggtgggactggagttacaagtactctgccgccacccccccagggaccaggcctggccctgctggaacctagacgccctccccatgactatatgcccatcgctgttctgaccaccatttgctgcttctggccaaccggaattattgccatcttcaaagcagttcaggtgaggacagctttggctcggggagacatggtaagtgccgaaatcgctagccgcgaggcccgaaacttctcgtttatctccctcgctgtcggaattgctgcaatggtgctgtgcaccatcttgactgtggtcatcattattgccgcgcaacaccatgagaattactgggatccctag

SEQ ID NO: 343695 - DNA, 678 bp, Artificial Sequence
  derived and/or modified sequence
atgcccggaactcagacgccagcgcccgcagaagacccacattctggctgccgagacccagtacccgctcggccacaggcttgccacccgaagtcgcaggaaacccgctttgaagggccactgccgccaccccctccagctgccgctgctccgccccctcccgctccggctcaaactgcccaggccccaggcttcgtggtgcctacacacgctggaaccgtgggcaccctacccctgggcggctacgtggcccccgggtatcccctgcagctgcagccatgtacggcctatgtaccagtataccctgtcggcacgccttatgccggcggcacaccgggcgggactggtgtaacctccactctgccacccccacctcagggaccggggctcgctttattggagccaagacggccccctcatgactacatgccaatcgcggtcctgaccaccatatgctgcttttggcccactgggattatcgccatattcaaagcagtgcaggttagaaccgccttggcacgaggtgatatggtaagtgccgagattgcgagccgagaagctagaaatttcagctttatcagtctcgccgtgggcatcgcagccatggtgctgtgtacgatcctcaccgtggtgataattattgccgcgcagcatcacgaaaactactgggacccttag

SEQ ID NO: 343696 - DNA, 678 bp, Artificial Sequence
  derived and/or modified sequence
atgccaggcacacagacgccagcgcccgccgaggatccacacagcggctgcagagacccagtgccagcccggccccaagcctgccatccaaaatcccaggagacacgctttgaaggacctcttccacccccaccaccggccgctgcggcccctccgccacccgctcctgcacagaccgcgcaggcacccggttttgtcgttcctacccatgcaggaacagtgggtacccttcctctgggagggtatgtcgcacccggctacccgttacagctgcagccttgcacagcatatgtccccgtctatccagttggaacaccatacgcgggcggcacgcctggagggaccggcgtgactagtacattgcccccaccacctcaaggaccagggctcgccctgctagagccaagacggccccctcacgattacatgcctatagccgtgctcactactatttgctgcttctggcctacggggattatcgcaatatttaaggctgtgcaggttcgcacagccctcgcccgcggcgacatggtaagcgcagagatagcttcccgagaggctaggaatttttcttttatcagtctggctgttggaatcgccgcgatggttctctgtactatcctcaccgtcgtgatcattattgcggcccagcaccacgagaattattgggatccgtag

SEQ ID NO: 343697 - DNA, 678 bp, Artificial Sequence
  derived and/or modified sequence
atgcctggcacccagaccccagccccagctgaggacccccacagcggctgccgggaccctgtgcctgcccggccccaggcctgccaccccaagagccaggagaccaggtttgagggccccctgcccccacctcctcctgctgctgctgcccctcctcctccagccccagcccagacagcccaggcccctggctttgtggtgcccacccatgctggcaccgtgggcaccctgcccctgggcggctacgtggcccctggctaccccctgcagctgcagccctgcacagcctacgtgcctgtgtaccctgtgggcaccccctatgctgggggcacccctgggggcactggagtgaccagcaccctgcccccaccaccccagggccctggcctggccctgctggagccccggcggccccctcatgactacatgcccatcgctgtgctgaccaccatctgctgcttctggcccaccggcatcatcgccatcttcaaggctgtgcaggtgaggacagccctggcccggggggacatggtgtctgctgagatcgccagccgggaggccaggaacttctccttcatcagcctggccgtgggcattgctgccatggtgctgtgcaccatcctgactgtggtgatcatcatcgccgcccagcaccacgagaactactgggacccctag

SEQ ID NO: 343698 - DNA, 192 bp, Artificial Sequence
  derived and/or modified sequence
atgcctggcacccagaccccagccccagctgaggacccccacagcggctgccgggaccctgtgcctgcccggccccaggcctgccaccccaagagccaggagaccaggtttgagggccccctgcccccacctcctcctgctgctgctgcccctcctcctccagccccagcccagacagcccaggccccctag

SEQ ID NO: 343699 - DNA, 678 bp, Artificial Sequence
  derived and/or modified sequence
atgcccggcacccagacccccgcccccgccgaggacccccacagcgggtgcagagaccccgtgcccgctcggccacaggcgtgccatcccaagtcccaagagaccaggtttgaggggcccctcccccccccccccccagcggccgccgcaccaccaccacctgccccagcccagaccgcccaagctccgggttttgtggtgccgacacatgctggaactgtcgggaccctgcccctcggagggtacgtagcaccaggatatcccctgcagctccagccttgtacggcctacgtgcccgtgtaccccgtcggcaccccttatgctggcggaacgcccggagggacaggcgtgactagcaccttgcctcctccacctcagggaccaggtctagcgctgctcgagccccgccggccacctcatgattacatgccaatcgctgtgctaactactatctgttgtttctggcccaccggcattatcgccatctttaaggcagtccaggtacggactgctctggcaaggggcgatatggtgtcagcggaaattgccagccgcgaggcccggaatttctcctttatcagcctcgctgttggtattgctgctatggtgctctgcaccattctcactgtcgtgattattatagccgcccagcatcatgaaaattactgggacccatag

SEQ ID NO: 343700 - DNA, 678 bp, Artificial Sequence
  derived and/or modified sequence
atgcccggcacccagacccccgcccccgccgaggacccccacagcggttgtagggacccagtacctgccagaccacaggcttgccatcccaaaagccaagagactagattcgaagggcccctcccaccaccaccacccgccgcagccgcccctccacctcctgcccccgcccagacagcccaggcgcctggctttgttgtgccaacccacgccggaacagtgggcaccctgcctttaggtggttacgtggcccccggttaccccctgcagctacagccgtgcacggcctatgtgcccgtataccccgtgggaactccttatgcgggtgggacccctggaggtacgggtgtcacctcgacccttcccccaccccctcagggcccaggattggccttgctggaaccgcgtagacctccgcatgactatatgcccattgcggttcttactacaatttgttgcttctggcccacaggaatcatcgccatttttaaagccgttcaggtgagaaccgccctggcaaggggagacatggtttctgctgaaatcgcctctcgcgaagctcggaacttcagcttcatctcactggctgttggaatcgccgcaatggtcctgtgtacaattctaaccgtcgttataattatcgccgcgcagcaccatgagaactactgggatccctag

SEQ ID NO: 343701 - DNA, 678 bp, Artificial Sequence
  derived and/or modified sequence
atgcccggcacccagacccccgcccccgccgaggacccccacagcggctgtcgggaccctgtgccagcacgcccccaggcatgtcatcctaaaagccaggagacccgcttcgaaggaccccttccgcctcctcctccggccgcagccgccccgccgccccccgcccctgcacagacagctcaggcacccggttttgtcgtcccaacacacgctggaactgtgggcacactccctcttggcgggtatgtggctccaggttacccactgcagctgcagccgtgtacggcctatgtgcccgtttaccccgtcgggacaccatacgccggaggaacgcccggcggaaccggtgtgaccagcaccttgccgcccccccctcagggacccggcctggcgctcctggagccgaggaggccacctcacgactatatgccaatcgcagtcctgacaactatttgctgcttctggcctactggcattattgctattttcaaggccgtccaggtacgtacggccctcgcccggggtgatatggttagtgccgaaatcgccagtcgagaagcgaggaacttttcttttatctcacttgcagtaggcatagcggcaatggtgttgtgtacgatcctaactgtggtgatcatcattgccgcccaacatcacgagaattattgggacccttag

SEQ ID NO: 343702 - DNA, 678 bp, Artificial Sequence
  derived and/or modified sequence
atgcccggcacccagacccccgcccccgccgaggacccccacagcgggtgccgcgatcccgttccagcaaggcctcaagcttgtcatcccaaaagccaggaaactagatttgaaggaccactgcctccccccccgcctgcggctgcagcgcctccaccacctgcgcctgcccagaccgctcaggcccctggatttgtcgttccaacgcacgcgggtacggtcggcacactgcctcttggaggttatgtggcccccggctacccattgcagctacaaccatgtaccgcctatgttcctgtgtacccagtgggaaccccctacgctggcggaaccccaggagggacgggagttacttctactcttcccccaccacctcaaggaccaggtttggctctattggaacctcggaggccaccccacgactacatgccaattgccgtgctgaccaccatttgctgcttctggccaaccggcatcatcgccatttttaaggcagtacaggtgcgcacagcgctggccagaggcgatatggtgtccgctgaaatagcgagccgcgaagctaggaatttttccttcatttccctcgcggtgggtatagctgcaatggtcctgtgcacaatcctgactgtcgtaatcatcatcgcagcccagcaccatgagaactactgggacccatag

SEQ ID NO: 343703 - DNA, 192 bp, Artificial Sequence
  derived and/or modified sequence
atgcccggcacccagacccccgcccccgccgaggacccccacagcgggtgtcgggaccccgttccagctagaccacaggcatgccaccccaagagccaggagactcggttcgagggaccattgccaccccctcctcccgctgctgccgctcccccacctcccgcgcctgcgcagaccgctcaagccccgtag

SEQ ID NO: 343704 - DNA, 192 bp, Artificial Sequence
  derived and/or modified sequence
atgcccggcacccagacccccgcccccgccgaggacccccacagcggctgcagggaccctgtacccgcccgtccccaggcctgtcacccaaagagccaagaaacaaggtttgagggcccactgccgccacctcccccggcagccgctgctcccccccctcctgcccccgcccagactgcacaggccccctag

SEQ ID NO: 343705 - DNA, 678 bp, Artificial Sequence
  derived and/or modified sequence
atgcccggcacccagacccccgcccccgccgaggacccccacagcggatgcagagacccagtccctgctaggcctcaggcatgtcacccaaagagccaggaaaccagattcgaagggccactccctcccccaccacccgcagcagccgctcctccacctcccgcccctgcacaaacggcccaagcccccgggtttgtggtgcctacacacgcgggcactgtgggaacccttcctttggggggttatgtcgcaccaggttatcccctacagctgcagccctgcacagcatacgtgccggtttatccagtcggtacaccctacgctggaggaacaccaggagggaccggtgtcacatctacactcccccctccaccgcagggccctggacttgcacttctcgagcctaggcggccaccccatgattatatgcctatcgcagtcctgacaactatctgctgtttctggcccacaggcatcattgcaatttttaaggccgttcaggttagaaccgccctggccaggggcgatatggttagtgccgaaatagcttcaagagaagcaagaaacttttcttttatatcactggccgtcggcatcgctgcaatggtgctgtgcaccatccttacagtggtgatcatcatcgcagcccagcatcatgagaactactgggacccttag

SEQ ID NO: 343706 - DNA, 192 bp, Artificial Sequence
  derived and/or modified sequence
atgcccggcacccagacccccgcccccgccgaggacccccacagcggatgtcgtgaccctgtccccgcccggcctcaggcgtgccaccctaagtcacaggagacaaggttcgaggggccgctgcctccccctcctcctgccgcagccgctcccccccctccagcacccgcccagacagctcaggccccatag

SEQ ID NO: 343707 - DNA, 678 bp, Artificial Sequence
  derived and/or modified sequence
atgcccggcacccagacccccgcccccgccgaggacccccacagcgggtgcagagaccccgtgccagcaagaccccaggcatgccacccaaagagtcaggaaacaagattcgagggacctctgccgcccccacccccagccgctgccgccccaccacctccagcgccagcccaaaccgctcaggctccaggattcgtggttccaacccacgctggaaccgtgggaactttgccgctcgggggctacgttgcaccagggtatccactccaactacaaccttgtacagcctacgttcccgtgtatccggtcggtaccccgtacgctggagggactcccggcgggaccggcgtgacgagcactctcccaccaccaccccagggcccagggctggcactgctcgagcctcggcgtcctccacatgactatatgcctattgctgttctgacaacaatatgttgcttttggcccaccgggatcatcgccattttcaaggctgtgcaagtgaggactgctctggctagaggcgacatggttagtgcagaaatcgcatctcgcgaggccagaaattttagctttatctcattagccgtgggaatcgctgccatggtattgtgcaccattctgactgtggtgataattattgccgcccaacaccacgagaactactgggacccttag

SEQ ID NO: 343708 - DNA, 192 bp, Artificial Sequence
  derived and/or modified sequence
atgcccggcacccagacccccgcccccgccgaggacccccacagcgggtgtagagatcccgtaccagctagacctcaggcttgtcaccctaagtcacaagagacgagattcgaaggcccactgccgcctcctccaccagcagccgccgcacctccacctccagcacctgctcagactgcacaagccccatag

SEQ ID NO: 343709 - DNA, 192 bp, Artificial Sequence
  derived and/or modified sequence
atgcccggcacccagacccccgcccccgccgaggacccccacagcggatgtagggacccggtgcctgccagaccccaagcttgtcatcccaaaagtcaggagacaagattcgaaggcccactgcccccaccaccaccggcagccgcggcacccccccctccagcgcccgcccagacagcgcaggctccttag

SEQ ID NO: 343710 - DNA, 192 bp, Artificial Sequence
  derived and/or modified sequence
atgcccggcacccagacccccgcccccgccgaggacccccacagcggctgccgcgatccagtccctgctcgccctcaggcctgccacccaaaaagtcaggagactagatttgagggccccctaccgccgcctcctcccgccgctgctgcccccccaccccctgcccccgcacagaccgcccaggcaccttag

SEQ ID NO: 343711 - DNA, 678 bp, Artificial Sequence
  derived and/or modified sequence
atgcccggcacccagacccccgcccccgccgaggacccccacagcggatgcagagacccagtgcccgctagaccacaggcctgtcatcccaaatcacaggagacccgcttcgaaggaccactgcctccaccgcctcctgcggccgccgcccctcctcctccagctcctgcacagaccgcccaggccccaggattcgttgtgccaacacatgctgggacggtgggcactctgcccttgggcggatatgtggctcccggctatccgctgcaactacaaccttgcaccgcctacgttcccgtataccctgtaggaacgccctacgccgggggcaccccaggcggcaccggcgtcacctctacgctaccaccgcccccacagggccctggactcgccctgctcgagcctaggcgccctcctcacgactatatgcccatagctgtgttgactactatttgctgtttctggcctaccgggattatcgccatcttcaaggccgttcaggttaggaccgcactggctcgaggggatatggtgtccgctgaaatcgcgtcccgggaggcccgcaatttctcatttatttctctagccgtgggaatcgctgccatggtgctgtgtacgatcctgacagtggttattatcattgctgctcaacatcacgagaactactgggacccatag

SEQ ID NO: 343712 - DNA, 192 bp, Artificial Sequence
  derived and/or modified sequence
atgcccggcacccagacccccgcccccgccgaggacccccacagcggttgccgggatccggtcccagctcggcctcaagcatgtcaccctaagtcccaggaaactcgtttcgagggccctttacctccacctccaccagcggcagcagctcctcctcctcctgcaccagctcagaccgcacaggccccctag

SEQ ID NO: 343713 - DNA, 678 bp, Artificial Sequence
  derived and/or modified sequence
atgcccggcacccagacccccgcccccgccgaggacccccacagcggctgccgcgaccctgtaccagctcggccacaggcttgccaccccaagtctcaggaaacgcgctttgaaggcccactacccccgcccccgcccgctgcagctgctcctccgcctccggccccagctcaaacagcacaggccccgggatttgtagtgcccacccacgccggtacagttggcacactgccgcttggtggatacgtcgctcccggttatcctttgcagctccagccttgtaccgcctacgttcccgtgtatcctgttggcactccttacgcaggcgggacgcctggcggtactggggttacatcaactttacccccccctccgcagggacctgggttggcattactcgagccccgtcgacctccccacgattatatgcctatagccgtgttaactactatatgttgtttttggcctactggaatcatcgccatctttaaagctgtccaggtccggactgccctggcaaggggcgatatggtctctgctgagattgcatctcgagaagctcggaatttttcctttatctctctcgcagtcggtatagcagccatggtgttgtgcactatccttactgtagtcatcataattgcagcccaacatcacgaaaattattgggacccgtag

SEQ ID NO: 343714 - DNA, 678 bp, Artificial Sequence
  derived and/or modified sequence
atgcccggcacccagacccccgcccccgccgaggacccccacagcgggtgcagggatcccgtaccagcacgcccacaagcatgccatcctaaaagccaggagaccaggttcgaaggaccactaccccctcccccgccagcggccgccgcacctcctccacctgcccctgcacaaactgcacaggcaccagggttcgtcgtgcctacacacgccggtactgtaggaacgcttcctctgggcggttacgttgctcccggatatccgctgcaattacagccttgcacagcttacgttccagtctaccccgttgggaccccatacgccggcggcacgcctgggggcaccggcgttacaagcacactccctcctccacctcaaggaccgggtctcgccctcctggaacctagaagacctccgcatgactatatgccgatcgcggtgcttacaactatctgttgtttttggcccacgggaataatcgcaatctttaaggcagtgcaggtacggaccgccctggcacgcggcgacatggtaagcgccgagatagcctccagggaggctcggaatttcagcttcatctccttggccgtgggcatcgctgcaatggttttgtgcaccattcttacagtggtgatcataatagccgcacagcaccacgagaattattgggacccatag

SEQ ID NO: 343715 - DNA, 192 bp, Artificial Sequence
  derived and/or modified sequence
atgcccggcacccagacccccgcccccgccgaggacccccacagcggatgtagggacccagtcccagccaggccacaggcgtgccatccaaagtctcaagaaacaagattcgagggcccgttgcctcccccccctcctgccgccgccgccccaccccccccggcacccgctcagaccgcccaggcaccttag

SEQ ID NO: 343716 - DNA, 678 bp, Artificial Sequence
  derived and/or modified sequence
atgcccggcacccagacccccgcccccgccgaggacccccacagcggctgtagagacccggtgccagccagaccccaggcctgtcacccaaagagtcaagagacaagattcgaaggcccactgccgcctccgccaccagcagctgcagccccccctcctccggcccccgctcagactgctcaggccccaggctttgtcgttcccacgcatgccggaaccgtgggcaccctaccattgggaggctatgttgcccctgggtaccctctccagctgcaaccctgcaccgcctacgttcccgtgtatcccgtgggtaccccctatgccggcgggactcccgggggaacaggggtgaccagcaccctgccacctccacctcagggtcccggccttgccctgctagaaccgcgcagaccgccacacgactacatgcccatcgcagttcttactactatatgttgcttctggccaaccggaatcatcgccatctttaaagcagtacaggtgcgaactgctctggcacgcggagatatggtaagcgcagagattgccagtcgcgaagcacggaacttcagtttcatcagtctggcggtgggtatcgctgccatggtgctgtgtaccattctgaccgtagttattataatcgcagcccagcatcacgagaactattgggatccatag

SEQ ID NO: 343717 - DNA, 678 bp, Artificial Sequence
  derived and/or modified sequence
atgcccggcacccagacccccgcccccgccgaggacccccacagcggatgccgcgacccagtacccgcaagacctcaggcctgtcatccaaaatcgcaggaaacccgctttgagggtccgttgccccctccgcctccggccgctgcggccccacctcctccggcacccgcgcaaaccgcccaagcgcctggcttcgtggtccccacgcatgccggtactgttggtacacttccactggggggatatgtggccccaggataccccctgcagctgcagccctgtactgcatacgtgccagtctaccccgtggggaccccatatgctggaggcacaccaggaggcacaggcgtgacttctaccttgccccccccaccgcagggccccggactagcgttactcgagcccagaaggccgccccacgattatatgccgatcgccgtgctcacaaccatttgttgtttttggccgacagggatcattgccatattcaaagccgtgcaggtgaggactgctctagcccgtggcgacatggtgtcagccgaaatcgccagccgcgaagccaggaatttttcctttatctcgctggctgtcggaatcgccgccatggttctgtgcaccattcttaccgttgtgatcatcattgctgcccagcatcatgaaaattactgggacccgtag

SEQ ID NO: 343718 - DNA, 678 bp, Artificial Sequence
  derived and/or modified sequence
atgcccggcacccagacccccgcccccgccgaggacccccacagcggatgccgcgacccagtgccggcccgtccacaagcctgtcatccaaaaagccaagagactcgctttgagggtcccctcccgcctcctccaccggcagccgcagctccacccccacctgctcccgcacagaccgctcaggctcccggattcgtagtgcctactcacgcaggaaccgtgggtacactgcctctcgggggttatgttgcacccggataccccttgcagcttcaaccatgtaccgcatatgtgcccgtgtatcccgttggcaccccttacgctggcggcacccccggcggaacaggtgtcacaagcactcttcccccgccgccccagggccccggactggccctcctggagccccggcgcccccctcatgactatatgcctatcgcagtgcttacaaccatctgctgcttctggccaacaggcataatcgctatcttcaaggcagtccaggtccgaaccgcattggccagaggcgatatggtcagcgctgaaatcgcaagcagagaagctaggaacttctcattcatcagcctggccgtcggcattgccgccatggtattgtgtaccattctcacggtagtgataatcattgccgcacagcaccacgagaactactgggatccctag

SEQ ID NO: 343719 - DNA, 678 bp, Artificial Sequence
  derived and/or modified sequence
atgcccggcacccagacccccgcccccgccgaggacccccacagcgggtgtagggaccccgttcctgcacgaccccaggcttgtcatcctaaatcccaggagacccgatttgaaggcccccttccccctcctcctcccgctgcagctgccccacctccgcccgctccagcccagaccgcccaggcccccggctttgtcgtccccacccacgccggcacagtcggaacactgcctcttggcgggtatgtcgcaccagggtacccactgcagctgcagccatgcaccgcgtatgtgcctgtctaccctgtgggcaccccttatgcgggcggtacccccggcgggactggtgttacatctacactccctcccccaccgcaaggaccaggcctcgcactattggagcctcggcggccaccacacgattatatgcctattgcagtgctgaccaccatttgttgtttctggccaacagggattatcgcgatctttaaagcagtccaggtaaggacagccctggctcgaggtgacatggtctctgccgagattgctagccgggaggctcgaaacttcagctttattagcctcgcggtgggaattgccgccatggtcctgtgcaccatcttaacagtagtgataatcatcgcggcgcagcatcacgaaaattattgggatccctag

SEQ ID NO: 343720 - DNA, 678 bp, Artificial Sequence
  derived and/or modified sequence
atgcccggcacccagacccccgcccccgccgaggacccccacagcggctgtcgcgacccagtgccagccagacctcaggcctgccatcccaagagtcaagaaacccgttttgaggggcctttaccccccccaccccccgcagctgccgcccccccccctcccgctcctgcccagacagcacaggctccgggatttgtggtacctacacatgcaggcaccgttggaacactccccctaggtggctacgtggctcccggttatcctctgcagctgcaaccgtgcactgcttatgttccagtttacccggtaggcactccgtatgccgggggtaccccaggagggacaggcgtgactagtacactccccccgcccccacaaggccccggtcttgccttgctcgaacctaggaggccaccccacgattacatgcccattgccgtcctcaccaccatttgttgcttctggccaaccggtatcatcgccattttcaaagctgttcaagtgcggactgccctagcccgtggtgatatggtgtcagcagagattgcctccagagaagcacgcaacttctcatttatatcccttgctgtcggtatcgcagccatggtcctatgtactatcctgactgtcgtcatcattatcgccgcccaacaccacgagaactattgggacccgtag

SEQ ID NO: 343721 - DNA, 678 bp, Artificial Sequence
  derived and/or modified sequence
atgcccggcacccagacccccgcccccgccgaggacccccacagcgggtgcagggatcctgttcctgctcgccctcaagcatgccaccccaagtcacaagagacccggttcgagggaccacttccccccccgccccccgccgccgcagccccaccgccgcccgcccccgcccaaacagcccaggcccctggctttgtggtgccgactcatgcaggcacagtgggtacactccccctcggaggctatgtagcccccggctacccattgcaactccagccctgtactgcctatgtcccagtatatcctgtagggactccttacgccggcggaacccccggcggcaccggtgtcacatccacactccctccaccacctcaagggcccggtctggcattgttggaaccacgcagaccgcctcatgactacatgcccattgcagttctaaccacaatttgctgtttttggcccactggcatcatcgcaatcttcaaagccgtccaggttcgcactgccctcgccagaggcgacatggtgtcagccgaaattgcgtccagggaggcccgcaacttctcatttatatcccttgcagtcggaatcgccgctatggtgctctgcaccatactgacggtggttatcattattgctgctcagcaccacgagaattactgggacccttag

SEQ ID NO: 343722 - DNA, 678 bp, Artificial Sequence
  derived and/or modified sequence
atgcccggcacccagacccccgcccccgccgaggacccccacagcggctgtcgcgatcctgttcccgctcgccctcaggcctgccatccaaagagtcaggagactcgctttgaggggccactccctcctcccccccccgctgccgctgctccccctccccccgcgcctgcacaaactgcccaggcacctggattcgttgtgccaacccacgcaggcaccgttggcacattacctctgggcggctatgtggcccctggttatcctctgcagttgcagccttgtacagcttacgtcccagtctacccagttgggacaccgtatgctggggggactccaggagggaccggagtgactagcacgctgcctccccccccacaaggtccaggcctggccctcctcgaaccacggcgacctcctcacgactatatgcctatagcagtgctaaccaccatttgctgcttttggcccacagggatcatcgccattttcaaggctgtacaagtgcgcaccgcacttgccagaggcgacatggtctccgccgaaattgctagccgggaagcccgtaacttctcttttatttccctggcggtgggcattgccgctatggttctatgcacaattctaactgtcgtcatcatcattgcggcccaacaccatgagaattattgggacccctag

SEQ ID NO: 343723 - DNA, 1726 bp, Artificial Sequence
  derived and/or modified sequence
atctgactctgtggagcctgggactggtttcagcgagagcctctgtactgctctgtagtctctgctaggacatggacgaaaagggacgcagccgggagagcgactgccccagtcccacccgcctcgcctggtctagcctccgtgtttccatgacaactccaaaggaacccaaactgggggcttgaatgccgggcacccagactccagcaccggccgaggacccccactccggctgcagggaccctgtcccagcgagaccgcaggcatgtcatccgaaaagtcaggagactcgcttcgagggcccacttcccccgccgccgcccgctgccgccgccccgcccccgccggcgccagcccagactgcccaggcccctggcttcgtggtgcccacgcacgcggggactgtgggcacgctgccgctggggggctacgtagcgcccggataccccctgcagctgcagccttgcactgcttacgtgccggtctacccggtgggcacgccatatgcaggcgggaccccggggggaacaggagtgacctccactctccccccgccgccccagggcccagggctggccctactggagccgaggcgcccgccacacgactacatgcccatcgcggtgctgaccaccatctgttgcttctggcctactggcatcattgccatcttcaaggccgtgcaggtgcgcacggccttggcccgcggagacatggtgtcggccgagatcgcttcacgcgaggcccggaacttctccttcatctccctggccgtgggcatcgcggccatggtgctctgtaccatcctcaccgtagtcatcatcatcgccgcgcagcaccacgagaactactgggatccctaaaaacgcccctggtccggccccactctgcgcccctcgatctcccaggctctttctgcagtcataccgcggacccaatgggcgccctgcacacccgtttctggggccgtcagacttggatacatcgtaaactccgcctccacggaacgtctcgccttgcgagcaagctcggaatccagttcctcaggaacccctccaaaacccacacccccagggacgccgctttccgggatcccggccaaacgccggaccctcagtcgctccaggccccctcaccctcaaagtgtagcgcccccaaccgagcaacctcggtttggtccctaaaaccccgcctcctctataagcaccgccccagctctgacaaaaccccgcctccaggtcggcaggctccgccttcttttcttctccgcggggtgattcagtccagtgattgggtttgtggctccaggcctcgcccacagacggacagacccctccctttcttccggcaaaaggaccgagccctggggtagtaaggcccccacactcctgttttttgcaagtacatttttgtccctcctccacccaggtatctgcctattttcttgctaatcccagaacctttccttttgctttttttaaggacatttgggaagttcctggtgtaggacccttctccctgggataagaaacctgcctgtaaacgctctgtaaatactcccttccacccatcccagcccctgggcagccgggcagaagggaatccaggctatggacctcccaagtccccgctccccgctcccctcggcggccccgccttgttctgatctgtgtgtgagtgtgtgtgaacttctgaaagacaatattaaagagacttagttgattta

SEQ ID NO: 343724 - DNA, 1536 bp, Artificial Sequence
  derived and/or modified sequence
atgccgggcacccagactccagcaccggccgaggacccccactccggctgcagggaccctgtcccagcgagaccgcaggcatgtcatccgaaaagtcaggagactcgcttcgagggcccacttcccccgccgccgcccgctgccgccgccccgcccccgccggcgccagcccagactgcccaggcccctggcttcgtggtgcccacgcacgcggggactgtgggcacgctgccgctggggggctacgtagcgcccggataccccctgcagctgcagccttgcactgcttacgtgccggtctacccggtgggcacgccatatgcaggcgggaccccggggggaacaggagtgacctccactctccccccgccgccccagggcccagggctggccctactggagccgaggcgcccgccacacgactacatgcccatcgcggtgctgaccaccatctgttgcttctggcctactggcatcattgccatcttcaaggccgtgcaggtgcgcacggccttggcccgcggagacatggtgtcggccgagatcgcttcacgcgaggcccggaacttctccttcatctccctggccgtgggcatcgcggccatggtgctctgtaccatcctcaccgtagtcatcatcatcgccgcgcagcaccacgagaactactgggatccctaaaaacgcccctggtccggccccactctgcgcccctcgatctcccaggctctttctgcagtcataccgcggacccaatgggcgccctgcacacccgtttctggggccgtcagacttggatacatcgtaaactccgcctccacggaacgtctcgccttgcgagcaagctcggaatccagttcctcaggaacccctccaaaacccacacccccagggacgccgctttccgggatcccggccaaacgccggaccctcagtcgctccaggccccctcaccctcaaagtgtagcgcccccaaccgagcaacctcggtttggtccctaaaaccccgcctcctctataagcaccgccccagctctgacaaaaccccgcctccaggtcggcaggctccgccttcttttcttctccgcggggtgattcagtccagtgattgggtttgtggctccaggcctcgcccacagacggacagacccctccctttcttccggcaaaaggaccgagccctggggtagtaaggcccccacactcctgttttttgcaagtacatttttgtccctcctccacccaggtatctgcctattttcttgctaatcccagaacctttccttttgctttttttaaggacatttgggaagttcctggtgtaggacccttctccctgggataagaaacctgcctgtaaacgctctgtaaatactcccttccacccatcccagcccctgggcagccgggcagaagggaatccaggctatggacctcccaagtccccgctccccgctcccctcggcggccccgccttgttctgatctgtgtgtgagtgtgtgtgaacttctgaaagacaatattaaagagacttagttg

SEQ ID NO: 343725 - DNA, 1726 bp, Artificial Sequence
  derived and/or modified sequence
atctgactctgtggagcctgggactggtttcagcgagagcctctgtactgctctgtagtctctgctaggacatggacgaaaagggacgcagccgggagagcgactgccccagtcccacccgcctcgcctggtctagcctccgtgtttccatgacaactccaaaggagcccaaactgggggcttgaatgccgggcacccagactccagcaccggccgaggacccccactccggctgcagggaccctgtcccagcgagaccgcaggcatgtcatccgaaaagtcaggagactcgcttcgagggcccacttcccccgccgccgcccgctgccgccgccccgcccccgccggcgccagcccagactgcccaggcccctggcttcgtggtgcccacgcacgcggggactgtgggcacgctgccgctggggggctacgtagcgcccggataccccctgcagctgcagccttgcactgcttacgtgccggtctacccggtgggcacgccatatgcaggcgggaccccggggggaacaggagtgacctccactctccccccgccgccccagggcccagggctggccctactggagccgaggcgcccgccacacgactacatgcccatcgcggtgctgaccaccatctgttgcttctggcctactggcatcattgccatcttcaaggccgtgcaggtgcgcacggccttggcccgcggagacatggtgtcggccgagatcgcttcacgcgaggcccggaacttctccttcatctccctggccgtgggcatcgcggccatggtgctctgtaccatcctcaccgtagtcatcatcatcgccgcgcagcaccacgagaactactgggatccctaaaaacgcccctggtccggccccactctgcgcccctcgatctcccaggctctttctgcagtcataccgcggacccaatgggcgccctgcacacccgtttctggggccgtcagacttggatacatcgtaaactccgcctccacggaacgtctcgccttgcgagcaagctcggaatccagttcctcaggaacccctccaaaacccacacccccagggacgccgctttccgggatcccggccaaacgccggaccctcagtcgctccaggccccctcaccctcaaagtgtagcgcccccaaccgagcaacctcggtttggtccctaaaaccccgcctcctctataagcaccgccccagctctgacaaaaccccgcctccaggtcggcaggctccgccttcttttcttctccgcggggtgattcagtccagtgattgggtttgtggctccaggcctcgcccacagacggacagacccctccctttcttccggcaaaaggaccgagccctggggtagtaaggcccccacactcctgttttttgcaagtacatttttgtccctcctccacccaggtatctgcctattttcttgctaatcccagaacctttccttttgctttttttaaggacatttgggaagttcctggtgtaggacccttctccctgggataagaaacctgcctgtaaacgctctgtaaatactcccttccacccatcccagcccctgggcagccgggcagaagggaatccaggctatggacctcccaagtccccgctccccgctcccctcggcggccccgccttgttctgatctgtgtgtgagtgtgtgtgaacttctgaaagacaatattaaagagacttagttgattta

SEQ ID NO: 343726 - DNA, 497 bp, Artificial Sequence
  derived and/or modified sequence
agcgttcgggggacttgttctctaggtccaggatcttcctaatgcatcgcctcagccatgaacaacgcggagttctttaatacccgtgagcagcagcccaggccccttgaagagtgcagactcccacctggcctgggcgtctggctccgcagcagaacacgaagtttgcattccccaaggggcggccagggggcggaccagggaaaggtagtcctctgcattttgccgtgtgctggtcccacccgcctcgcctggtctagcctccgtgtttccatgacaactccaaaggagcccaaactgggggcttgaatgccgggcacccagactccagcaccggccgaggacccccactccggctgcagggaccctgtcccagcgagaccgcaggcatgtcatccgaaaagtcaggagactcgcttcgagggcccacttcccccgccgccgcccgctgccgccgccccgcccccgccggcgccagcccagactgcccaggcccc

SEQ ID NO: 343727 - DNA, 497 bp, Artificial Sequence
  derived and/or modified sequence
agcgttcgggggacttgttctctaggtccaggatcttcctaatgcatcgcctcagccatgaacaacgcggagttctttaatacccgtgagcagcagcccaggccccttgaagagtgcagactcccacctggcctgggcgtctggctccgcagcagaacacgaagtttgcattccccaaggggcggccagggggcggaccagggaaaggtagtcctctgcattttgccgtgtgctggtcccacccgcctcgcctggtctagcctccgtgtttccatgacaactccaaaggaacccaaactgggggcttgaatgccgggcacccagactccagcaccggccgaggacccccactccggctgcagggaccctgtcccagcgagaccgcaggcatgtcatccgaaaagtcaggagactcgcttcgagggcccacttcccccgccgccgcccgctgccgccgccccgcccccgccggcgccagcccagactgcccaggcccc

SEQ ID NO: 343728 - DNA, 497 bp, Artificial Sequence
  derived and/or modified sequence
agcgttcgggggacttgttctctaggtccaggatcttcctaatgcatcgcctcagccatgaacaacgcggagttctttaatacccgtgagcagcagcccaggccccttgaagagtgcagactcccacctggcctgggcgtctggctccgcagcaggacacgaagtttgcattccccaaggggcggccagggggcggaccagggaaaggtagtcctctgcattttgccgtgtgctggtcccacccgcctcgcctggtctagcctccgtgtttccatgacaactccaaaggagcccaaactgggggcttgaatgccgggcacccagactccagcaccggccgaggacccccactccggctgcagggaccctgtcccagcgagaccgcaggcatgtcatccgaaaagtcaggagactcgcttcgagggcccacttcccccgccgccgcccgctgccgccgccccgcccccgccggcgccagcccagactgcccaggcccc

SEQ ID NO: 343729 - DNA, 678 bp, Artificial Sequence
  derived and/or modified sequence
atgccgggaacccaaactccggctccggcagaggacccccacagtgggtgcagggatcccgtgcctgcgaggccgcaggcgtgccatccaaagtcccaggagactagatttgagggaccgttaccgcctccccctcccgcagccgcagccccacctccccctgcgcctgctcagactgcccaggcgccaggttttgtcgtgccaacccatgcaggcacagtggggacattgccactgggcggatatgtagccccagggtaccctctacaattacagccctgtactgcatatgtcccggtctaccctgtcgggactccgtacgcgggtggaactccgggtgggaccggggtgacaagcacactgccccctcctcctcagggcccaggactggcgctgctagagcctcgaaggccacctcatgactacatgccgattgctgtgctcactacgatctgttgcttttggccaaccggcatcatcgctattttcaaggctgtccaagtgagaacagcactcgctcggggagatatggtgagcgccgagatcgcaagcagagaagcaaggaacttcagttttatttcgttggctgttggaattgccgcaatggttctctgcaccatattgacagtcgttattatcatcgctgctcagcaccatgagaattattgggatccatag

SEQ ID NO: 343730 - DNA, 678 bp, Artificial Sequence
  derived and/or modified sequence
atgccaggcacgcagacgcccgctcctgctgaggatccacactcagggtgccgggatcctgtgccagccagacctcaggcttgccatccgaagtctcaggaaacccgctttgaaggccctctgcctcctcccccacctgcagctgccgcaccgccacccccagcccctgcacagacagcacaggccccaggatttgtggtcccaactcacgccggaacagtgggaacactccccttgggaggatacgttgccccaggatacccactacagttacagccttgtaccgcatacgtgcccgtgtaccctgtggggacaccgtatgcgggtggtacccccggtggaacaggcgtgacgtccacacttccccctcccccacagggacctggcttggcacttttggagcccaggaggccgccacacgactatatgcccattgccgttctcaccacaatatgctgtttctggccaacagggatcattgctattttcaaagctgtgcaagtacgtaccgcgctggcccgtggagacatggtgtccgctgaaatcgccagtagagaagccaggaatttctcgttcatctctctggcagtgggaattgccgcaatggtcctgtgcacaatcctgacagtcgtgataatcatcgccgctcagcaccatgaaaactactgggatccctag

SEQ ID NO: 343731 - DNA, 678 bp, Artificial Sequence
  derived and/or modified sequence
atgcccggtacccagacacccgcacccgctgaggatccccattcgggatgtcgcgatccagtccccgctagacctcaggcctgccaccctaagagccaggagacccgctttgagggcccattaccccctcccccacctgctgcagcggcacccccaccccctgctcctgctcaaacggctcaggccccaggattcgtggtgccgactcatgccggaacagtgggcacgctccccctggggggatatgtggcccctggatatccacttcagctgcaaccgtgcactgcttacgttccggtgtaccccgtgggcactccctatgcaggaggtacacccggtggaacaggggtgacttcaacactacctccacctccccagggacccggtttggccctactggaacccagacgacctccccacgactatatgcctatagctgtgttgacaaccatatgctgtttctggcctaccggcattattgccattttcaaggccgtgcaggtacggacagctcttgccagaggggatatggtgtcagcagagatcgcttcccgagaagcccgaaatttttctttcattagccttgctgttgggattgcagctatggtgctctgtactattctcaccgtcgtcatcattatcgccgcacagcaccacgagaactattgggatccctag

SEQ ID NO: 343732 - DNA, 678 bp, Artificial Sequence
  derived and/or modified sequence
atgccaggaacacagaccccggctcctgccgaggacccccatagcggatgcagagacccagtgcccgctagacctcaagcatgtcacccaaagtcccaggagactagatttgagggcccattaccaccgcctccgcctgcggctgccgcaccccctccgccagcacccgctcagaccgcccaggcccctggtttcgtggtccccacccatgccggaacagtcggcactttgcctctcggcggttatgtggcccctggttaccctctccagcttcagccctgtactgcgtacgtgcccgtatatcccgtggggaccccatatgccggtggtacgccaggaggtaccggagttacttcaacattaccccctcctcctcaaggccctggcctggcgttactggaaccacggaggccgcctcacgattacatgcccattgcagtattaactacaatctgttgcttttggccaaccggcataatcgctatttttaaggcggttcaggtccgcacagcactggctcgtggggatatggtcagtgcagaaatagcatcaagagaggccagaaactttagctttatttcgctggccgtgggaatcgccgctatggtgttatgcacaattctcacagtggtgatcattatcgcagcacagcaccacgagaactactgggatccttag

SEQ ID NO: 343733 - DNA, 192 bp, Artificial Sequence
  derived and/or modified sequence
atgcccggtacccagacccccgctcctgccgaggacccacactccggatgccgtgatccggtcccagcgcgaccacaggcttgtcatcctaagtcccaggagacaagattcgagggcccattaccccctcctccacctgccgctgcagcacctcccccaccggcacctgctcagaccgcgcaggctccttag

SEQ ID NO: 343734 - DNA, 192 bp, Artificial Sequence
  derived and/or modified sequence
atgccgggtacgcagaccccagctcctgctgaagaccctcattcgggttgccgggacccagtaccagcacggccacaagcctgccaccccaagagccaggagacaagattcgaaggaccgcttcccccaccacccccagccgcagctgcaccacctccacctgcccctgcgcagactgctcaggcaccctag

SEQ ID NO: 343735 - DNA, 678 bp, Artificial Sequence
  derived and/or modified sequence
atgcccggaacccagacccctgctcctgccgaggacccacactcaggttgtcgcgaccctgtccccgcaagacctcaggcgtgtcatccgaagagccaagagactagatttgaaggcccactgccaccccctcccccagccgctgcagctccccctccgccagctcccgcacaaactgcacaggcacccggattcgtggtgcccacgcacgctgggacagtagggaccttgcccttaggcggttatgtggctccgggttaccctttgcagctacagccctgcacagcctatgtgcccgtataccctgtgggcacgccatacgccggtggcacaccaggaggcactggtgtaacatccaccctccctcctcctccgcaaggtcctggcctcgccctgctggagcctcgacgccctccccacgattacatgccgatagcggtgctgacaactatatgttgcttctggcccaccggcattatcgccatcttcaaggccgtgcaggttcgcactgcactcgcaaggggagacatggtcagtgcagaaattgcctctcgcgaagcccgaaactttagcttcataagtctcgccgtcgggatagccgctatggtgctatgcacaattctgactgttgtaattataatcgctgctcagcaccacgaaaattattgggacccctag

SEQ ID NO: 343736 - DNA, 192 bp, Artificial Sequence
  derived and/or modified sequence
atgccaggcacccagactcctgctcccgctgaggatccacattctggatgtagggacccagtgccagccagacctcaagcatgccatcctaagtctcaggagacacgctttgaaggacctctgccgcctccaccgccagccgcagcagcacctcccccacctgcacctgctcagactgctcaggcaccttag

SEQ ID NO: 343737 - DNA, 678 bp, Artificial Sequence
  derived and/or modified sequence
atgcctgggacccagacccctgcccctgctgaggaccctcactccggttgcagagacccggtaccggctaggccccaggcctgtcacccaaagtcccaggagacccgttttgaaggccctctcccacctccgccacccgcagcagcggcacctcccccaccagcccctgctcagaccgcacaggctccagggtttgttgtccccacacatgccggaactgttggcacccttccactgggagggtatgtggctcccggataccctcttcaactgcagccctgcacagcctacgtgcccgtgtatcccgtagggactccttatgccggtggaactcccggaggcactggagtcacaagtaccctccctccccctccgcaggggccaggtctggctttactggagccaaggcggccaccgcatgactacatgcccatcgccgttctaaccactatctgctgtttttggcccactggaatcatcgcaatttttaaggccgtgcaggttaggacagccctcgccagaggggacatggtctcagcagagatcgccagccgtgaagcgcgtaactttagcttcatctccttggctgtagggattgctgccatggtgctgtgtactattctcactgtcgtgattattatagcagctcagcatcacgaaaattactgggacccatag

SEQ ID NO: 343738 - DNA, 192 bp, Artificial Sequence
  derived and/or modified sequence
atgccgggaacccagactcctgcccctgccgaagacccgcactccggatgccgggatcccgtgccagcaaggccacaggcatgtcaccctaagtcgcaggagacgaggttcgaaggaccactgcccccacctcccccagcagctgccgctccccctcctcccgctccggcacagacagcacaggctccctag

SEQ ID NO: 343739 - DNA, 192 bp, Artificial Sequence
  derived and/or modified sequence
atgccaggtacccaaacaccagcccctgcagaggacccacatagcggttgccgagaccccgtcccagccagaccacaggcatgccacccaaagtcccaggaaacccggttcgagggcccactgcccccacccccacccgctgctgcagccccacccccacctgcgcctgcccagaccgcacaggccccttag

SEQ ID NO: 343740 - DNA, 192 bp, Artificial Sequence
  derived and/or modified sequence
atgccaggcacacaaacaccagccccagcggaagatccccactctggctgccgagatcctgtgcccgcacggcctcaggcttgtcacccaaaaagccaggagacacgcttcgaggggcctttacctccgccaccaccagctgcagctgcacctcctccacctgcgccagctcagaccgctcaagcgccttag

SEQ ID NO: 343741 - DNA, 678 bp, Artificial Sequence
  derived and/or modified sequence
atgccaggaactcagaccccagctcccgcagaggatccacatagcggctgtagggaccctgtgcccgcaaggccacaggcgtgccacccaaagtcccaggagacacgctttgaggggcctctccctccccctccacctgccgctgcagccccaccaccacccgcaccggcacaaacagcccaagcgccagggtttgtggtccctacccacgctggcaccgtgggaaccttgcctctcggcggttatgtggcccctggctacccattgcaactacagccatgtaccgcatatgtccctgtgtacccagtaggcactccatacgccggaggtactcccggtgggacaggggtgacctccactcttccccctccgcctcagggtcctgggctagccctgctggagccacggcgaccccctcacgattacatgccgatcgcagtgctgaccacgatttgctgtttctggcccaccgggattatcgcaatcttcaaggctgtacaagtgaggacagcgctggccaggggcgacatggtctccgccgagatagcgagtagggaggcgcgtaatttctcttttattagcctagctgttggcattgccgctatggtcctctgtaccattctcaccgtagttataatcatagccgcacaacatcacgaaaactactgggatccttag

SEQ ID NO: 343742 - DNA, 192 bp, Artificial Sequence
  derived and/or modified sequence
atgccgggaactcagaccccagcaccagcagaagatcctcacagcggctgtcgagacccagtccctgccagaccacaggcgtgccatcccaaatcacaggagacaagatttgagggccctttgccacctccgccaccagccgctgctgctccacccccacctgcccctgctcagaccgcccaggccccttag

SEQ ID NO: 343743 - DNA, 678 bp, Artificial Sequence
  derived and/or modified sequence
atgccgggaactcagacccccgctcccgctgaggacccacacagtggctgccgggacccggtcccggctagaccacaggcgtgtcatcctaagtcccaggaaactagattcgagggacctcttccaccgccacctcccgcagcggcagctcctcctcctcctgccccagcgcaaaccgcccaggctcctggctttgtcgtccccacccacgccggaaccgtggggacattgcccctgggaggttacgtggctcctggatacccactgcagctgcaaccatgcacagcctatgttccagtgtatcccgtcgggacaccttacgccggaggcacacccggaggcacaggcgttacctcaactctgccaccaccccctcagggtccgggtctagcgttgcttgagcccaggcgaccaccacacgactacatgcccatcgccgtgcttaccacaatctgctgtttttggcctactgggataatcgcgattttcaaggccgtacaagtcagaaccgcactagccagaggagatatggtgagcgcagagatcgcctcacgggaggcacgcaatttctcctttattagcctggcggtcggaatagccgctatggtgctttgtacaattttgactgtggtcattataatcgctgcccagcaccatgagaactactgggacccctag

SEQ ID NO: 343744 - DNA, 678 bp, Artificial Sequence
  derived and/or modified sequence
atgccgggaactcaaacaccagccccagctgaggacccgcattcggggtgccgagatcccgtgccagctcgccctcaggcctgtcaccccaagtcccaggagacccggtttgagggtcctctgcctccaccaccgcctgccgcagccgctcctccgccacccgctcctgcgcagaccgcccaggctccaggctttgttgtcccgactcacgcaggaaccgtcgggaccctgcctctgggcggttacgttgctcccggttatcccttacagctgcaaccatgtaccgcatacgtccctgtgtatccagtcggtactccgtatgcaggcggaacgcctggtggcaccggagttacttcaacactccctccaccccctcagggtccaggcctggctctgctggaaccacgtaggccaccccatgattacatgccaatcgcagtcttaactacaatctgctgtttctggcctacgggcattattgccattttcaaagctgtgcaggttcgtactgcattagcccgaggcgacatggtgtctgcggagatcgccagtcgggaggcaagaaactttagcttcatatccctggctgtggggattgccgctatggtgctgtgtacgatactcactgtggtaatcattatcgctgctcagcaccacgagaactactgggatccttag

SEQ ID NO: 343745 - DNA, 192 bp, Artificial Sequence
  derived and/or modified sequence
atgcccggaacacagacacccgctccagcggaagatcctcatagtggctgtcgtgacccagtgcctgctcggccacaggcctgccacccaaaaagccaggagactcgctttgaggggccattgccccctccacccccagcagcggctgccccaccccctccagcgccagcgcagactgcccaggccccatag

SEQ ID NO: 343746 - DNA, 678 bp, Artificial Sequence
  derived and/or modified sequence
atgcccggaactcagacccctgcgccagccgaggatccccacagcggatgtcgggatcctgtgcctgctagaccgcaggcatgtcacccaaaaagtcaggagacacgattcgagggaccattgccccctcctccccctgcagccgcagcacctcctcctcccgctcctgcacaaacggctcaggcgcctgggttcgtcgttcccactcacgccggaaccgtgggcacgctgcctttggggggatacgtggcgccaggttaccctctccagctccagccatgcacggcctatgtcccggtatatccagtagggaccccatacgctggagggacacctggtgggactggcgtgacctcaactctccccccacctccacagggacctggcttagcattgctggaaccaaggcgaccaccgcacgactatatgcctatcgcggtgctgacaacgatttgctgcttctggcccaccgggatcatcgccatcttcaaggctgtgcaggttcgtacggccttagctagaggcgacatggttagtgctgagatagcctcccgggaagctaggaacttctcttttatttcgctcgccgtcggcatagccgctatggtgctatgcacaattcttacagtggttataatcattgccgctcagcaccacgaaaactattgggatccttag

SEQ ID NO: 343747 - DNA, 678 bp, Artificial Sequence
  derived and/or modified sequence
atgcctggcactcagacaccagctcccgcagaagacccccactccggatgtcgggacccggttcctgctcggcctcaggcatgtcacccaaaaagccaggaaacgagatttgagggccctcttccacctcctccccctgctgcggctgctccacctcccccagcgcctgcacagaccgctcaggcccctggctttgtggtgcccacacacgcgggaaccgtcgggaccctgcccctcggagggtatgtggccccagggtacccactgcagttgcagccctgcacggcttacgtgcctgtgtatcccgtcggaaccccatatgccggtgggacgccaggcggaacaggcgtgacaagcacccttccacccccaccacaaggacccggtctggccctgctagagccacggcgacctccccacgactacatgcctatcgcagttctgacgaccatctgctgtttctggcctactggaattatagcaatattcaaagcggtgcaagtgcggacagcactggcacgtggagacatggtttcagcagagattgccagtcgcgaagctcgaaatttttcattcatctcgttggctgtggggatcgcagcgatggtcctgtgtactatcctcacggtggttattattatagcagcacagcatcatgaaaactactgggacccatag

SEQ ID NO: 343748 - DNA, 678 bp, Artificial Sequence
  derived and/or modified sequence
atgcctgggacacagacacccgctcctgcggaggatccccacagcggctgtcgggacccagtaccagctagaccccaggcctgtcaccctaaatcccaagagactcgcttcgagggacctctgccccctcctcctcccgctgccgcagcccctccaccccctgcaccagcccagacagcccaggctcccggtttcgtcgtgcctacgcatgccggaacggtcggcacgctgccactgggtggttacgtcgcccctggatacccactccagctgcaaccatgcacagcctacgtgcccgtatacccagtggggactccttatgccggtggaacacccggtgggacaggcgttaccagcacactgcctcccccacctcagggacccggtcttgcgctgctggaaccccgacggccacctcacgactatatgccaatcgcagttttgactacaatctgttgtttctggcctaccggcattattgctatattcaaggctgtgcaagtgcgcaccgccctggctcgcggtgacatggttagcgctgaaattgcctcacgcgaagccaggaactttagcttcatatcactggcagtgggcatagcggcaatggtcttgtgcaccattctgacagtcgtgatcataattgcagcccagcatcatgagaattactgggatccttag

SEQ ID NO: 343749 - DNA, 678 bp, Artificial Sequence
  derived and/or modified sequence
atgcccggaacccagactcccgctccagctgaggatccacactccggttgtcgggaccccgtaccagccagacctcaagcctgccaccccaaaagccaagagacccgttttgaaggacccctcccccctccaccaccagccgcagcggctccacctccgccagctcccgctcagacagcccaggcacccggttttgtagttcccacacacgcaggtaccgttggcaccctcccactaggcggatatgtggcgccaggctaccccctgcaattgcagccgtgtactgcttacgtcccagtctaccctgtgggaaccccatacgccggtggcactcctggaggtacaggagttacttccacgttacctcctcctccccagggtccagggctggccctattagaaccgaggcggcctccacatgattacatgccaattgcggtcctgacaactatttgctgtttctggcccacggggatcattgcaattttcaaggcggtgcaggtgcgcacagccctagctcggggagacatggtcagtgccgaaatcgcgtcccgggaggctaggaacttcagtttcattagcctggcggtggggatcgctgcaatggtcctgtgcacgatcctcacagtagtcataattatagcagctcagcaccacgaaaattactgggacccctag

SEQ ID NO: 343750 - DNA, 678 bp, Artificial Sequence
  derived and/or modified sequence
atgcctggcactcagacacccgctcccgcagaagatcctcactcaggctgtagagacccagtccctgcaaggcctcaggcctgtcatccaaaaagccaggaaacgcggttcgaaggccctttgccaccaccacccccagccgcagctgccccaccgcctcccgctcccgctcagaccgcgcaggcaccaggctttgtggtgcctactcacgccggaacagtgggcacactgcccctcggtggctacgtcgcccctgggtaccccctgcaacttcaaccgtgtaccgcttatgtgccggtgtaccccgtgggtacaccatacgccggtggcacccccggagggaccggcgtgacatcaaccctcccacctcctcctcaaggaccaggtcttgctctcttggaaccacggagaccccctcacgattatatgccaattgccgttctgacaacaatctgctgcttttggcctacaggtataatcgcgatcttcaaggccgtgcaggtcaggactgccctggctcgcggtgatatggtgtccgcagagatcgcctcccgtgaggcaagaaatttctccttcatctcattggctgtgggcattgccgctatggtgttgtgcacaattctcaccgtggtcattattatcgcagcccagcatcatgaaaattattgggacccctag

SEQ ID NO: 343751 - DNA, 678 bp, Artificial Sequence
  derived and/or modified sequence
atgcccggaacccagactcccgcaccggctgaagacccacacagcggctgccgagatcctgtgccggctcggccacaggcctgccatcccaaaagtcaagagactcgatttgagggccctctgcccccaccccctcctgccgctgctgccccaccgcctcctgcccctgcccagaccgctcaggctcccggtttcgtggtgcccacccacgccggaaccgtcggaacactaccactggggggatacgtagctccaggctacccacttcagctgcaaccgtgtactgcctacgtccctgtttatccagtcgggaccccctatgcgggaggcacaccgggaggaacaggcgtaacgagtaccttgccaccccctccccagggcccaggattggcattactggagccaaggaggccgccacacgattacatgccaattgccgtcttgactaccatctgctgcttctggcctaccgggattatcgcaatttttaaggccgtgcaagttcggaccgctttggctagaggcgacatggtttctgccgaaatcgcctcccgcgaagccagaaacttttcttttatctcactcgcagtgggcatcgctgcgatggtcctctgcacaatcttgacagttgttatcataatcgctgcacagcaccatgaaaattactgggacccgtag

SEQ ID NO: 343752 - DNA, 678 bp, Artificial Sequence
  derived and/or modified sequence
atgcctggtacacagacaccggctccagcagaggatccgcactcaggatgccgcgacccagtgcctgccagacctcaggcttgtcaccccaaatcacaagagacacgctttgaaggacccttacccccacctccccctgcggcagccgctccacccccaccagcacctgcacagacagcacaggctcctggatttgtggttcctacgcacgctggcaccgtgggcacattgccactggggggatacgtggcccctgggtaccctttgcaactacagccatgcactgcctatgtcccagtataccctgtcggaactccctatgctgggggtaccccaggaggcaccggcgttacttccactctgccacccccaccacagggacctgggctggccctgcttgagccaagaagacctcctcatgattatatgcccattgccgtgctgacaactatctgttgcttttggccaacggggataattgccatcttcaaggcagtccaagtcagaaccgcattggcacgcggtgatatggtttccgctgagatcgctagtcgtgaggcacggaatttctctttcatctcgttggctgtgggcattgccgctatggtgctttgtacgatcctcacagttgttattataatcgccgcacaacaccacgagaattattgggatccctag

SEQ ID NO: 343753 - protein, 238 aa, Artificial Sequence
  derived and/or modified sequence
MENFVQSSGEDGIVVFSLGSLFQNVTEEKANIIASALAQIPQKVLWRYKGKKPSTLGANTRLYDWIPQNDLLGHPKTKAFITHGGMNGIYEAIYHGVPMVGVPIFGDQLDNIAHMKAKGAAVEINFKTMTSEDLLRALRTVITDSSYKENAMRLSRIHHDQPVKPLDRAVFWIEFVMRHKGAKHLRSAAHDLTWFQHYSIDVIGFLLACVATAIFLFTKCFLFSCQKFNKTRKIEKRE

SEQ ID NO: 343754 - DNA, 1638 bp, Artificial Sequence
  derived and/or modified sequence
cttatgaagaagctacaggaaaccaactacgatgtaatgcttatagaccctgtgattccctgtggagacctgatggctgagttgcttgcagtcccttttgtgctcacacttagaatttctgtaggaggcaatatggagcgaagctgtgggaaacttccagctccactttcctatgtacctgtgcctatgacaggactaacagacagaatgacctttctggaaagagtaaaaaattcaatgctttcagttttgttccacttctggattcaggattacgactatcatttttgggaagagttttatagtaaggcattaggaaggcccactacattatgtgagactgtgggaaaagctgagatatggctaatacgaacatattgggattttgaatttcctcaaccataccaacctaactttgagtttgttggaggattgcactgtaaacctgccaaagctttgcctaaggaaagttataccagaaaaccaagctctcttaagccatggcatctgtatctaaaatagaaatacagaaggagagctgacaatttccatcattctctaggaaatggaaaattttgtccagagttcaggggaagatggtattgtggtgttttctctggggtcactgtttcaaaatgttacagaagaaaaggctaatatcattgcttcagcccttgcccagatcccacagaaggtgttatggaggtacaaaggaaaaaaaccatccacattaggagccaatactcggctgtatgattggataccccagaatgatcttcttggtcatcccaaaaccaaagcttttatcactcatggtggaatgaatgggatctatgaagctatttaccatggggtccctatggtgggagttcccatatttggtgatcagcttgataacatagctcacatgaaggccaaaggagcagctgtagaaataaacttcaaaactatgacaagcgaagatttactgagggctttgagaacagtcattaccgattcctcttataaagagaatgctatgagattatcaagaattcaccatgatcaacctgtaaagcccctagatcgagcagtcttctggatcgagtttgtcatgcgccacaaaggagccaagcacctgcgatcagctgcccatgacctcacctggttccagcactactctatagatgtgattgggttcctgctggcctgtgtggcaactgctatattcttgttcacaaaatgttttttattttcctgtcaaaaatttaataaaactagaaagatagaaaagagggaatagatctttccaaattcaagaaagacctgatggggtaatcctgttaattccagccacatagaatttggtgaaaaccttgctattttcatattatctattctgttattttatcttagctatatagcctagaattccacgatcatgaggttgtgagtatatctcattctttcgttgtattttcctaggtgtctttactctcttctctcactttgtgacacaaggacatgaatacatctaaattttcctatttctgatatgactgttttgatgatgtcattacttctataaccttaagtgatagggtgacatgcaatatgattattcctggtgtgcgcccaaacacatggatataaagaggt

SEQ ID NO: 343755 - protein, 373 aa, Artificial Sequence [sequence omitted]

SEQ ID NO: 343756 - DNA, 1122 bp, Artificial Sequence
  derived and/or modified sequence
atgttcctggccgacgtgcccaccagcctgcacttccagagcatgctgaagagccagtggcagaacaagcccttcgacaagatcaagccccccaagaagctgagcctgaagcacagagcccccatgcccggcagcctgcccgaccccgccagaaaggacagacacaagctggtgagcagcttcctgaccaccgccatgctgaagcaccacaccgacatgagcagcagcagctacctggccgccacccaccaccccccccacagccccctggtgagacagctgagcaccagcagcgacagccccgcccccgccagcagcagcagccaggtgaccgccagcaccagccagcagcccgtgagaagaagaagaggcgagagcagcttcgacatcaacaacatcgtgatccccatgagcgtggccgccaccaccagagtggagaagctgcagtacaaggagatcctgacccccagctggagagaggtggacctgcagagcctgaagggcagccccgacgaggagaacgaggagatcgaggacctgagcgacgccgccttcgccgccctgcacgccaagtgcgaggagatggagagagccagatggctgtggaccaccagcgtgcccccccagagaagaggcagcagaagctacagaagcagcgacggcagaaccaccccccagctgggcagcgccaaccccagcaccccccagcccgccagccccgacgtgagcagcagccacagcctgagcgagtacagccacggccagagccccagaagccccatcagccccgagctgcacagcgcccccctgacccccgtggccagagacacccccagacacctggccagcgaggacaccagatgcagcacccccgagctgggcctggacgagcagagcgtgcagccctgggagagaagaaccttccccctggcccacagcccccaggccgagtgcgaggaccagctggacgcccaggagagagccgccagatgcaccagaagaaccagcggcagcaagaccggcagagagaccgaggccgcccccaccagcccccccaccgtgcccctgaagagcagacacctggtggccgccgccaccgcccagagacccacccacagatag

SEQ ID NO: 343757 - DNA, 1122 bp, Artificial Sequence
  derived and/or modified sequence
atgttccttgccgacgtgccgacctccttgcatttccaaagcatgctgaaatctcagtggcaaaacaagccctttgacaaaatcaaacccccaaagaaactgtcactcaagcacagggcgcccatgcccggttctctcccagacccagcgcgaaaagaccggcataagctggtgtccagctttctgacgaccgccatgctaaaacatcacacagatatgtctagctcaagctatttggccgctacacaccacccaccccattccccccttgtgaggcaactgagtacgtcgtctgatagccctgcgccagcatcaagctcctcccaggtgaccgctagcacttctcagcaaccggtccgcagaagaaggggagaaagttctttcgatataaataacatcgtaattcctatgagtgtggcagcaacgacccgcgtggagaaactgcagtataaggaaattctcactccatcttggcgggaagtggacttgcagagtctcaaagggtctccagacgaggagaatgaagagattgaggacctgtccgatgcagcttttgccgcgctacacgcaaagtgcgaggagatggaacgagcccgctggctgtggactaccagcgttcctcctcagcgccgagggtcgagatcctaccggtcttctgacggccgaactacgccacagcttggtagcgctaatccaagtaccccgcaacccgctagccccgatgttagttcctcgcatagtttatctgaatactcgcacggccagtccccaagaagccccatatcccctgagctccactccgctccactaacacctgtcgcccgcgacactcccaggcacctggcgagcgaggacaccaggtgttcgacccccgagctcggccttgacgagcagagcgtgcagccttgggagaggcggacatttccccttgcgcacagtcctcaggcagaatgtgaggaccagttggacgctcaggagcgcgccgcgcgctgcacccgacgcacaagtggcagtaaaacagggcgagaaacagaggccgctccaacaagcccgcccaccgtgcccctcaagtcacggcatcttgtggccgctgctaccgcccagaggcccacccacagatag

SEQ ID NO: 343758 - DNA, 1122 bp, Artificial Sequence
  derived and/or modified sequence
atgttcctggctgatgtgcccaccagcctgcacttccagagcatgctgaagagccagtggcagaacaagccctttgacaagatcaagccacccaagaagctgagcctgaagcaccgggcccccatgcctggcagcctgcctgaccctgccaggaaggacagacacaagctggtgagcagcttcctgaccacagccatgctgaagcaccacacagacatgagcagcagcagctacctggccgccacccaccaccccccccacagccccctggtgcggcagctgagcaccagcagtgacagccctgccccagccagcagcagcagccaggtgacagccagcaccagccagcagcctgtgagaagaagaagaggagagagcagctttgacatcaacaacatcgtcatccccatgtctgtggccgccaccaccagggtggagaagctgcagtacaaggagatcctgacccccagctggagggaggtggacctgcagagcctgaagggcagcccagatgaagaaaatgaggagattgaggacctgagtgatgctgcctttgctgccctgcacgccaagtgtgaggagatggagcgggcccgctggctgtggaccacctctgtgcccccccagaggcggggcagccgcagctaccgcagcagtgatggccgcaccaccccccagctgggcagcgccaaccccagcaccccccagcctgccagcccagatgtgagcagcagccacagcctgtctgagtacagccacggccagagccccaggagccccatcagccctgagctgcacagcgcccccctgacccctgtggcccgggacacccccaggcacctggccagcgaggacacccgctgcagcaccccagagctgggcctggatgagcagagcgtgcagccctgggagaggaggaccttccccctggcccacagcccccaggctgaatgtgaggaccagctggatgcccaggagcgggccgcccgctgcaccaggaggaccagcggcagcaagacaggccgggagacagaggccgcccccaccagccccccaacagtgcccctgaagagccgccacctggtggccgccgccacagcccagaggcccacccacaggtag

SEQ ID NO: 343759 - DNA, 1122 bp, Artificial Sequence
  derived and/or modified sequence
atgttcctggccgacgtgcccaccagcctgcacttccagagcatgctgaaatcgcagtggcagaacaagcctttcgacaaaattaaaccccctaagaagcttagcctaaagcatcgggccccaatgcctgggtcgctcccagatccagccagaaaggataggcataaattagtaagctccttcctgactaccgccatgctcaagcaccacaccgacatgagtagttcctcttacttggccgctacccaccatcctcctcattctcccctcgttcgccagcttagtactagcagcgattcaccagcccccgcaagctcatcttctcaggtcacagcttcgacgagccagcagcccgtgcgccgacggaggggggaatcctcgtttgatatcaacaatattgtcattccaatgtctgtagctgcaaccaccagggtggaaaagttgcagtacaaggagattcttacacccagctggcgcgaggtagatctgcagtctctgaaaggctccccagatgaggaaaacgaggaaatagaagacttaagtgacgcggcctttgccgccctccacgctaagtgcgaggaaatggagagagctcgatggctgtggaccacctccgttccgccccagaggaggggttccagatcatataggtcctcagacgggcgcactacaccacagttgggatcggcgaatcctagcactccacagcctgcctcacccgatgtctcatcaagccattccttaagtgagtactcacacggtcagtcgcctcgctcaccaatatctcccgaactgcactctgctcccctaacccctgtcgcacgtgacacccctagacaccttgcatcagaggatacacgttgtagcaccccggagctgggccttgacgagcagagtgtgcaaccatgggagcggcggacctttcccctggcccactcgccccaggctgagtgtgaggatcagttggatgcccaggaaagggccgctcgctgtacgcggaggacatcaggctctaagacgggaagagagaccgaggccgcacccactagccctccaaccgtccctctgaagtctcgccacctcgtggctgccgccacagctcagcggccaacccaccgttag

SEQ ID NO: 343760 - DNA, 1122 bp, Artificial Sequence
  derived and/or modified sequence
atgttccttgccgacgtgccaacatctctgcatttccaatcgatgctgaagagccagtggcagaacaagcccttcgataagattaagcctcccaagaaactgtcgctgaagcatcgagccccaatgcccggatccctccccgatcccgcaagaaaggaccgccataagttggtaagtagcttccttacaaccgccatgcttaaacaccacaccgacatgtcctcttcaagctacctggccgctacacaccatccccctcactcaccgttagtcagacaactgtcgacgtctagcgatagccccgcacctgcatcaagctcgtcgcaggttaccgcttcaacttcccagcagccagtgcgacgtagacgcggagaatcatcttttgatatcaataacatagttatccctatgtcggtagccgctacaaccagggttgagaaactccagtacaaagaaatcctcacccccagctggagggaagtagaccttcagtctttgaaaggatccccggacgaagagaacgaagaaatcgaagatctctcagatgccgcatttgccgctctgcacgcaaagtgcgaagagatggaaagggcccgatggctctggactacctccgtgccccctcagaggagaggctcccggtcttatcgatcctctgacggccgtacaactccacaactggggagcgccaacccatctaccccacagcctgccagccctgacgtctcatcttcccatagcttgtcagagtacagccacgggcaatccccgagaagccctatcagtcctgagctgcactctgccccactgacccccgtggcgcgagataccccaaggcaccttgcttccgaggataccaggtgtagcactcccgagctgggcctcgacgagcagtctgttcaaccttgggagcgtcggaccttccccctcgcacacagcccacaagccgagtgcgaggaccagctggacgcccaggagcgcgcagctagatgcacgagacgcactagcggatccaagaccgggagagagacagaagccgctccaaccagccccccaaccgtccccttgaagagtagacacctcgtggcagcagccacagcgcaacgccctacccaccggtag

SEQ ID NO: 343761 - DNA, 2804 bp, Artificial Sequence
  derived and/or modified sequence
ctgcttgcaaatagaagaatgaccttcagtaatgctcacgtaaacagatcttccatatgacagcacttgccctgccaagtgtcaggccactgggcaaattaaaggaggatggagtgtaggtcttgaacactagagaggccaggtgtttggactaacctgtagcattttatgtttcttgcagatgttcccacaagcctgcatttccagagcatgctgaaatctcagtggcagaacaagccttttgacaaaatcaaacctcccaaaaagttatcgcttaagcacagagcacccatgccgggcagtctgccagatccagctcgtaaggacaggcacaaattggtcagctccttcctaacaacagccatgttgaagcatcacacagacatgagcagttcgagctacttggcagccacccaccatcctccacacagtcccttggtgcgacagctctccacctcctcagattcccctgcacccgccagctctagctcacaggttacagccagcacatcgcagcagccagtaaggaggagaaggggagagagctcattcgatattaacaacattgtcatcccaatgtctgttgctgcaacaactcgcgtagagaaactgcaatacaaggaaatccttacgcccagctggcgggaggttgatcttcagtctctgaaggggagtcctgatgaggagaatgaagagattgaggacctatccgatgcagcctttgccgccctgcatgccaaatgtgaggagatggagagggcacggtggctgtggaccacgagtgtgccaccccagcggcggggcagcaggtcctacaggtcatcagacggccggacaaccccccagctgggcagtgccaacccctccaccccccagcctgcctcccctgatgtcagcagtagccactctttgtcagaatactcccatggtcagtcccctaggagccccattagcccggaactgcactcagcacccctcacccctgtggctcgggacactccgcgacacttagccagtgaggatacccgttgttccacaccagagctggggctggatgaacagtctgtccagccctgggagcggcggaccttccccctggcgcacagtccccaggcggagtgtgaggaccagctggatgcacaggagcgagcagcccgctgcactcgacgcacctcaggcagcaagactggccgggagacagaggcagcgcccacctcgcctcccactgtccccctcaagagtcggcatctggtggcagcagccacagctcagcgcccgactcacagatgagcgggagacagccatctaaacagactcactaactattggcattaaagcttcagaaatctctgcgtttgatattcaaacatcatatgccggaaattttcacagtttttagtgaacttaaggaatttagatcctactttggtatttttttttcttgttttaatttttgttttgtttttgtttccatgttttcttgtcacacacctgagcacttcctcccgttggcaaacagaagttcaggatgagaccctgctggcctggtcctggcacatcctctgcactgttgaatcactggacttactgatcttagatgaccaccccctccctcacacctgtgggcagggcagaacagcctggcgggcagagggctacagtttagcatggccttcttgagctagggtggaatggggcagggtgctctggactcttaccccctcccctcccatctgtggcttggctctgctgtggccctcctggctgggtccccttggttttttgtgctggaacatccccaccagagcctctctgccataactgccagctgctctccccgagtgctcagctggcagaacacctttcctttctcacccagaacttaagagactgattttttgtttcatctgcatttggtcttctctgttttgactctctcactgcagtaacctggctgtggctgctcaggttcccctcctcatgccccttggtacccttccctgtctgctctcccatgccatgtacacacccacaacccatccttccacttggaatatttttaccacctatcctgatctttgaaggtagggttaggactacttaacctctattcccactcccctgcaaactgggggttgtgggaagtgagcagccatctccctgtgtgattttttttttttttccctctgattcactttgccatgtttccttcacatccagatccctgtcggtgttagttccactcttggtctttcacgctccccttgcctgtggaacattgtctggtcctagctgtggttcccattgttcccccttcacccttctctgttaaccttgtgcctgtctcctgtatgatcacatcaccaaaaagggggaggggggagaagactctttttttttggccattttgtaatcgtataaaaatagtagacaactgcttaatggttggggttttttcacaattttcaacattagtgatttttttttctgtttgcaagttaaagggtttgtcattgtttctttaaaaaaaaaatacaataatgcaccatatccctatgcataaagtgcttcttctatttataaggttgaaaattctgaataacccttttagcattgaaaaaaaaacaaaaacaaaaaatggaaaaaaaaaccttgtattttgtaaatattttcttttcctgctttggagctgtgtaatggcagcgaaacatgtagctgtctttgttctatagaaatgcttttcttcagagaagctgatctttgttaatgtcttgattctgttcgcaaagcacagactagtgctt

SEQ ID NO: 343762 - protein, 753 aa, Artificial Sequence
  derived and/or modified sequence
MEFHRVAQAGVELLSSGDPPASASQSVGIIGVSHCTWHINFQGNYISYIDGNVWKAYSWTEKLILRENNLTELHKDSFEGLLSLQYLILNHNPLTTVEDPYLFKLPALKYLDMGTTLVPLTTLKNILMMTVELEKLILPSHMACCLCQFKNSIEAVCKTVKLHCNSACLTNTTHCPEEASVGNPEGAFMKVLQARKNYTSTELIVEPEEPSDSSGINLSGFGSEQLDTNDESDFISTLRYILPYFSAVNLDVKSLLLPLIKLPTTGNSLAKIQTVGQNRQRVKRVLMGPRSIQKRHFKEVGRQSIRREQGAQASVENAAEEKRLGSPAPREVEQPHTQQGPEKLAGNAVYTKPSFTQEHKAAVSVLKPFSKGAPSTSSPAKALPQVRDRWKDLTHAISTLESAKARVTNTKTSKPIVHARKKYRFHKTRSHVTHRTPKVKKSPKVRKKSYLSRLMLANRLPFSAAKSLINSPSQGAFSSLGDLSPQENPFLEVSAPSEHFIEKNNTKHTTARNAFEENDFMENTNMPEGTISENTNYNHPPEADSAGTAFNLGPTVKQTETKWEYNNVGTDLSPEPKSFNYPLLSSPGDQFEIQLTQQLQSLIPNNNVRRLIAHVIRTLKMDCSGAHVQVTCAKLISRTGHLMKLLSGQQEVKASKIEWDTDQWKIENYINESTEAQSEQKEKSLELKKEVPGYGYTDKLILALIVTGILTILIILFCLIVICCHRRSLQEDEEGFSRDSEAPTEEEESEALP

SEQ ID NO: 343763 - protein, 779 aa, Artificial Sequence
  derived and/or modified sequence
MGKSEGPVGMVESAGRAGQKRPGFLEGGLLLLLLLVTAALVALGVLYADRRGKQLPRLASRLCFLQEERTFVKRKPRGIPEAQEVSEVCTTPGCVIAAARILQNMDPTTEPCDDFYQFACGGWLRRHVIPETNSRYSIFDVLRDELEVILKAVLENSTAKDRPAVEKARTLYRSCMNQSVIEKRGSQPLLDILEVVGGWPVAMDRWNETVGLEWELERQLALMNSQFNRRVLIDLFIWNDDQNSSRHIIYIDQPTLGMPSREYYFNGGSNRKVREAYLQFMVSVATLLREDANLPRDSCLVQEDMVQVLELETQLAKATVPQEERHDVIALYHRMGLEELQSQFGLKGFNWTLFIQTVLSSVKIKLLPDEEVVVYGIPYLQNLENIIDTYSARTIQNYLVWRLVLDRIGSLSQRFKDTRVNYRKALFGTMVEEVRWRECVGYVNSNMENAVGSLYVREAFPGDSKSMVRELIDKVRTVFVETLDELGWMDEESKKKAQEKAMSIREQIGHPDYILEEMNRRLDEEYSNLNFSEDLYFENSLQNLKVGAQRSLRKLREKVDPNLWIIGAAVVNAFYSPNRNQIVFPAGILQPPFFSKEQPQALNFGGIGMVIGHEITHGFDDNGRNFDKNGNMMDWWSNFSTQHFREQSECMIYQYGNYSWDLADEQNVNGFNTLGENIADNGGVRQAYKAYLKWMAEGGKDQQLPGLDLTHEQLFFINYAQVWCGSYRPEFAIQSIKTDVHSPLKYRVLGSLQNLAAFADTFHCARGTPMHPKERCRVW

SEQ ID NO: 343764 - protein, 770 aa, Artificial Sequence
  derived and/or modified sequence
MVESAGRAGQKRPGFLEGGLLLLLLLVTAALVALGVLYADRRGKQLPRLASRLCFLQEERTFVKRKPRGIPEAQEVSEVCTTPGCVIAAARILQNMDPTTEPCDDFYQFACGGWLRRHVIPETNSRYSIFDVLRDELEVILKAVLENSTAKDRPAVEKARTLYRSCMNQSVIEKRGSQPLLDILEVVGGWPVAMDRWNETVGLEWELERQLALMNSQFNRRVLIDLFIWNDDQNSSRHIIYIDQPTLGMPSREYYFNGGSNRKVREAYLQFMVSVATLLREDANLPRDSCLVQEDMVQVLELETQLAKATVPQEERHDVIALYHRMGLEELQSQFGLKGFNWTLFIQTVLSSVKIKLLPDEEVVVYGIPYLQNLENIIDTYSARTIQNYLVWRLVLDRIGSLSQRFKDTRVNYRKALFGTMVEEVRWRECVGYVNSNMENAVGSLYVREAFPGDSKSMVRELIDKVRTVFVETLDELGWMDEESKKKAQEKAMSIREQIGHPDYILEEMNRRLDEEYSNLNFSEDLYFENSLQNLKVGAQRSLRKLREKVDPNLWIIGAAVVNAFYSPNRNQIVFPAGILQPPFFSKEQPQALNFGGIGMVIGHEITHGFDDNGRNFDKNGNMMDWWSNFSTQHFREQSECMIYQYGNYSWDLADEQNVNGFNTLGENIADNGGVRQAYKAYLKWMAEGGKDQQLPGLDLTHEQLFFINYAQVWCGSYRPEFAIQSIKTDVHSPLKYRVLGSLQNLAAFADTFHCARGTPMHPKERCRVW

SEQ ID NO: 343765 - DNA, 2313 bp, Artificial Sequence
  derived and/or modified sequence
atggtggagagcgcaggcagagccggacaaaagcgacctggattcttggaggggggtttgctgctgttgctactgctggtgaccgcagctctggtcgccctgggtgtgctgtacgctgatcgacggggaaaacaactcccaagattggcctcacgactctgcttccttcaggaggaaagaacttttgtcaagagaaagcccagaggtatccccgaggcccaggaagtgtccgaggtatgcacaacacccggttgcgtaattgctgccgcacgcatcctccagaacatggacccgacaaccgaaccttgtgatgacttctatcagtttgcgtgcggcggatggctgcggcgacatgtgatccccgagacaaattctcgctatagtattttcgacgtcctgcgggacgagctagaggtgatcctcaaggccgtgttggagaactctaccgcaaaggacagacctgccgtggagaaggcaagaaccctgtatcggagttgtatgaatcagtctgtgattgagaagcggggatcccagcctctgctggacatcctagaagtagtcggcggatggcccgttgccatggaccgatggaacgagaccgtcggcctcgagtgggagctcgaacggcaattggctttaatgaactctcaatttaataggcgcgtgctgatcgatcttttcatctggaacgatgatcagaatagttcacgccatatcatctacattgaccaaccgacccttggaatgccttccagggaatattactttaatggaggatccaatcgaaaggtgcgtgaggcataccttcagttcatggtgtccgttgcgacgttgttgcgagaagacgctaacttgccaagagattcttgtttggttcaggaagatatggttcaggtgcttgagcttgaaacacagctggccaaagcaaccgtaccacaagaagagcggcacgatgtgatcgcactctaccatcgtatgggtctcgaggaattacagtctcagtttgggctgaaaggctttaactggacactctttatacaaactgtgctgagtagcgttaagattaaattgctccctgatgaggaagtggtcgtgtacggaattccctatctgcagaacctcgagaatattatcgatacatactccgccagaaccatccagaattacctggtgtggaggctggtattagataggatcggatccttatcacagcgcttcaaggacactcgggtgaactaccgaaaggcattattcggcacaatggtggaagaggtccgctggcgcgagtgcgttggatatgtgaactccaacatggaaaatgcggtgggaagcttgtacgttagagaagctttcccaggcgactccaagtctatggtgagagaattaattgacaaagttagaactgtgtttgttgaaaccctggatgagcttggctggatggacgaagagagcaagaaaaaggcccaggagaaggccatgtcaattcgcgagcagatcgggcacccagactatatacttgaggagatgaaccgcaggctcgacgaagagtactctaaccttaatttctctgaggacctatactttgagaatagcctccaaaacctgaaggtcggggcacagaggagtctgagaaaacttagggaaaaggtggaccctaatttatggatcataggggcagcagtggtgaatgcattttactcacccaacaggaaccagattgtgttccccgctggtattctgcagccaccattcttcagcaaagagcagccgcaggccttaaactttggcggtattggcatggtgatcggccatgagattacacatggcttcgatgacaacggtcgaaatttcgataaaaatggtaacatgatggactggtggtccaactttagtacgcagcacttccgcgagcagtccgaatgtatgatctaccagtacggtaattattcttgggatttggccgatgagcagaacgtaaacggttttaataccctgggcgaaaacatagccgataatggcggtgttcgccaggcttacaaggcttatctaaagtggatggccgaggggggaaaagaccaacagcttccgggattagatctgacccatgaacagctgttttttattaactatgcccaagtgtggtgcggtagctaccgacctgagtttgccatacaaagcatcaagacagacgtccactccccgctcaagtacagggtcttgggatctctgcagaatctcgccgcatttgccgatactttccactgtgctcgcggtactccaatgcatccaaaggagaggtgccgagtctggtag

SEQ ID NO: 343766 - DNA, 2340 bp, Artificial Sequence
  derived and/or modified sequence
atgggcaagtccgaaggacccgtaggcatggtcgaatccgcgggacgggctggccagaagaggccaggtttcctggagggaggcctgctgttgcttttactactagtgactgcagctctagtggcgctaggtgtgctctatgcagatcggcgtggaaagcagcttccacgactggctagtagactttgtttcttacaggaggaaagaactttcgtgaaaagaaaaccccgtggtatccctgaggcacaggaggtgagcgaagtttgtacaactccaggatgtgtcatcgccgctgctcgcatactacagaatatggacccaactaccgagccctgtgacgacttctatcaattcgcctgtggtggttggctcaggaggcatgtgataccggagaccaactccagatattctatcttcgatgttcttagggatgagctcgaggtgatactcaaagcagtcttggaaaattctacggctaaggaccgaccagctgtcgagaaagctcgtactctgtaccgctcctgcatgaaccagtctgttattgaaaaacgcggtagccagccattgttagacatccttgaagtcgtcggtggctggcctgtggccatggacaggtggaacgaaactgtagggttggaatgggagttggaacgtcagctcgcactgatgaattcacagttcaaccgcagggtcttgatagacttattcatttggaacgacgatcagaatagctcaaggcacatcatctatatcgatcagcctacgctgggcatgcctagccgagagtattactttaatggcggatccaaccggaaagtgcgcgaggcctacctccagttcatggtaagtgtggccacgctcttgagagaagatgcaaacctgcccagagatagttgcctggtgcaggaagatatggttcaggtgttagagttggagactcagctggccaaagcgactgtcccccaagaggaacggcacgacgtgattgccctgtatcatcggatgggtctggaggaattacaatcacagttcgggttgaaaggctttaactggacattattcatccagaccgtcctgagcagtgtcaagatcaagttactgcctgacgaggaagtcgtggtgtacgggatcccttacctacagaacctggagaatattatcgacacttactcagccagaactatacagaactatttagtgtggaggttagtactggacagaatcggctctctgagtcaacggtttaaggatactcgagttaattacagaaaagctctctttgggaccatggtagaggaagttcggtggagggagtgtgtgggatacgtgaattccaatatggaaaatgcagtggggagcctatacgtccgagaagcctttccaggcgactctaagtcaatggtgcgggagcttattgataaggtacgcactgtttttgtggagacgctcgatgaactcgggtggatggacgaggagagcaagaagaaggcacaggagaaggcaatgtcaatccgcgaacagataggccacccagactacatcctggaagagatgaaccgcaggctggatgaagagtatagcaacttgaattttagcgaggatctatactttgagaacagcctgcaaaatctgaaggtgggcgctcagaggagtctaagaaaacttcgggagaaagtagaccctaatctttggataattggtgccgcagtggtcaatgccttctactcacccaataggaatcagatcgttttcccagctgggatcctgcagccacccttcttttcaaaagagcagccacaagcattgaacttcgggggaattggcatggttattgggcacgaaattacgcatggctttgacgacaacggccgtaatttcgataagaacggaaacatgatggactggtggtctaatttcagcacccagcatttcagggaacagagtgaatgcatgatctatcagtacggaaactacagctgggacctggccgacgagcaaaacgtgaatggcttcaacacgctcggcgagaacattgcggataacggcggagtgagacaggcttacaaggcatatctgaaatggatggcagaaggtggtaaggaccagcagctgccaggcctggacctgacccacgaacagttgttttttatcaattatgcccaggtctggtgcggatcctatcgacctgaatttgctatccaatctatcaaaaccgacgtccattcccccctgaagtacagggttctaggatccttgcaaaatttagccgcattcgctgatacattccactgcgcaaggggaacacctatgcatcctaaagaaagatgccgcgtatggtag

SEQ ID NO: 343767 - DNA, 2313 bp, Artificial Sequence
  derived and/or modified sequence
atggttgagtcagccggccgtgctggccaaaaaaggcctgggtttctcgaaggcgggctgcttctactcctgttgctagtgacagccgctctggtggcactgggcgttctgtacgctgatcgccgtggcaaacagctgcctcgactggcatctagactgtgttttttacaggaggagcgaacttttgtgaagcggaaaccacgaggaattccagaagctcaagaggtgagtgaggtgtgtacgactccaggctgtgtgattgccgccgccagaatcctgcagaatatggacccaactacggagccctgtgacgacttctaccagttcgcctgtggaggttggctccgaagacatgttatacctgagacaaatagcagatacagtatctttgatgtcctgcgcgatgagctggaagtaatcttaaaagccgtcctggaaaattcaacagcgaaagacagacccgctgtggagaaggccagaactctgtatagaagttgcatgaaccagagcgttattgagaagagaggctctcaaccattgctcgacatcctggaggtggtcggtggatggccagttgctatggaccgctggaatgagactgtgggacttgaatgggagcttgaacggcaactcgcgttgatgaactctcagttcaaccgccgtgtacttatagacctgttcatatggaatgacgatcaaaactctagccgccacatcatctacatcgatcagcccacactagggatgccctccagagagtactatttcaacggtggaagcaaccgcaaggtgagggaggcgtatctgcagtttatggtctcagtggctacacttctgagggaggatgccaatctgccaagggattcttgccttgttcaagaggatatggtgcaggtcctagaactggaaactcaactggccaaggccacggtcccacaggaagagcgccacgacgtcattgctctatatcaccgcatgggattggaggaactgcagtctcagtttggcctcaaaggattcaactggacattattcatacagaccgtgctgtcctcagtgaaaattaagctcctgccagacgaagaggtagtggtctatgggatcccctatttgcagaatttagagaatattatcgatacatacagtgcccggaccattcaaaactatctggtatggcgtctcgtcctggacaggataggtagcctctcacagagattcaaggatacccgcgtgaactaccggaaggcccttttcggtactatggtggaggaagttaggtggagggaatgtgtggggtatgtgaacagtaacatggagaacgccgtaggttccctttacgttcgagaggcttttccgggggactccaaatccatggtacgcgagcttattgacaaggtccgcacagtattcgtggaaacactggacgagcttggctggatggacgaggaatcgaagaaaaaggcgcaggagaaggctatgtcaatccgcgaacaaatcggccaccccgattatatcctcgaagaaatgaatagaagactcgacgaggaatatagcaaccttaacttctccgaggacctctacttcgagaatagcctgcagaacttgaaagtaggggcgcagcgcagcctacggaaactgcgtgagaaagtggaccctaacctgtggattattggagccgcagttgtgaacgccttctactctccaaataggaatcaaatcgtctttcctgctggtatccttcagcctcctttcttttctaaggagcaacctcaggcactgaacttcggaggtattggaatggttatcggccacgagatcacacatggcttcgatgacaacgggcggaacttcgataagaatggaaacatgatggactggtggtcaaatttcagcactcagcattttcgtgagcagtccgaatgtatgatctaccaatacggaaattacagctgggatctagccgacgagcagaatgtgaatgggtttaataccctgggggagaacatcgccgataacgggggagtcaggcaggcttacaaggcttacctgaaatggatggctgagggcggcaaagatcagcagctcccaggcctcgaccttacccacgaacaactcttctttataaactacgcacaggtgtggtgcggatcatatcggcccgaatttgctattcagtccatcaaaactgacgtacacagtcctctcaaatatcgggtgctggggtcactacaaaacctggccgcgttcgctgacaccttccactgtgctcgaggcacaccaatgcatcccaaagaacgctgccgagtatggtag

SEQ ID NO: 343768 - DNA, 2340 bp, Artificial Sequence
  derived and/or modified sequence
atgggaaagtccgaaggacccgtgggtatggtcgagagcgcaggacgcgctggacagaaaagacctggattcttggagggaggtctgctcctcttgctcctactggtgacagccgcccttgtggccctcggagtgttatacgccgacaggcggggtaaacaactcccaagacttgctagccgtctttgcttcctccaggaagagaggactttcgttaaacgcaagccgaggggcattccagaggcccaagaagtatcggaagtgtgcaccactcccgggtgtgtgatcgccgcagcacgtatacttcagaacatggaccccacaacagagccctgtgacgatttttaccagtttgcctgtggaggatggctgcggcgccacgtgattcctgagacaaatagccgctactcaatctttgacgtgctgcgggacgagctcgaggtgattctgaaagcagtactggaaaactctaccgcaaaagatcgccccgccgtggaaaaggcgcgtactctgtataggagttgtatgaaccagagcgtcattgagaaacgcggaagccagcccttactagatattctggaagtggttggaggatggcccgtggccatggacagatggaacgaaaccgtggggctggagtgggaactggaaaggcagctagcgctcatgaattcacaattcaaccgccgagtgctcatcgacctgttcatttggaatgacgatcaaaacagctcacggcacatcatttacatcgatcagccgacgctgggcatgccatctcgtgaatattactttaatggcggatcaaatcgaaaagtgagggaggcatacctccagttcatggtgagtgttgccacacttctcagagaggatgccaacttacccagagacagctgcctggtccaagaggacatggtacaagtcctggagctcgagacacagctcgctaaggccaccgtccctcaggaagaacggcacgacgtcattgctctctatcaccgcatggggcttgaagaactgcagtcccaatttggactcaagggtttcaactggacactgtttatccagaccgtcctctcctccgttaagataaagttgttgccggacgaagaagtggtggtttacgggataccgtatttacagaatctggaaaatataatcgatacctattcagctagaaccatccaaaattatttggtttggaggctagtgctcgatagaatcgggtcgctttcacagagattcaaggacacacgggtgaactaccgcaaagccctgtttggtacaatggtggaagaggttcgctggcgagaatgcgttggatatgtgaactcaaatatggagaatgcagtcggctccctttacgtccgcgaagcattccctggtgacagtaagagcatggtacgagagctaatagacaaggtgcggacggtattcgtggagacactggatgaattgggctggatggacgaggagtctaagaaaaaggcacaggagaaggcaatgagcatccgggaacagatcggccaccccgattacatcctggaggaaatgaaccgtaggctggacgaggagtattctaatctgaattttagcgaggatctgtactttgagaatagcctgcagaatctcaaggtgggggcacaacgcagcttgagaaaattaagggaaaaagtcgacccgaatttatggattatcggagctgctgtcgtgaacgccttttattccccaaatcgcaaccagattgtctttcccgcgggtattttgcaacccccttttttttctaaagagcagcctcaggcactgaattttggaggcatcggtatggtcattggacacgagatcacccacggttttgacgacaacggcagaaacttcgataaaaacggaaacatgatggactggtggtctaatttttctacccagcacttccgtgagcaaagcgagtgcatgatttatcagtacggtaactactcttgggatctggccgacgagcagaacgtgaacggatttaatacactgggagaaaacatcgccgacaacggcggggttcgacaagcgtataaggcttatttgaagtggatggcagagggaggaaaagatcagcagttacccggcctggacctaacccatgaacagctattttttattaattatgctcaagtgtggtgcggctcctatcgtccagaatttgccattcagagcataaagacagacgtgcactctccacttaagtatagagtacttggttcccttcagaacctcgctgcatttgctgatacatttcattgtgcccgggggactccaatgcacccaaaggagcgatgcagggtgtggtag

SEQ ID NO: 343769 - DNA, 2313 bp, Artificial Sequence
  derived and/or modified sequence
atggtggagtcggctggtagagccggacagaaaagacctggttttctcgagggcggcctactcctgcttctgttattggtgaccgcagcgctagtggccctgggcgtcctctacgcagacagacgcggaaagcaactcccccgactggctagtagactatgcttcctgcaagaagagcgaacatttgtcaagaggaagccccgcgggattccagaagctcaggaagtttcggaagtctgtacgaccccagggtgtgtgatcgctgcagctagaattctgcaaaatatggatcccacaaccgaaccctgcgacgatttctatcaattcgcttgtggagggtggctgagacgacatgttattccagagacgaactctcgttacagcattttcgacgtactcagagacgagttagaagtaatcctgaaagccgtgctggaaaattctactgctaaagataggcctgctgtggagaaagcccgcaccctttacagatcctgtatgaatcaaagtgtcatcgagaagcgagggagccagccactactagatatcctcgaagtcgtgggaggttggcccgttgcaatggacagatggaatgaaaccgtaggtcttgaatgggagctggaaagacagctggcattgatgaattctcaatttaacagacgcgtccttatcgatctcttcatctggaacgatgaccagaattccagcaggcacattatttatatcgaccaacctacactcggcatgccttcccgggagtattatttcaacggtgggtccaacagaaaagtcagggaagcatatctgcaatttatggtctctgtagcaacacttttaagggaagatgcgaatttgccacgcgattcatgtcttgtccaagaggacatggtgcaggtgctggaacttgaaacccagctcgctaaggcgacagtgccacaggaagaaaggcacgacgtgattgctttatatcacaggatggggctggaagaactgcaatctcaattcgggctgaagggattcaattggacattatttatacagactgttctttcttctgtcaaaatcaagctactgccagatgaagaggttgtagtgtacggtatcccttacctgcagaatctagagaatattattgacacttattctgcacgcaccattcagaactaccttgtttggagacttgtccttgatcgcataggctcactaagtcaaaggtttaaggacactagggtgaattaccgcaaagccctttttggcaccatggtggaggaagttcggtggagggaatgtgtcggctatgtcaatagcaatatggaaaatgccgtgggctccttgtatgtcagagaggccttcccaggggatagtaagtctatggtacgggaactgatcgataaagtgcgcaccgtgttcgttgagacattagacgagcttggctggatggatgaagaatcaaagaaaaaagcccaggaaaaggcgatgtccataagagagcagatcggccacccagattatattcttgaagaaatgaaccgcagattggacgaggaatactccaaccttaacttttccgaggacttgtattttgaaaacagcctgcagaatcttaaagttggagcacagagaagcctgcgaaagttaagggagaaggtagatccgaatctctggataatcggggccgctgttgttaatgctttctattcccccaacagaaatcagattgttttccctgctggcatactgcagcctcccttctttagcaaggagcaaccacaggccctgaactttggtggcattggaatggtgattggccacgagataacacacggatttgatgataatggcagaaactttgataaaaacggcaacatgatggactggtggagcaattttagcactcaacacttccgtgagcagagcgagtgtatgatctatcagtatggaaactatagttgggacctggctgatgaacagaacgttaacgggttcaacacattgggcgagaatatagcagacaacggcggcgttagacaggcctacaaagcttatctaaagtggatggccgaaggaggaaaagaccagcaacttccaggtttagacctgactcacgaacagttattttttattaactatgctcaagtatggtgcgggtcctacagaccagaatttgccatccagtctataaaaacagatgtgcactcccctctgaaataccgagtgctgggctctctacagaacctggccgccttcgccgacactttccattgcgctagaggcacacccatgcacccaaaggaacgatgccgcgtttggtag

SEQ ID NO: 343770 - DNA, 2340 bp, Artificial Sequence
  derived and/or modified sequence
atgggaaagagtgaaggccctgtaggcatggtggaatctgctggacgggccggacaaaaacgcccaggatttctagaggggggtctgctcttgctcttgcttcttgtgaccgccgcactggtcgccctaggggttctgtacgccgatcgcagagggaagcaactgcctcgacttgctagtagattgtgcttcttgcaggaagaaagaacattcgtaaagcgtaaaccaagggggattccagaggcccaggaagtcagtgaagtctgtactacccccggatgcgtgatcgctgccgcacgcattctgcaaaatatggatcctaccactgagccgtgtgacgacttctatcaatttgcttgcggcggatggttaagacgccatgtgattccagaaacaaacagtagatacagcatcttcgatgtgctcagagacgagttggaggttattctgaaagcggttcttgaaaacagcacagctaaggaccgccctgccgtggaaaaggccagaaccttataccgatcttgcatgaaccaatccgttatcgaaaagcgtggaagccagccactcctggatatcttggaggtggtggggggatggcctgtggctatggacagatggaatgaaactgtgggcctggagtgggaattggaacgtcagttagccctcatgaacagtcaatttaatcgccgcgtactcatagatctatttatctggaacgacgaccagaactcatcaaggcacattatctatatcgatcagccaaccttggggatgcctagcagagaatactactttaatggaggtagcaatagaaaggtacgagaggcatacctccagtttatggttagtgtggccacgcttcttagagaggacgccaatctgcccagagattcctgtctggtccaagaggacatggtacaagtcctggagctcgagacacagctcgctaaggccaccgtccctcaggaagaacggcacgacgtcattgctctctatcaccgcatggggcttgaagaactgcagtcccaatttggactcaagggtttcaactggacactgtttatccagaccgtcctctcctccgttaagataaagttgttgccggacgaagaagtggtggtttacgggataccgtatttacagaatctggaaaatataatcgatacctattcagctagaaccatccaaaattatttggtttggagactggtgctggatcgcatcggaagtctgagtcagagatttaaagatacgcgtgtgaattacaggaaggccctgttcggcactatggtcgaggaggtgaggtggagagaatgcgtcggatacgtaaatagcaatatggaaaatgccgtaggaagcctgtatgttcgcgaagccttccccggcgatagtaaaagtatggtgcgggaactgatcgataaagtacgcactgttttcgtggaaacattggacgagctcggttggatggacgaggaatcaaagaaaaaagcacaggaaaaggcgatgtcgataagggaacaaattggtcatcccgattacattcttgaagagatgaaccggaggctggatgaagaatactctaatctaaatttctctgaagacctctatttcgaaaattctctgcaaaatttaaaggttggcgcacagagaagccttcgcaaattaagagagaaggtcgaccccaatctgtggattataggcgccgccgttgttaatgccttctacagcccaaaccgtaaccagatcgttttccctgcaggaattttgcagcctccatttttctctaaggaacagcctcaggctctgaatttcggcgggattggcatggttatcgggcatgaaattacccacggctttgatgacaacgggagaaatttcgataagaacggaaatatgatggactggtggtcaaatttctcgacccagcattttcgagaacagtcagaatgcatgatctatcaatacggcaactactcatgggaccttgcggacgaacagaacgtgaatggattcaatacattaggcgagaatattgcggacaacggcggggttaggcaggcctacaaggcatatttaaaatggatggccgagggggggaaggatcaacagcttcccggcctcgacctcacccacgaacagttatttttcattaattatgcccaagtgtggtgcggaagttacaggccagagttcgccattcagagtatcaaaacagatgtgcactctccactcaagtatcgggtcctgggcagtcttcaaaaccttgccgcttttgcggatacattccactgtgccaggggtacaccaatgcatcctaaggaaaggtgtagagtttggtag

SEQ ID NO: 343771 - DNA, 2902 bp, Artificial Sequence
  derived and/or modified sequence
atcacaaaggaggcccagaagccttcaggcagcctcaactcagccccaagccactgctctcccatcccagtccctggaaatccacccacttggcccagctcaccccaactccaacccactgggacccagtctccaggggcctgactgtgggcggcagccactcctgagtgagcaaaggttcctccgcggtgctctcccgtccagagccctgctgatggggaagtccgaaggcccagtggggatggtggagagcgccggccgtgcagggcagaagcgcccggggttcctggagggggggctgctgctgctgctgctgctggtgaccgctgccctggtggccttgggtgtcctctacgccgaccgcagagggaagcagctgccacgccttgctagccggctgtgcttcttacaggaggagaggacctttgtaaaacgaaaaccccgagggatcccagaggcccaagaggtgagcgaggtctgcaccacccctggctgcgtgatagcagctgccaggatcctccagaacatggacccgaccacggaaccgtgtgacgacttctaccagtttgcatgcggaggctggctgcggcgccacgtgatccctgagaccaactcaagatacagcatctttgacgtcctccgcgacgagctggaggtcatcctcaaagcggtgctggagaattcgactgccaaggaccggccggctgtggagaaggccaggacgctgtaccgctcctgcatgaaccagagtgtgatagagaagcgaggctctcagcccctgctggacatcttggaggtggtgggaggctggccggtggcgatggacaggtggaacgagaccgtaggactcgagtgggagctggagcggcagctggcgctgatgaactcacagttcaacaggcgcgtcctcatcgacctcttcatctggaacgacgaccagaactccagccggcacatcatctacatagaccagcccaccttgggcatgccctcccgagagtactacttcaacggcggcagcaaccggaaggtgcgggaagcctacctgcagttcatggtgtcagtggccacgttgctgcgggaggatgcaaacctgcccagggacagctgcctggtgcaggaggacatggtgcaggtgctggagctggagacacagctggccaaggccacggtaccccaggaggagagacacgacgtcatcgccttgtaccaccggatgggactggaggagctgcaaagccagtttggcctgaagggatttaactggactctgttcatacaaactgtgctatcctctgtcaaaatcaagctgctgccagatgaggaagtggtggtctatggcatcccctacctgcagaaccttgaaaacatcatcgacacctactcagccaggaccatacagaactacctggtctggcgcctggtgctggaccgcattggtagcctaagccagagattcaaggacacacgagtgaactaccgcaaggcgctgtttggcacaatggtggaggaggtgcgctggcgtgaatgtgtgggctacgtcaacagcaacatggagaacgccgtgggctccctctacgtcagggaggcgttccctggagacagcaagagcatggtcagagaactcattgacaaggtgcggacagtgtttgtggagacgctggacgagctgggctggatggacgaggagtccaagaagaaggcgcaggagaaggccatgagcatccgggagcagatcgggcaccctgactacatcctggaggagatgaacaggcgcctggacgaggagtactccaatctgaacttctcagaggacctgtactttgagaacagtctgcagaacctcaaggtgggcgcccagcggagcctcaggaagcttcgggaaaaggtggacccaaatctctggatcatcggggcggcggtggtcaatgcgttctactccccaaaccgaaaccagattgtattccctgccgggatcctccagccccccttcttcagcaaggagcagccacaggccttgaactttggaggcattgggatggtgatcgggcacgagatcacgcacggctttgacgacaatggccggaacttcgacaagaatggcaacatgatggattggtggagtaacttctccacccagcacttccgggagcagtcagagtgcatgatctaccagtacggcaactactcctgggacctggcagacgaacagaacgtgaacggattcaacacccttggggaaaacattgctgacaacggaggggtgcggcaagcctataaggcctacctcaagtggatggcagagggtggcaaggaccagcagctgcccggcctggatctcacccatgagcagctcttcttcatcaactatgcccaggtgtggtgcgggtcctaccggcccgagttcgccatccaatccatcaagacagacgtccacagtcccctgaagtacagggtactggggtcgctgcagaacctggccgccttcgcagacacgttccactgtgcccggggcacccccatgcaccccaaggagcgatgccgcgtgtggtagccaaggccctgccgcgctgtgcggcccacgcccacccgctgctcggaggcatctgtgcgaaggtgcagctagcggcgacccagtgtacgtcccgccccggccaaccatgccaagcctgcctgccaggcctctgcgcctggcctagggtgcagccacctgcctgacacccagggatgagcagtgtccagtgcagtacctggaccggagccccctccacagacacccgcggggctcagtgcccccgtcacagctctgtagagacaatcaactgtgtcctgcccaccctccaaggtgcattgtcttccagtatctacagcttcagacttgagctaagtaaatgcttcaaag

SEQ ID NO: 343772 - DNA, 2313 bp, Artificial Sequence
  derived and/or modified sequence
atggtggagagcgccggcagagccggccagaagagacccggcttcctggagggcggcctgctgctgctgctgctgctggtgaccgccgccctggtggccctgggcgtgctgtacgccgacagaagaggcaagcagctgcccagactggccagcagactgtgcttcctgcaggaggagagaaccttcgtgaagagaaagcccagaggcatccccgaggcccaggaggtgagcgaggtgtgcaccacccccggctgcgtgatcgccgccgccagaatcctgcagaacatggaccccaccaccgagccctgcgacgacttctaccagttcgcctgcggcggctggctgagaagacacgtgatccccgagaccaacagcagatacagcatcttcgacgtgctgagagacgagctggaggtgatcctgaaggccgtgctggagaacagcaccgccaaggacagacccgccgtggagaaggccagaaccctgtacagaagctgcatgaaccagagcgtgatcgagaagagaggcagccagcccctgctggacatcctggaggtggtgggcggctggcccgtggccatggacagatggaacgagaccgtgggcctggagtgggagctggagagacagctggccctgatgaacagccagttcaacagaagagtgctgatcgacctgttcatctggaacgacgaccagaacagcagcagacacatcatctacatcgaccagcccaccctgggcatgcccagcagagagtactacttcaacggcggcagcaacagaaaggtgagagaggcctacctgcagttcatggtgagcgtggccaccctgctgagagaggacgccaacctgcccagagacagctgcctggtgcaggaggacatggtgcaggtgctggagctggagacccagctggccaaggccaccgtgccccaggaggagagacacgacgtgatcgccctgtaccacagaatgggcctggaggagctgcagagccagttcggcctgaagggcttcaactggaccctgttcatccagaccgtgctgagcagcgtgaagatcaagctgctgcccgacgaggaggtggtggtgtacggcatcccctacctgcagaacctggagaacatcatcgacacctacagcgccagaaccatccagaactacctggtgtggagactggtgctggacagaatcggcagcctgagccagagattcaaggacaccagagtgaactacagaaaggccctgttcggcaccatggtggaggaggtgagatggagagagtgcgtgggctacgtgaacagcaacatggagaacgccgtgggcagcctgtacgtgagagaggccttccccggcgacagcaagagcatggtgagagagctgatcgacaaggtgagaaccgtgttcgtggagaccctggacgagctgggctggatggacgaggagagcaagaagaaggcccaggagaaggccatgagcatcagagagcagatcggccaccccgactacatcctggaggagatgaacagaagactggacgaggagtacagcaacctgaacttcagcgaggacctgtacttcgagaacagcctgcagaacctgaaggtgggcgcccagagaagcctgagaaagctgagagagaaggtggaccccaacctgtggatcatcggcgccgccgtggtgaacgccttctacagccccaacagaaaccagatcgtgttccccgccggcatcctgcagccccccttcttcagcaaggagcagccccaggccctgaacttcggcggcatcggcatggtgatcggccacgagatcacccacggcttcgacgacaacggcagaaacttcgacaagaacggcaacatgatggactggtggagcaacttcagcacccagcacttcagagagcagagcgagtgcatgatctaccagtacggcaactacagctgggacctggccgacgagcagaacgtgaacggcttcaacaccctgggcgagaacatcgccgacaacggcggcgtgagacaggcctacaaggcctacctgaagtggatggccgagggcggcaaggaccagcagctgcccggcctggacctgacccacgagcagctgttcttcatcaactacgcccaggtgtggtgcggcagctacagacccgagttcgccatccagagcatcaagaccgacgtgcacagccccctgaagtacagagtgctgggcagcctgcagaacctggccgccttcgccgacaccttccactgcgccagaggcacccccatgcaccccaaggagagatgcagagtgtggtag

SEQ ID NO: 343773 - DNA, 2340 bp, Artificial Sequence
  derived and/or modified sequence
atgggcaagagcgagggccccgtgggcatggtggagagcgccggcagagccggccagaagagacccggcttcctggagggcggcctgctgctgctgctgctgctggtgaccgccgccctggtggccctgggcgtgctgtacgccgacagaagaggcaagcagctgcccagactggccagcagactgtgcttcctgcaggaggagagaaccttcgtgaagagaaagcccagaggcatccccgaggcccaggaggtgagcgaggtgtgcaccacccccggctgcgtgatcgccgccgccagaatcctgcagaacatggaccccaccaccgagccctgcgacgacttctaccagttcgcctgcggcggctggctgagaagacacgtgatccccgagaccaacagcagatacagcatcttcgacgtgctgagagacgagctggaggtgatcctgaaggccgtgctggagaacagcaccgccaaggacagacccgccgtggagaaggccagaaccctgtacagaagctgcatgaaccagagcgtgatcgagaagagaggcagccagcccctgctggacatcctggaggtggtgggcggctggcccgtggccatggacagatggaacgagaccgtgggcctggagtgggagctggagagacagctggccctgatgaacagccagttcaacagaagagtgctgatcgacctgttcatctggaacgacgaccagaacagcagcagacacatcatctacatcgaccagcccaccctgggcatgcccagcagagagtactacttcaacggcggcagcaacagaaaggtgagagaggcctacctgcagttcatggtgagcgtggccaccctgctgagagaggacgccaacctgcccagagacagctgcctggtgcaggaggacatggtgcaggtgctggagctggagacccagctggccaaggccaccgtgccccaggaggagagacacgacgtgatcgccctgtaccacagaatgggcctggaggagctgcagagccagttcggcctgaagggcttcaactggaccctgttcatccagaccgtgctgagcagcgtgaagatcaagctgctgcccgacgaggaggtggtggtgtacggcatcccctacctgcagaacctggagaacatcatcgacacctacagcgccagaaccatccagaactacctggtgtggagactggtgctggacagaatcggcagcctgagccagagattcaaggacaccagagtgaactacagaaaggccctgttcggcaccatggtggaggaggtgagatggagagagtgcgtgggctacgtgaacagcaacatggagaacgccgtgggcagcctgtacgtgagagaggccttccccggcgacagcaagagcatggtgagagagctgatcgacaaggtgagaaccgtgttcgtggagaccctggacgagctgggctggatggacgaggagagcaagaagaaggcccaggagaaggccatgagcatcagagagcagatcggccaccccgactacatcctggaggagatgaacagaagactggacgaggagtacagcaacctgaacttcagcgaggacctgtacttcgagaacagcctgcagaacctgaaggtgggcgcccagagaagcctgagaaagctgagagagaaggtggaccccaacctgtggatcatcggcgccgccgtggtgaacgccttctacagccccaacagaaaccagatcgtgttccccgccggcatcctgcagccccccttcttcagcaaggagcagccccaggccctgaacttcggcggcatcggcatggtgatcggccacgagatcacccacggcttcgacgacaacggcagaaacttcgacaagaacggcaacatgatggactggtggagcaacttcagcacccagcacttcagagagcagagcgagtgcatgatctaccagtacggcaactacagctgggacctggccgacgagcagaacgtgaacggcttcaacaccctgggcgagaacatcgccgacaacggcggcgtgagacaggcctacaaggcctacctgaagtggatggccgagggcggcaaggaccagcagctgcccggcctggacctgacccacgagcagctgttcttcatcaactacgcccaggtgtggtgcggcagctacagacccgagttcgccatccagagcatcaagaccgacgtgcacagccccctgaagtacagagtgctgggcagcctgcagaacctggccgccttcgccgacaccttccactgcgccagaggcacccccatgcaccccaaggagagatgcagagtgtggtag

SEQ ID NO: 343774 - DNA, 2313 bp, Artificial Sequence
  derived and/or modified sequence
atggtggaaagtgccggacgagccggccagaagcgcccagggttcctcgaaggtggtttgctcttactgctgttgctcgttactgccgcactagtcgccctaggggtgctctacgccgaccgacgtggtaaacagttacccagactagctagccggctatgttttctccaggaggagagaacctttgttaagaggaagccgcgaggcatccctgaagctcaggaggtgagtgaagtctgtaccacgccgggttgcgtgatagcggcagccaggatcctgcagaatatggatcccacaacagaaccttgcgatgacttctatcaatttgcctgtggtggctggctgcgccgccatgtcatacccgaaaccaattcgcggtactccatattcgacgtgctgcgggatgaattggaggtgattcttaaagctgtgctggaaaactccaccgccaaggaccgcccggccgtggaaaaggcacgaaccctctataggtcatgcatgaaccagtcagttatcgagaagcgcggcagtcagccgttattagatatcttggaggtcgttggcggctggccagtcgctatggataggtggaacgagaccgtaggcctcgagtgggagctagaacgtcagttggctttgatgaactcccagttcaatcgtcgcgtactgatagacctgttcatatggaatgacgaccaaaatagtagtcgccacatcatctacattgatcagcccaccctgggcatgcccagccgcgaatactactttaatggcggttccaaccgtaaggtgagggaggcatacctccagtttatggtatcggtcgccactttattaagagaagatgctaatctgccgagagatagttgtctcgtccaagaggatatggtccaggtattggaattggaaacccaactggcaaaggccacagttccacaggaggagaggcatgatgttattgccctgtaccaccgcatgggtttggaagagttacagagtcaattcgggctgaaagggttcaactggacactatttatccaaaccgtgctgtcctccgtcaagattaagctcctgcctgacgaggaggtagtggtttatggcattccgtacttgcagaatctcgaaaatatcatagacacctatagcgcccggacgatacagaactacctggtgtggcggctggtcctggaccgcattggaagtttaagtcaacggttcaaggacacaagagtgaattaccggaaggccctctttggtactatggtggaagaagtgaggtggcgtgagtgcgttggctacgttaattcaaacatggaaaacgccgtgggcagcctctatgtcagggaggcattccccggcgattcaaaaagcatggttcgggaactgatagacaaagtacggactgtctttgtggaaacactggatgagctcggctggatggacgaggagtccaagaagaaagcgcaggagaaagccatgagcatacgggaacagattggtcatcctgactacatcttagaagaaatgaaccgcaggcttgacgaggagtactccaacttgaacttctccgaagacttatacttcgagaactcgctacaaaacttaaaggtgggggcgcagaggagcctccgcaaactgcgggagaaggtggatcccaacctgtggataattggagccgcggtcgttaatgcattctacagcccgaaccgaaaccagattgtgtttccggcaggtattctccagccaccattcttttcaaaagagcagccccaggccttgaacttcggggggattggaatggtgattggccacgaaattacccacgggttcgatgacaacggacgcaacttcgataagaatggcaacatgatggactggtggtcaaacttttccacacaacatttccgcgagcagagcgagtgcatgatttatcagtacggcaattattcatgggacttggctgatgaacaaaacgtgaacggcttcaacacactaggggagaacattgccgataatggcggcgtgcgccaagcatacaaggcatacctcaagtggatggctgaaggcggaaaggaccaacagttacccggtctagacttgacacatgagcaactgttcttcataaattatgcccaggtctggtgcggctcttatagaccagaattcgccatccagtcaataaaaacggacgtgcacagccccttgaagtatcgcgtcctcggcagtctccaaaatctggccgctttcgctgacaccttccactgtgcccggggcactcccatgcacccgaaagaacgctgtcgtgtgtggtag

SEQ ID NO: 343775 - DNA, 2340 bp, Artificial Sequence
  derived and/or modified sequence
atggggaagtccgaaggacccgtagggatggtggagtcagcagggcgggctggccagaagagaccagggttcttggaaggcggactccttcttctcctgctgctcgtcacagcagccctagtggccctgggggtcctttatgccgacagacggggcaaacagcttcccagactggcgagccggctgtgctttctccaagaggagaggaccttcgtgaaaagaaaaccaagaggcatcccagaggcccaggaggtctccgaggtatgtacaactcctggatgtgtcattgctgcggctcgaatccttcagaacatggacccaaccacagagccctgtgatgacttctatcagtttgcttgcggtggctggctccgtcgtcatgtcatccccgaaaccaatagccgctattccattttcgatgtacttcgcgatgagctggaggtgattctcaaggctgtgttggaaaattctaccgcaaaggacaggccggctgtcgaaaaagcccgcacgctgtaccggtcttgtatgaaccagtccgtgatagaaaagcgtggtagtcagccactgcttgacattctggaggtggtgggcgggtggcccgtagcaatggatagatggaacgaaacagttggtctcgagtgggagctggagagacagttagcccttatgaactctcagtttaaccggagagtgttgatcgacctgttcatatggaatgatgaccagaacagctccagacacatcatctatattgatcaacccacactgggtatgcccagtcgggagtattattttaacggcggtagcaatagaaaagtgcgggaagcttatctgcaattcatggtttctgtcgccacattgctgcgcgaggacgccaatctaccccgggacagctgcctggttcaggaagatatggtacaggtactggaactcgaaacacagcttgccaaagctacagtgcctcaggaggagaggcatgatgtcattgccctctatcataggatgggattggaagagctgcagtctcagtttgggcttaagggcttcaattggaccctgttcatccagacagtactgtcatccgtcaagatcaagctccttcccgatgaagaggtggtggtctatgggataccgtacctacagaatctggaaaacattattgacacctattcagcgcggactattcaaaattacctggtctggcgccttgtgcttgatcggattgggtcccttagtcagagattcaaagacacgcgggtgaactatagaaaagccttgtttggaacgatggtagaggaagttcgctggagggaatgtgttgggtatgtgaattcaaatatggagaatgcagtaggaagcctctatgtcagggaggcatttcctggggatagcaagagtatggtgagggaactgattgacaaagttcgcacggttttcgtggaaactctggacgagttgggctggatggatgaggagagcaaaaagaaggctcaagaaaaagccatgtcaattagggagcagattggacatcccgattacatcctggaagagatgaaccgccggctggatgaagagtactccaatctgaacttttccgaggatctgtacttcgagaactcgttgcaaaatctcaaggtgggtgcccagaggagcctgcgcaagctccgagagaaagtggatccaaatctgtggataattggagcggccgtggtcaatgccttctactctccaaacagaaatcagatagttttccctgccggcatcctgcagccacctttcttttccaaggaacagccccaggcacttaactttgggggcatcggtatggtgataggacacgagataacgcacggattcgacgacaatgggaggaacttcgacaaaaacggaaacatgatggattggtggagcaattttagtacccaacactttagagaacagtcagagtgcatgatctaccagtacggaaactactcttgggatctggccgacgagcagaatgtgaatggctttaatactctgggagagaacattgctgataatggtggagtccgacaggcatataaggcctatttgaagtggatggccgagggcggtaaagaccagcaactgcccggtttggacctgacccacgaacagctgttcttcataaattacgctcaggtgtggtgtggaagctaccggcccgagtttgccatccagagtataaagaccgacgtgcacagtcccctaaaataccgggtgctgggcagccttcagaatctggctgcgtttgctgacacctttcactgcgcccggggaacccctatgcaccctaaggaacggtgtagagtctggtag

SEQ ID NO: 343776 - DNA, 2313 bp, Artificial Sequence
  derived and/or modified sequence
atggtggagagcgctggccgggccggccagaagaggcctggcttcctggagggcggcctgctgctgctgctgctgctggtgacagctgccctggtggccctgggcgtgctgtatgctgacagaagaggcaagcagctgccccggctggccagccggctgtgcttcctgcaggaggagaggacctttgtgaagaggaagccccggggcatccctgaggcccaggaggtgtctgaggtgtgcaccaccccaggctgtgtgattgctgctgcccgcatcctgcagaacatggaccccaccacagagccctgtgatgacttctaccagtttgcctgtggcggctggctgcggcggcacgtgattcctgagaccaacagccgctacagcatctttgatgtgctgagagatgagctggaggtgatcctgaaggctgtgctggagaacagcacagccaaggacaggcctgctgtggagaaggcccggaccctgtaccgcagctgcatgaaccagagcgtcatcgagaagaggggcagccagcccctgctggacatcctggaggtggtgggcggctggcctgtggccatggaccgctggaatgagaccgtgggcctggagtgggagctggagcggcagctggccctgatgaacagccagttcaacagaagagtgctgattgacctcttcatctggaatgatgaccagaacagcagccgccacatcatctacatcgaccagcccaccctgggcatgcccagccgggagtactacttcaatggaggcagcaacaggaaggtgcgggaggcctacctgcagttcatggtgtctgtggccaccctgctgagagaagatgccaacctgccccgggacagctgcctggtgcaggaggacatggtgcaggtgctggagctggagacccagctggccaaggccaccgtgccccaggaggagagacatgatgtgattgccctgtaccacaggatgggcctggaggagctgcagagccagtttggcctgaagggcttcaactggaccctcttcatccagacagtgctgagctctgtgaagatcaagctgctgcctgatgaggaggtggtggtgtatggcatcccctacctgcagaacctggagaacatcatcgacacctacagcgcccggaccatccagaactacctggtgtggaggctggtgctggacagaattggcagcctgagccagcgcttcaaggacaccagggtgaactacaggaaggccctgtttggcaccatggtggaggaggtgcgctggagagaatgtgtgggctacgtgaacagcaacatggagaatgctgtgggcagcctgtatgtgcgggaggccttccctggggacagcaagtccatggtgcgggagctgattgacaaggtgaggacagtgtttgtggagaccctggatgagctgggctggatggatgaggagagcaagaagaaggcccaggagaaggccatgagcatccgggagcagatcggccacccagactacatcctggaggagatgaacagaaggctggatgaggagtacagcaacctgaacttcagcgaggacctgtactttgagaacagcctgcagaacctgaaggtgggcgcccagaggagcctgaggaagctgcgggagaaggtggaccccaacctgtggatcattggagctgctgtggtgaatgccttctacagccccaacagaaaccagatcgtgtttcctgctggcatcctgcagccccccttcttcagcaaggagcagccccaggccctgaactttggaggcatcggcatggtgattggccacgagatcacccacggctttgatgacaatggaagaaactttgacaagaatggaaacatgatggactggtggagcaacttcagcacccagcacttccgggagcagagcgagtgcatgatctaccagtatggcaactacagctgggacctggctgatgagcagaatgtgaatggcttcaacaccctgggagaaaatattgctgacaatggaggagtgcggcaggcctacaaggcctacctgaagtggatggccgagggcggcaaggaccagcagctgcccggcctggacctgacccatgagcagctgttcttcatcaactatgcccaggtgtggtgtggcagctacagacctgagtttgccatccagagcatcaagacagatgtgcacagccccctgaagtacagagtgctgggcagcctgcagaacctggccgcctttgctgacaccttccactgtgcccggggcacccccatgcaccccaaggagcgctgccgggtgtggtag

SEQ ID NO: 343777 - DNA, 2340 bp, Artificial Sequence
  derived and/or modified sequence
atgggcaagtctgagggccctgtgggcatggtggagagcgctggccgggccggccagaagaggcctggcttcctggagggcggcctgctgctgctgctgctgctggtgacagctgccctggtggccctgggcgtgctgtatgctgaccggcggggcaagcagctgccccggctggccagccggctgtgcttcctgcaggaggagaggacctttgtgaagaggaagccccggggcatccctgaggcccaggaggtgtctgaggtgtgcaccaccccaggctgtgtgattgctgctgcccgcatcctgcagaacatggaccccaccacagagccctgtgatgacttctaccagtttgcctgtggcggctggctgcggagacatgtgattcctgagaccaacagccgctacagcatctttgatgtgctgagagatgagctggaggtgatcctgaaggctgtgctggagaacagcacagccaaggacaggcctgctgtggagaaggcccggaccctgtaccgcagctgcatgaaccagagcgtgattgagaagaggggcagccagcccctgctggacatcctggaggtggtgggcggctggcctgtggccatggaccgctggaatgaaacagtgggcctggagtgggagctggagcggcagctggccctgatgaacagccagttcaacagaagagtgctgattgacctcttcatctggaatgatgaccagaacagcagccgccacatcatctacatcgaccagcccaccctgggcatgcccagccgggagtactacttcaacggcggcagcaacaggaaggtgcgggaggcctacctgcagttcatggtgtctgtggccaccctgctgcgggaggatgccaacctgccccgggacagctgcctggtgcaggaggacatggtgcaggtgctggagctggagacccagctggccaaggccaccgtgccccaggaggagagacatgatgtgattgccctgtaccacaggatgggcctggaggagctgcagagccagtttggcctgaagggcttcaactggaccctcttcatccagacagtgctgagctctgtgaagatcaagctgctgcctgatgaggaggtggtggtgtatggcatcccctacctgcagaacctggagaacatcatcgacacctacagcgcccggaccatccagaactacctggtgtggaggctggtgctggaccgcatcggcagcctgagccagcgcttcaaggacaccagggtgaactacaggaaggccctgtttggcaccatggtggaggaggtgcgctggagagaatgtgtgggctacgtgaacagcaacatggagaatgctgtgggcagcctgtatgtgcgggaggccttccctggggacagcaagtccatggtgcgggagctgattgacaaggtgaggacagtgtttgtggagaccctggatgagctgggctggatggatgaggagagcaagaagaaggcccaggagaaggccatgagcatccgggagcagatcggccacccagactacatcctggaggagatgaacagaaggctggatgaggagtacagcaacctgaacttctctgaagatctctactttgagaacagcctgcagaacctgaaggtgggcgcccagaggagcctgaggaagctgcgggagaaggtggaccccaacctgtggatcatcggggctgctgtggtgaatgccttctacagccccaacagaaaccagatcgtgtttcctgctggcatcctgcagccccccttcttcagcaaggagcagccccaggccctgaactttggaggcatcggcatggtgattggacatgagatcacccacggctttgatgacaatggaagaaactttgacaagaatggaaacatgatggactggtggagcaacttcagcacccagcacttccgggagcagagcgagtgcatgatctaccagtatggcaactacagctgggacctggctgatgagcagaatgtgaatggcttcaacaccctgggggagaacattgctgacaatggaggagtgcggcaggcctacaaggcctacctgaagtggatggccgagggcggcaaggaccagcagctgcccggcctggacctgacccatgagcagctgttcttcatcaactatgcccaggtgtggtgtggcagctacagacctgagtttgccatccagagcatcaagacagatgtgcacagccccctgaagtacagagtgctgggcagcctgcagaacctggccgcctttgctgacaccttccactgtgcccggggcacccccatgcaccccaaggagcgctgccgggtgtggtag

SEQ ID NO: 343778 - DNA, 2849 bp, Artificial Sequence
  derived and/or modified sequence
actgctctcccatcccagtccctggaaatccacccacttggcccagctcaccccaactccaacccactgggacccagtctccaggggcctgactgtgggcggcagccactcctgagtgagcaaaggttcctccgcggtgctctcccgtccagagccctgctgatggggaagtccgaaggcccagtggggatggtggagagcgccggccgtgcagggcagaagcgcccggggttcctggagggggggctgctgctgctgctgctgctggtgaccgctgccctggtggccttgggtgtcctctacgccgaccgcagagggaagcagctgccacgccttgctagccggctgtgcttcttacaggaggagaggacctttgtaaaacgaaaaccccgagggatcccagaggcccaagaggtgagcgaggtctgcaccacccctggctgcgtgatagcagctgccaggatcctccagaacatggacccgaccacggaaccgtgtgacgacttctaccagtttgcatgcggaggctggctgcggcgccacgtgatccctgagaccaactcaagatacagcatctttgacgtcctccgcgacgagctggaggtcatcctcaaagcggtgctggagaattcgactgccaaggaccggccggctgtggagaaggccaggacgctgtaccgctcctgcatgaaccagagtgtgatagagaagcgaggctctcagcccctgctggacatcttggaggtggtgggaggctggccggtggcgatggacaggtggaacgagaccgtaggactcgagtgggagctggagcggcagctggcgctgatgaactcacagttcaacaggcgcgtcctcatcgacctcttcatctggaacgacgaccagaactccagccggcacatcatctacatagaccagcccaccttgggcatgccctcccgagagtactacttcaacggcggcagcaaccggaaggtgcgggaagcctacctgcagttcatggtgtcagtggccacgttgctgcgggaggatgcaaacctgcccagggacagctgcctggtgcaggaggacatggtgcaggtgctggagctggagacacagctggccaaggccacggtaccccaggaggagagacacgacgtcatcgccttgtaccaccggatgggactggaggagctgcaaagccagtttggcctgaagggatttaactggactctgttcatacaaactgtgctatcctctgtcaaaatcaagctgctgccagatgaggaagtggtggtctatggcatcccctacctgcagaaccttgaaaacatcatcgacacctactcagccaggaccatacagaactacctggtctggcgcctggtgctggaccgcattggtagcctaagccagagattcaaggacacacgagtgaactaccgcaaggcgctgtttggcacaatggtggaggaggtgcgctggcgtgaatgtgtgggctacgtcaacagcaacatggagaacgccgtgggctccctctacgtcagggaggcgttccctggagacagcaagagcatggtcagagaactcattgacaaggtgcggacagtgtttgtggagacgctggacgagctgggctggatggacgaggagtccaagaagaaggcgcaggagaaggccatgagcatccgggagcagatcgggcaccctgactacatcctggaggagatgaacaggcgcctggacgaggagtactccaatctgaacttctcagaggacctgtactttgagaacagtctgcagaacctcaaggtgggcgcccagcggagcctcaggaagcttcgggaaaaggtggacccaaatctctggatcatcggggcggcggtggtcaatgcgttctactccccaaaccgaaaccagattgtattccctgccgggatcctccagccccccttcttcagcaaggagcagccacaggccttgaactttggaggcattgggatggtgatcgggcacgagatcacgcacggctttgacgacaatggccggaacttcgacaagaatggcaacatgatggattggtggagtaacttctccacccagcacttccgggagcagtcagagtgcatgatctaccagtacggcaactactcctgggacctggcagacgaacagaacgtgaacggattcaacacccttggggaaaacattgctgacaacggaggggtgcggcaagcctataaggcctacctcaagtggatggcagagggtggcaaggaccagcagctgcccggcctggatctcacccatgagcagctcttcttcatcaactatgcccaggtgtggtgcgggtcctaccggcccgagttcgccatccaatccatcaagacagacgtccacagtcccctgaagtacagggtactggggtcgctgcagaacctggccgccttcgcagacacgttccactgtgcccggggcacccccatgcaccccaaggagcgatgccgcgtgtggtagccaaggccctgccgcgctgtgcggcccacgcccacccgctgctcggaggcatctgtgcgaaggtgcagctagcggcgacccagtgtacgtcccgccccggccaaccatgccaagcctgcctgccaggcctctgcgcctggcctagggtgcagccacctgcctgacacccagggatgagcagtgtccagtgcagtacctggaccggagccccctccacagacacccgcggggctcagtgcccccgtcacagctctgtagagacaatcaactgtgtcctgcccaccctccaaggtgcattgtcttccagtatctacagcttcagacttgagctaagtaaatgcttcaaa

SEQ ID NO: 343779 - DNA, 2313 bp, Artificial Sequence
  derived and/or modified sequence
atggtggagagcgccggccgggccggccagaagcggcccggcttcctagaaggaggccttctgctcctcctgttgctggtcacagcagccttagtggccctcggcgtgttatacgctgaccgcagaggtaaacagctgccgcggctggccagccggctgtgcttcctgcaggaagagagaacctttgtgaaacgtaaaccacgaggaatacctgaagcacaggaggtcagcgaggtatgtaccacaccaggttgtgtcatagccgctgctcgcattctgcaaaatatggaccccaccacggaaccttgtgacgacttctatcagtttgcttgcggcggttggctgcgccgccacgtgatccccgaaaccaattctcgctacagcatttttgatgtgctgagggacgagttagaggttatcctgaaggccgtgctggaaaatagcactgccaaggatcggcccgccgtggaaaaggcgcggaccctttatcgttcttgtatgaaccagagtgttattgagaagcgcgggagccaacctctcctcgacattctggaagtagtgggaggttggcccgtcgcgatggaccgttggaacgaaaccgttgggctggaatgggagctcgagcggcagctcgcgctcatgaatagccagttcaatcggcgggtcttaatcgatcttttcatctggaatgacgatcagaacagctcccgacatataatctacattgaccaaccaactctgggcatgccttcccgagagtactacttcaacggggggtccaatagaaaagttagggaagcttacctccaattcatggtgtccgtcgcgactctgttgagggaggacgccaacctgcctagggatagttgtttggtacaggaagacatggtgcaggttcttgagctggagacacagctggctaaggcaaccgtgccacaggaagagcggcatgatgtgattgccctgtatcaccggatgggtctggaggagctgcagagtcagtttggactgaaaggctttaactggaccctgtttattcagacagtactgtcaagcgttaagataaagttactgcctgatgaagaagtggtggtgtacggtatcccatacctgcaaaacctggagaacatcatcgacacttacagtgctcggacaatccagaactatttggtctggaggcttgtgcttgacagaataggatccctatctcaacggttcaaagatacacgtgtgaactataggaaagcacttttcggaaccatggttgaggaggtacgttggcgtgagtgtgtgggatatgttaactcaaacatggagaatgctgtcggttctctgtacgtgagagaggcattccctggagattctaagtctatggtcagggaactgatagataaagttagaaccgtgtttgtggaaacacttgacgagctcggctggatggatgaagaatccaagaaaaaggcccaagagaaggccatgagtatacgagaacagatcggccaccccgactatattctggaggagatgaatagacggctggacgaggagtactctaacctgaacttctcagaagacctgtatttcgagaacagcttgcagaatctgaaggtcggcgctcagaggtcactgagaaaacttcgcgagaaagtggatccaaacctttggatcattggagcagctgtcgtgaacgccttctactcacccaatcggaaccagatcgtgttcccagctggtattttgcagccgcccttcttctctaaagaacagccccaggcgttaaatttcggcgggattgggatggtgattggacacgaaattacccatggctttgatgacaatgggaggaatttcgataaaaatggaaatatgatggactggtggtcaaattttagcactcagcactttagggaacagagcgagtgtatgatctatcagtacggcaattatagctgggatctcgccgacgaacagaatgtgaacggattcaataccctgggtgagaatatcgcggacaacggcggagtgcggcaagcttacaaagcctacctgaagtggatggctgagggaggtaaagaccagcagttgccaggccttgatctcacccacgaacagctttttttcatcaattacgcacaggtttggtgcgggtcctaccgccccgagtttgccatccagtcaatcaagacagatgtacattcgccactgaagtaccgagtgttggggtccctccagaatctggccgcctttgccgatacatttcactgtgcacgcggcactcctatgcatccgaaagaaagatgtcgggtctggtag

SEQ ID NO: 343780 - DNA, 2340 bp, Artificial Sequence
  derived and/or modified sequence
atgggcaagagcgagggccccgtgggcatggtggagagcgccggccgggcaggccagaagcgaccaggtttcctggagggaggactcctccttctgctgttgctggttacagccgctctggtggctctcggcgtcctatatgccgaccgccgaggaaagcagctgccccgcctggcctctaggctgtgtttcctgcaagaagaacgcaccttcgtgaagcgaaagcctcgcggtataccggaggcccaggaagtgtccgaagtctgtactactccgggctgcgtcatcgctgcagctcgaatcttacagaacatggatccgaccacagagccttgcgatgacttctatcagttcgcatgtggaggctggctgcgcagacacgtcatccccgaaacgaactcgcgatacagtatcttcgatgtgctccgtgatgagctcgaagtgattcttaaagcagtgttggaaaactcaacagctaaggataggcctgcagtggagaaagcacggacactatatagatcatgtatgaaccaaagcgtcattgaaaaacgggggtcccagcctctccttgacatcctggaggtcgtcggcgggtggcctgtcgccatggaccgctggaatgagacagtgggcctggagtgggagctggagcgacaattggcgctgatgaatagccagttcaacagaagggtgcttatcgatctctttatctggaacgacgatcagaactcgtcccgccacatcatttacatcgaccagcctacactcggtatgccaagtagagaatattattttaacggtgggtctaacaggaaggtgagagaggcataccttcaattcatggtctcagtggcaacacttttgagggaagatgccaacctgccccgagactcctgtctggtccaggaggatatggtgcaggtgctcgagctggagacccagctggccaaagcgacagtcccacaagaggaacggcacgacgttatcgccctttatcatcgtatgggcttggaagagctccagagtcaatttggtctaaaggggtttaactggactctgttcatacagactgtgttgtctagtgtcaagatcaagctgcttccagacgaagaagttgtggtatatgggatcccttatctacagaacctggagaatatcattgatacctacagcgcaagaactattcagaattaccttgtgtggagattagtgctggatagaatagggtccttgtcccagagatttaaggatacccgcgtcaattaccggaaggcgctcttcggtactatggtcgaggaggtgcgctggcgcgagtgcgtcgggtacgtaaactccaacatggagaacgctgtgggcagtctctacgttagggaagcattcccaggcgactctaaatccatggtgcgggaactcatcgataaagtcagaactgttttcgttgagacactggacgaactgggatggatggatgaggagagcaaaaagaaagcccaagagaaagccatgagcatacgtgagcagattggtcaccccgactatatcttagaagagatgaaccgaaggctggacgaggagtattccaaccttaatttcagtgaagatctgtattttgagaattcgttgcagaacctcaaggtgggagcccaacgcagtcttcggaaactccgtgagaaggtcgatcccaacttgtggatcataggagccgctgttgtgaacgcgttctattcaccgaacagaaatcagattgttttcccagctggcatcctacagccccctttcttttccaaggagcagccgcaagcattaaactttgggggtattggaatggtgatcggccacgaaattacacacggttttgatgataacggcagaaattttgataaaaacgggaatatgatggactggtggagtaatttctcaactcagcatttccgagaacagtccgaatgcatgatctatcagtatgggaattactcctgggatctggccgatgagcagaatgtgaacggcttcaacactctcggcgagaacatcgcggacaacggtggagtcaggcaagcctataaggcctatctgaagtggatggcggaaggcggtaaggaccagcaacttcctggcttggacttgacccacgaacagctgttttttattaattatgcacaggtgtggtgcgggtcttatagacctgaatttgccatccagagcatcaaaactgacgttcacagtccactgaaatacagagtgctgggcagcttacaaaacctcgctgcattcgcggataccttccattgcgcgaggggcactcctatgcatcctaaggaacgttgccgggtatggtag

SEQ ID NO: 343781 - RNA, 2313 nt, Artificial Sequence
  derived and/or modified sequence
augguugagucagccggccgugcuggccaaaaaaggccuggguuucucgaaggcgggcugcuucuacuccuguugcuagugacagccgcucugguggcacugggcguucuguacgcugaucgccguggcaaacagcugccucgacuggcaucuagacuguguuuuuuacaggaggagcgaacuuuugugaagcggaaaccacgaggaauuccagaagcucaagaggugagugagguguguacgacuccaggcugugugauugccgccgccagaauccugcagaauauggacccaacuacggagcccugugacgacuucuaccaguucgccuguggagguuggcuccgaagacauguuauaccugagacaaauagcagauacaguaucuuugauguccugcgcgaugagcuggaaguaaucuuaaaagccguccuggaaaauucaacagcgaaagacagacccgcuguggagaaggccagaacucuguauagaaguugcaugaaccagagcguuauugagaagagaggcucucaaccauugcucgacauccuggagguggucgguggauggccaguugcuauggaccgcuggaaugagacugugggacuugaaugggagcuugaacggcaacucgcguugaugaacucucaguucaaccgccguguacuuauagaccuguucauauggaaugacgaucaaaacucuagccgccacaucaucuacaucgaucagcccacacuagggaugcccuccagagaguacuauuucaacgguggaagcaaccgcaaggugagggaggcguaucugcaguuuauggucucaguggcuacacuucugagggaggaugccaaucugccaagggauucuugccuuguucaagaggauauggugcagguccuagaacuggaaacucaacuggccaaggccacggucccacaggaagagcgccacgacgucauugcucuauaucaccgcaugggauuggaggaacugcagucucaguuuggccucaaaggauucaacuggacauuauucauacagaccgugcuguccucagugaaaauuaagcuccugccagacgaagagguaguggucuaugggauccccuauuugcagaauuuagagaauauuaucgauacauacagugcccggaccauucaaaacuaucugguauggcgucucguccuggacaggauagguagccucucacagagauucaaggauacccgcgugaacuaccggaaggcccuuuucgguacuaugguggaggaaguuagguggagggaaugugugggguaugugaacaguaacauggagaacgccguagguucccuuuacguucgagaggcuuuuccgggggacuccaaauccaugguacgcgagcuuauugacaagguccgcacaguauucguggaaacacuggacgagcuuggcuggauggacgaggaaucgaagaaaaaggcgcaggagaaggcuaugucaauccgcgaacaaaucggccaccccgauuauauccucgaagaaaugaauagaagacucgacgaggaauauagcaaccuuaacuucuccgaggaccucuacuucgagaauagccugcagaacuugaaaguaggggcgcagcgcagccuacggaaacugcgugagaaaguggacccuaaccuguggauuauuggagccgcaguugugaacgccuucuacucuccaaauaggaaucaaaucgucuuuccugcugguauccuucagccuccuuucuuuucuaaggagcaaccucaggcacugaacuucggagguauuggaaugguuaucggccacgagaucacacauggcuucgaugacaacgggcggaacuucgauaagaauggaaacaugauggacugguggucaaauuucagcacucagcauuuucgugagcaguccgaauguaugaucuaccaauacggaaauuacagcugggaucuagccgacgagcagaaugugaauggguuuaauacccugggggagaacaucgccgauaacgggggagucaggcaggcuuacaaggcuuaccugaaauggauggcugagggcggcaaagaucagcagcucccaggccucgaccuuacccacgaacaacucuucuuuauaaacuacgcacagguguggugcggaucauaucggcccgaauuugcuauucaguccaucaaaacugacguacacaguccucucaaauaucgggugcuggggucacuacaaaaccuggccgcguucgcugacaccuuccacugugcucgaggcacaccaaugcaucccaaagaacgcugccgaguaugguag

SEQ ID NO: 343782 - RNA, 2340 nt, Artificial Sequence
  derived and/or modified sequence
augggaaaguccgaaggacccguggguauggucgagagcgcaggacgcgcuggacagaaaagaccuggauucuuggagggaggucugcuccucuugcuccuacuggugacagccgcccuuguggcccucggaguguuauacgccgacaggcgggguaaacaacucccaagacuugcuagccgucuuugcuuccuccaggaagagaggacuuucguuaaacgcaagccgaggggcauuccagaggcccaagaaguaucggaagugugcaccacucccgggugugugaucgccgcagcacguauacuucagaacauggaccccacaacagagcccugugacgauuuuuaccaguuugccuguggaggauggcugcggcgccacgugauuccugagacaaauagccgcuacucaaucuuugacgugcugcgggacgagcucgaggugauucugaaagcaguacuggaaaacucuaccgcaaaagaucgccccgccguggaaaaggcgcguacucuguauaggaguuguaugaaccagagcgucauugagaaacgcggaagccagcccuuacuagauauucuggaagugguuggaggauggcccguggccauggacagauggaacgaaaccguggggcuggagugggaacuggaaaggcagcuagcgcucaugaauucacaauucaaccgccgagugcucaucgaccuguucauuuggaaugacgaucaaaacagcucacggcacaucauuuacaucgaucagccgacgcugggcaugccaucucgugaauauuacuuuaauggcggaucaaaucgaaaagugagggaggcauaccuccaguucauggugaguguugccacacuucucagagaggaugccaacuuacccagagacagcugccugguccaagaggacaugguacaaguccuggagcucgagacacagcucgcuaaggccaccgucccucaggaagaacggcacgacgucauugcucucuaucaccgcauggggcuugaagaacugcagucccaauuuggacucaaggguuucaacuggacacuguuuauccagaccguccucuccuccguuaagauaaaguuguugccggacgaagaaguggugguuuacgggauaccguauuuacagaaucuggaaaauauaaucgauaccuauucagcuagaaccauccaaaauuauuugguuuggaggcuagugcucgauagaaucgggucgcuuucacagagauucaaggacacacgggugaacuaccgcaaagcccuguuugguacaaugguggaagagguucgcuggcgagaaugcguuggauaugugaacucaaauauggagaaugcagucggcucccuuuacguccgcgaagcauucccuggugacaguaagagcaugguacgagagcuaauagacaaggugcggacgguauucguggagacacuggaugaauugggcuggauggacgaggagucuaagaaaaaggcacaggagaaggcaaugagcauccgggaacagaucggccaccccgauuacauccuggaggaaaugaaccguaggcuggacgaggaguauucuaaucugaauuuuagcgaggaucuguacuuugagaauagccugcagaaucucaaggugggggcacaacgcagcuugagaaaauuaagggaaaaagucgacccgaauuuauggauuaucggagcugcugucgugaacgccuuuuauuccccaaaucgcaaccagauugucuuucccgcggguauuuugcaacccccuuuuuuuucuaaagagcagccucaggcacugaauuuuggaggcaucgguauggucauuggacacgagaucacccacgguuuugacgacaacggcagaaacuucgauaaaaacggaaacaugauggacugguggucuaauuuuucuacccagcacuuccgugagcaaagcgagugcaugauuuaucaguacgguaacuacucuugggaucuggccgacgagcagaacgugaacggauuuaauacacugggagaaaacaucgccgacaacggcgggguucgacaagcguauaaggcuuauuugaaguggauggcagagggaggaaaagaucagcaguuacccggccuggaccuaacccaugaacagcuauuuuuuauuaauuaugcucaaguguggugcggcuccuaucguccagaauuugccauucagagcauaaagacagacgugcacucuccacuuaaguauagaguacuugguucccuucagaaccucgcugcauuugcugauacauuucauugugcccgggggacuccaaugcacccaaaggagcgaugcagggugugguag

SEQ ID NO: 343783 - RNA, 2313 nt, Artificial Sequence
  derived and/or modified sequence
augguggagucggcugguagagccggacagaaaagaccugguuuucucgagggcggccuacuccugcuucuguuauuggugaccgcagcgcuaguggcccugggcguccucuacgcagacagacgcggaaagcaacucccccgacuggcuaguagacuaugcuuccugcaagaagagcgaacauuugucaagaggaagccccgcgggauuccagaagcucaggaaguuucggaagucuguacgaccccagggugugugaucgcugcagcuagaauucugcaaaauauggaucccacaaccgaacccugcgacgauuucuaucaauucgcuuguggaggguggcugagacgacauguuauuccagagacgaacucucguuacagcauuuucgacguacucagagacgaguuagaaguaauccugaaagccgugcuggaaaauucuacugcuaaagauaggccugcuguggagaaagcccgcacccuuuacagauccuguaugaaucaaagugucaucgagaagcgagggagccagccacuacuagauauccucgaagucgugggagguuggcccguugcaauggacagauggaaugaaaccguaggucuugaaugggagcuggaaagacagcuggcauugaugaauucucaauuuaacagacgcguccuuaucgaucucuucaucuggaacgaugaccagaauuccagcaggcacauuauuuauaucgaccaaccuacacucggcaugccuucccgggaguauuauuucaacgguggguccaacagaaaagucagggaagcauaucugcaauuuauggucucuguagcaacacuuuuaagggaagaugcgaauuugccacgcgauucaugucuuguccaagaggacauggugcaggugcuggaacuugaaacccagcucgcuaaggcgacagugccacaggaagaaaggcacgacgugauugcuuuauaucacaggauggggcuggaagaacugcaaucucaauucgggcugaagggauucaauuggacauuauuuauacagacuguucuuucuucugucaaaaucaagcuacugccagaugaagagguuguaguguacgguaucccuuaccugcagaaucuagagaauauuauugacacuuauucugcacgcaccauucagaacuaccuuguuuggagacuuguccuugaucgcauaggcucacuaagucaaagguuuaaggacacuagggugaauuaccgcaaagcccuuuuuggcaccaugguggaggaaguucgguggagggaaugugucggcuaugucaauagcaauauggaaaaugccgugggcuccuuguaugucagagaggccuucccaggggauaguaagucuaugguacgggaacugaucgauaaagugcgcaccguguucguugagacauuagacgagcuuggcuggauggaugaagaaucaaagaaaaaagcccaggaaaaggcgauguccauaagagagcagaucggccacccagauuauauucuugaagaaaugaaccgcagauuggacgaggaauacuccaaccuuaacuuuuccgaggacuuguauuuugaaaacagccugcagaaucuuaaaguuggagcacagagaagccugcgaaaguuaagggagaagguagauccgaaucucuggauaaucggggccgcuguuguuaaugcuuucuauucccccaacagaaaucagauuguuuucccugcuggcauacugcagccucccuucuuuagcaaggagcaaccacaggcccugaacuuugguggcauuggaauggugauuggccacgagauaacacacggauuugaugauaauggcagaaacuuugauaaaaacggcaacaugauggacugguggagcaauuuuagcacucaacacuuccgugagcagagcgaguguaugaucuaucaguauggaaacuauaguugggaccuggcugaugaacagaacguuaacggguucaacacauugggcgagaauauagcagacaacggcggcguuagacaggccuacaaagcuuaucuaaaguggauggccgaaggaggaaaagaccagcaacuuccagguuuagaccugacucacgaacaguuauuuuuuauuaacuaugcucaaguauggugcggguccuacagaccagaauuugccauccagucuauaaaaacagaugugcacuccccucugaaauaccgagugcugggcucucuacagaaccuggccgccuucgccgacacuuuccauugcgcuagaggcacacccaugcacccaaaggaacgaugccgcguuugguag

SEQ ID NO: 343784 - RNA, 2340 nt, Artificial Sequence
  derived and/or modified sequence
augggaaagagugaaggcccuguaggcaugguggaaucugcuggacgggccggacaaaaacgcccaggauuucuagaggggggucugcucuugcucuugcuucuugugaccgccgcacuggucgcccuagggguucuguacgccgaucgcagagggaagcaacugccucgacuugcuaguagauugugcuucuugcaggaagaaagaacauucguaaagcguaaaccaagggggauuccagaggcccaggaagucagugaagucuguacuacccccggaugcgugaucgcugccgcacgcauucugcaaaauauggauccuaccacugagccgugugacgacuucuaucaauuugcuugcggcggaugguuaagacgccaugugauuccagaaacaaacaguagauacagcaucuucgaugugcucagagacgaguuggagguuauucugaaagcgguucuugaaaacagcacagcuaaggaccgcccugccguggaaaaggccagaaccuuauaccgaucuugcaugaaccaauccguuaucgaaaagcguggaagccagccacuccuggauaucuuggaggugguggggggauggccuguggcuauggacagauggaaugaaacugugggccuggagugggaauuggaacgucaguuagcccucaugaacagucaauuuaaucgccgcguacucauagaucuauuuaucuggaacgacgaccagaacucaucaaggcacauuaucuauaucgaucagccaaccuuggggaugccuagcagagaauacuacuuuaauggagguagcaauagaaagguacgagaggcauaccuccaguuuaugguuaguguggccacgcuucuuagagaggacgccaaucugcccagagauuccugucugguccaagaggacaugguacaaguccuggagcucgagacacagcucgcuaaggccaccgucccucaggaagaacggcacgacgucauugcucucuaucaccgcauggggcuugaagaacugcagucccaauuuggacucaaggguuucaacuggacacuguuuauccagaccguccucuccuccguuaagauaaaguuguugccggacgaagaaguggugguuuacgggauaccguauuuacagaaucuggaaaauauaaucgauaccuauucagcuagaaccauccaaaauuauuugguuuggagacuggugcuggaucgcaucggaagucugagucagagauuuaaagauacgcgugugaauuacaggaaggcccuguucggcacuauggucgaggaggugagguggagagaaugcgucggauacguaaauagcaauauggaaaaugccguaggaagccuguauguucgcgaagccuuccccggcgauaguaaaaguauggugcgggaacugaucgauaaaguacgcacuguuuucguggaaacauuggacgagcucgguuggauggacgaggaaucaaagaaaaaagcacaggaaaaggcgaugucgauaagggaacaaauuggucaucccgauuacauucuugaagagaugaaccggaggcuggaugaagaauacucuaaucuaaauuucucugaagaccucuauuucgaaaauucucugcaaaauuuaaagguuggcgcacagagaagccuucgcaaauuaagagagaaggucgaccccaaucuguggauuauaggcgccgccguuguuaaugccuucuacagcccaaaccguaaccagaucguuuucccugcaggaauuuugcagccuccauuuuucucuaaggaacagccucaggcucugaauuucggcgggauuggcaugguuaucgggcaugaaauuacccacggcuuugaugacaacgggagaaauuucgauaagaacggaaauaugauggacugguggucaaauuucucgacccagcauuuucgagaacagucagaaugcaugaucuaucaauacggcaacuacucaugggaccuugcggacgaacagaacgugaauggauucaauacauuaggcgagaauauugcggacaacggcgggguuaggcaggccuacaaggcauauuuaaaauggauggccgagggggggaaggaucaacagcuucccggccucgaccucacccacgaacaguuauuuuucauuaauuaugcccaaguguggugcggaaguuacaggccagaguucgccauucagaguaucaaaacagaugugcacucuccacucaaguaucggguccugggcagucuucaaaaccuugccgcuuuugcggauacauuccacugugccagggguacaccaaugcauccuaaggaaagguguagaguuugguag

SEQ ID NO: 343785 - protein, 622 aa, Artificial Sequence
  derived and/or modified sequence
MGKSEGPVGMVESAGRAGQKRPGFLEGGLLLLLLLVTAALVALGVLYADRRGKQLPRLASRLCFLQEERTFVKRKPRGIPEAQEVSEVCTTPGCVIAAARILQNMDPTTEPCDDFYQFACGGWLRRHVIPETNSRYSIFDVLRDELEVILKVELETQLAKATVPQEERHDVIALYHRMGLEELQSQFGLKGFNWTLFIQTVLSSVKIKLLPDEEVVVYGIPYLQNLENIIDTYSARTIQNYLVWRLVLDRIGSLSQRFKDTRVNYRKALFGTMVEEVRWRECVGYVNSNMENAVGSLYVREAFPGDSKSMVRELIDKVRTVFVETLDELGWMDEESKKKAQEKAMSIREQIGHPDYILEEMNRRLDEEYSNLNFSEDLYFENSLQNLKVGAQRSLRKLREKVDPNLWIIGAAVVNAFYSPNRNQIVFPAGILQPPFFSKEQPQALNFGGIGMVIGHEITHGFDDNGRNFDKNGNMMDWWSNFSTQHFREQSECMIYQYGNYSWDLADEQNVNGFNTLGENIADNGGVRQAYKAYLKWMAEGGKDQQLPGLDLTHEQLFFINYAQVWCGSYRPEFAIQSIKTDVHSPLKYRVLGSLQNLAAFADTFHCARGTPMHPKERCRVW

SEQ ID NO: 343786 - protein, 622 aa, Artificial Sequence
  derived and/or modified sequence
MGKSEGPVGMVESAGRAGQKRPGFLEGGLLLLLLLVTAALVALGVLYADRRGKQLPRLASRLCFLQEERTFVKRKPRGIPEAQEVSEVCTTPGCVIAAARILQNMDPTTEPCDDFYQFACGGWLRRHVIPETNSRYSIFDVLRDELEVILKAVLENSTAKATVPQEERHDVIALYHRMGLEELQSQFGLKGFNWTLFIQTVLSSVKIKLLPDEEVVVYGIPYLQNLENIIDTYSARTIQNYLVWRLVLDRIGSLSQRFKDTRVNYRKALFGTMVEEVRWRECVGYVNSNMENAVGSLYVREAFPGDSKSMVRELIDKVRTVFVETLDELGWMDEESKKKAQEKAMSIREQIGHPDYILEEMNRRLDEEYSNLNFSEDLYFENSLQNLKVGAQRSLRKLREKVDPNLWIIGAAVVNAFYSPNRNQIVFPAGILQPPFFSKEQPQALNFGGIGMVIGHEITHGFDDNGRNFDKNGNMMDWWSNFSTQHFREQSECMIYQYGNYSWDLADEQNVNGFNTLGENIADNGGVRQAYKAYLKWMAEGGKDQQLPGLDLTHEQLFFINYAQVWCGSYRPEFAIQSIKTDVHSPLKYRVLGSLQNLAAFADTFHCARGTPMHPKERCRVW

SEQ ID NO: 343787 - DNA, 1869 bp, Artificial Sequence
  derived and/or modified sequence
atgggcaagtctgaggggccagtgggcatggtggaaagcgcagggagagccggtcaaaagcggcctggtttccttgagggcggattactcctcctgctgttactagtgaccgccgctctagtggctttgggtgtgctctacgccgacaggcggggaaagcagttgcctcgactggcttccagactttgttttttgcaggaggagcggacctttgtgaaaaggaagcccaggggaattcccgaagctcaggaagtctccgaggtatgtacaaccccaggctgcgtcatagcagcggcacgtatcttgcagaacatggaccctactaccgaaccgtgtgacgacttctaccagtttgcttgcggcggatggcttcgtagacatgtgatcccagaaaccaactcacgctacagcatctttgacgtgctccgcgatgaacttgaagttatcctgaaggttgagcttgagacccagcttgccaaagccacagtgccacaggaggagcggcatgacgttattgccctatatcatcgcatgggcctggaagaactccagtcccagtttggtctgaaaggcttcaattggacactgtttattcaaaccgttctttcgtctgtgaaaattaagctcctgcccgatgaggaagtggtggtttacggcataccctacctgcagaatctggagaacatcattgacacgtatagcgctcggaccatccagaattatctcgtgtggcgcttggtactggatcgcattgggagtctatctcagagatttaaagacacgagagttaactaccgaaaagctttattcggcactatggttgaggaggtgagatggcgagagtgcgtaggctacgtgaattccaacatggaaaacgctgttggcagtctttatgtgcgggaggccttccctggcgactctaagagcatggtcagagaactgatagataaagttcgaaccgtgttcgttgagacactcgatgaactggggtggatggatgaggaatctaagaagaaggcccaggagaaggccatgagtatccgggaacagatcggtcacccggattacattctcgaagagatgaatcgccgacttgatgaagagtattcaaatctcaactttagtgaggatctgtatttcgagaattctctacagaacctcaaagtgggggcacagcgcagcttaaggaaacttcgcgagaaggtggacccgaacctttggatcatcggcgcagcggtggtgaatgcgttttattcccccaaccgcaatcagatcgtgtttccggctgggatcctacagcccccatttttcagtaaggaacagccccaggcgctcaatttcgggggtatcggcatggttattggacacgagattactcatggatttgatgataatggcagaaattttgataagaacgggaatatgatggactggtggtcaaatttttccacccagcattttcgagagcagagcgaatgtatgatttaccagtacggaaactattcttgggaccttgccgacgaacaaaacgttaacgggtttaacaccttgggcgaaaacatcgcagacaatggcggagtacgacaggcttacaaggcatatctcaagtggatggccgaaggtggaaaagatcaacagctaccaggtctcgaccttacccacgaacagctattttttatcaactatgctcaggtctggtgcggttcttaccgcccagaattcgcaatccagagcattaaaaccgacgtccattcccccctcaaataccgggtcctgggctcacttcagaatcttgccgctttcgctgatacctttcactgcgccagaggaactcccatgcacccaaaggaacgatgtcgggtgtggtag

SEQ ID NO: 343788 - DNA, 1869 bp, Artificial Sequence
  derived and/or modified sequence
atgggtaaatctgagggaccagtggggatggtggagagcgccggaagagcgggacagaagaggccaggtttcctcgagggcggtcttctcctgctcctccttctggtaaccgctgctctcgtggctctgggagtcctctatgccgaccgtagagggaagcagttacctagacttgccagtaggctgtgcttcctacaggaggagagaactttcgtgaaacggaaaccgcgaggcataccagaagctcaagaggtgagcgaggtgtgtaccacgcctggctgcgtgatagcggctgccagaattttgcaaaacatggaccccacaacagaaccttgcgacgatttctatcagttcgcctgtggcggatggctgcggaggcacgtgattccagagaccaattccagatattccatatttgacgtattgagagacgagctggaagttattctgaaagcggtgttggaaaacagtaccgccaaagctactgtgccccaggaagagagacacgacgtaatcgccttgtatcatcgtatgggcttggaggagctgcaaagccaattcggccttaagggatttaactggaccctgttcatccagaccgttctgtccagcgtgaaaatcaaactgcttccagacgaagaggttgtagtgtacggaattccataccttcaaaatctcgaaaacatcatcgacacgtatagtgcccgtactatccaaaattacctggtatggagactcgtgctggatagaattggctctttgtcgcagcggttcaaagacacccgtgttaactaccggaaagctctgttcggcacaatggtggaagaggtgagatggagagaatgtgtggggtatgtaaactctaacatggaaaacgctgtgggaagcctttacgtgagagaagcattcccaggggatagcaagtctatggtacgggagctaatcgacaaagttcgtaccgtatttgtagaaacacttgatgagttaggttggatggacgaggagagtaagaagaaagcccaggaaaaagccatgtccatcagggagcagatcgggcatccggattatatccttgaagagatgaatagacgtctggacgaagaatattctaacctgaactttagtgaggatctttacttcgaaaatagcttacaaaatttaaaagtgggcgctcaaaggagtctgaggaagctgagagagaaggtggacccaaatctgtggattatcggcgctgcagtggtgaacgcattttactcacccaacagaaaccaaatagtctttcccgcaggtattctccaacctccgtttttcagtaaggaacagccccaggctctgaactttggcggtattggtatggtcatcggccacgagattacacatgggttcgatgataatggacggaacttcgataaaaatggcaatatgatggactggtggtctaatttttctactcagcattttagggagcaatccgagtgcatgatatatcagtatggcaactattcgtgggacctggccgatgagcagaatgtaaacggatttaatactctgggggagaatatcgccgataatggaggcgtcagacaggcctataaggcatacctgaagtggatggccgaggggggaaaggaccaacaactgccgggactagacctgacgcacgaacaattattctttattaactatgcacaggtgtggtgtggcagctatcgtcctgagtttgcaatccagtctataaagactgacgtgcatagtcccctaaaatatagggtgctgggttcactgcaaaaccttgcagccttcgcggatacgtttcactgcgccagaggaacgccaatgcaccccaaggaacggtgcagggtgtggtag

SEQ ID NO: 343789 - DNA, 1869 bp, Artificial Sequence
  derived and/or modified sequence
atggggaaaagcgaaggccccgtaggtatggtagaatccgccgggagagcaggccagaagaggcccggatttttagagggtggcttgcttctgctgcttctgctggtgaccgccgctcttgtcgccctgggggtcctctacgcagatcgccggggaaagcagctgccgcggctcgcatcccgactatgctttctgcaggaggaacgaacattcgtgaaacgcaaacctagaggcattccagaagcacaggaagtatcagaggtgtgtacaactcctgggtgcgtcatcgctgcagcccggatcctgcagaacatggacccaacaactgagccctgcgacgatttctaccagttcgcgtgtgggggctggctgcgccggcatgttatcccggaaacaaatagccgctacagcatttttgatgttttaagagatgaactggaggtcattctcaaggttgagctcgaaacacagcttgccaaagcaacagtacctcaagaggagagacatgatgtcattgcactttatcacagaatgggcttggaggaactgcagtcccagtttggactcaagggatttaattggacactgttcattcagactgtgctgagttctgttaaaattaagctgctgcccgacgaagaagtggttgtatacggaattccatacctgcaaaacctagagaatatcatcgacacttattctgccagaacaatccaaaactatcttgtgtggaggctggtgttggatagaattggctccctgtcccagcgattcaaggataccagagtgaattacaggaaagccctcttcggcacgatggtggaggaggttagatggcgggagtgcgtgggctacgtcaattccaatatggaaaatgctgtgggctccctttacgttagggaagccttccccggagatagtaaatccatggttcgggagctcatcgacaaggtgcgcactgtattcgttgagacgttggatgagctcggatggatggacgaagaatctaagaagaaggcacaggagaaggcaatgtccattagagagcagatcggacatccagattatattttagaggagatgaaccgacgcctggacgaagagtacagtaatttgaacttttctgaagatttatactttgagaatagtctgcagaacctgaaagtcggtgctcagaggtcgctgaggaagctgcgcgagaaagttgatccaaatctgtggataatcggtgcagctgtcgtcaacgctttttactcacccaacaggaatcagattgtgttccctgcaggaatactccaaccgccattcttttctaaggagcagccccaagccctcaacttcggcgggattggtatggtcattggccatgagattacgcacggtttcgacgacaacgggaggaatttcgacaaaaatggtaatatgatggactggtggtctaatttctcgactcagcatttcagggagcagtccgagtgcatgatctatcaatatggcaactattcatgggatctggcagatgagcagaacgtcaacggttttaacacgctcggcgaaaacatcgctgataacgggggcgtccggcaggcctacaaagcctatctaaagtggatggccgagggtgggaaagaccaacagttaccaggactggatctgacccatgaacaactctttttcattaactacgcccaggtctggtgcggcagctatcgacccgagtttgctatacagtccattaagactgatgtccactctcccctgaagtaccgcgttctggggtcccttcagaaccttgcagcctttgctgacactttccactgtgcgagaggcaccccgatgcatcctaaagaaagatgtcgggtttggtag

SEQ ID NO: 343790 - DNA, 1869 bp, Artificial Sequence
  derived and/or modified sequence
atgggcaagagtgaaggtccagtggggatggtggagtccgcagggcgggcgggacaaaagcggccaggtttcctcgagggcggtctgttgttgctattgttattagtcacagctgcgctggtcgccctcggagtactgtacgccgatcgccgaggtaaacagctgccgagactagcaagtcggctttgttttctgcaagaagagcgcacctttgtcaaacgcaagccaagaggtattcccgaggctcaagaggtttcagaggtctgcactactcctggctgtgtaattgccgcagccaggattttgcagaatatggatcccactaccgaaccatgtgatgatttttatcagttcgcttgtggagggtggttacgccgacacgtaattcccgaaacaaattccagatattcaatcttcgatgttcttcgcgatgaattagaagtaattttgaaagccgttctcgagaatagcactgctaaggcaacagttccccaagaagagagacatgacgtaattgctctgtaccatagaatgggccttgaagaactccaaagtcagttcggcttaaaaggttttaattggacattgttcatccagaccgtgttgagctcagttaaaatcaagctgctgcccgatgaggaggtggtggtatatggtatcccgtacctgcaaaacctggagaacatcatcgatacctatagtgccaggaccattcaaaattatctggtgtggcggctcgtgctcgacaggatcgggtccctgagccagagattcaaagacactcgtgtcaattacaggaaggcactgtttgggacaatggtggaagaggtacggtggcgggaatgcgtgggctatgtcaacagcaatatggagaacgcagtaggtagcctgtatgttagagaggcgttcccaggtgacagtaagagcatggttagggagctgatcgacaaggtgcgtaccgtctttgtggagaccttagatgagcttggctggatggacgaggagtctaagaagaaggcacaggagaaagctatgtccataagggaacagatcggtcacccagattatatactggaggaaatgaacagacgtctagacgaggagtattctaatctaaacttttcagaggacttgtactttgaaaactccttacaaaacctcaaagtgggcgcccagcgcagcctacgcaagctgcgggaaaaagtcgatcccaacctgtggatcattggtgctgcagtagtaaatgcgttctactcaccaaaccgcaaccagatcgttttccccgctggtatactacagccccctttcttcagtaaagagcagccacaggctctcaatttcggtggcattggcatggtgattggacacgagattacccatggtttcgacgacaatggccgtaatttcgacaagaatgggaacatgatggactggtggtcgaactttagcacgcagcactttcgggaacagtctgaatgtatgatttaccagtacggaaattactcctgggatctcgcggatgaacaaaatgtgaacggcttcaacacactgggtgaaaacattgcagataatggcggggtacgccaggcttacaaggcttacctgaagtggatggccgagggcggaaaagaccaacagctgcctggattagacctgacacacgaacagctttttttcataaactatgcccaagtttggtgtggttcttataggcctgagtttgccatccagtcaataaaaactgacgtgcacagcccacttaaatatcgcgtgcttgggagtctgcagaatctggctgcatttgcagataccttccattgcgctagagggacccccatgcatcccaaggagcgttgtagagtctggtag

SEQ ID NO: 343791 - DNA, 1869 bp, Artificial Sequence
  derived and/or modified sequence
atgggaaagagcgaaggacccgtcggtatggtcgaatctgctggacgagccggacagaagcgtccaggttttctggagggaggtctgttgttgctactgcttctggtgacagcagctcttgtggctttaggagtgctgtatgccgacagaagaggaaagcagctgcctcggctggccagccgcctgtgttttttacaagaagaacgtacctttgtcaagcggaaacctcgtggaatcccagaagctcaagaggtctcagaggtctgcactacaccaggatgcgttattgccgctgcccgaatcttacaaaacatggaccctactaccgagccatgtgacgatttctaccaattcgcctgtggtgggtggcttcgcagacacgtgatccctgaaacaaacagccgctattctatttttgatgtcctacgtgatgaactcgaggtgatcttgaaagttgagctggaaacccaactcgccaaggccactgttccacaagaagaaaggcatgacgtgatcgctctctaccatcgaatggggcttgaggagctgcagtcccagttcggcctgaaggggtttaattggactctttttattcagacggttttgtcaagtgtgaaaatcaagctccttccagatgaagaggtcgtcgtttacgggatcccctatctacagaatcttgagaatataatagacacctactcggctcggacaatccagaactaccttgtttggcgcttggttctcgatcgcattgggagcctgtcccagcgttttaaggatacccgtgttaattatcggaaggcattattcgggaccatggtggaagaggttagatggagagagtgtgtgggatatgtgaacagcaatatggagaatgccgtcgggtcgctgtacgtgagggaggcctttccaggggactccaaatccatggtgagagagctcattgacaaagtcagaaccgtgtttgtagagactttggacgaactgggatggatggatgaagagagtaagaaaaaggcccaagaaaaagctatgtctataagagagcaaattggccaccctgattacatccttgaagagatgaaccgccgcttggacgaagagtatagtaacctcaacttttcagaggatttgtatttcgaaaacagcctgcagaacctcaaggttggcgcccagcgaagcttgcgtaaattacgagagaaagttgaccctaatctctggattatcggcgccgccgttgtaaacgcgttttattcgcccaacagaaatcagattgtttttccagctggaatccttcaacctccattcttctctaaagaacaaccacaggctctgaacttcggcggcattggcatggtgattggccatgaaataactcacggattcgatgacaatggcagaaactttgacaagaacgggaatatgatggattggtggagcaactttagtacacagcacttcagagagcagagcgagtgcatgatctatcagtacggtaattatagctgggacctggctgacgaacaaaacgtgaatggtttcaatacccttggggaaaacatagctgataacggaggggttagacaggcttataaagcttatctgaaatggatggctgaaggcggaaaggatcagcagctaccaggactcgacctaacccatgagcaactttttttcattaactatgcacaggtatggtgtggttcctatagacccgagtttgccattcaatccattaaaaccgacgtgcactcacccctgaagtatagggtacttggctcactccagaatttagcggccttcgctgataccttccactgcgccagaggaacacctatgcatccaaaagaacgatgtcgcgtttggtag

SEQ ID NO: 343792 - DNA, 1869 bp, Artificial Sequence
  derived and/or modified sequence
atgggaaagagtgagggtcccgtgggaatggtagaaagtgcggggagggccggtcagaaaagacccggctttctggagggcggtttactactcctgctcctcctggtgaccgcagcgttagttgcgctcggagttctgtacgccgacaggagaggtaaacagctgccacgtctggcatccaggctgtgtttcttacaagaagaaagaacatttgtgaaaagaaagcctcgtggaattcccgaagctcaagaggtgtctgaagtttgcaccactccaggctgtgtgatcgctgcagcacggattttgcagaatatggatcccactaccgaaccatgtgatgatttttatcagttcgcttgtggagggtggttacgccgacacgtaattcccgaaacaaattccagatattcaatcttcgatgttcttcgcgatgaattagaagtaattttgaaagccgttctcgagaatagcactgctaaggcaacagttccccaagaagagagacatgacgtaattgctctgtaccatagaatgggccttgaagaactccaaagtcagttcggcttaaaaggttttaattggacattgttcatccagaccgtcttgagctccgtgaagataaagctgttacccgatgaagaagtggttgtgtacggcatcccctacctgcagaatttggaaaacatcattgatacatatagcgcgcgcacaatacaaaactatttagtgtggaggttagtgctggatagaataggatccctctcgcagcggtttaaggacacacgtgtaaactataggaaggcgctgtttggcacaatggttgaagaagttaggtggcgggagtgcgttggttacgtgaattccaacatggagaacgccgttggctctttgtatgtgcgcgaggcgtttcccggcgactctaagtcgatggtacgggaactgatagataaagtgaggacggtgttcgttgagacgctagatgagctgggatggatggacgaggaatctaagaagaaagcccaggagaaggcaatgagtatacgagaacaaatcgggcaccccgattacatcctggaagaaatgaacagaaggctagacgaggagtatagcaatctaaacttcagcgaagacctttatttcgagaactcactgcaaaacttgaaggtgggtgcccagaggagtctgagaaagttgagggagaaggtcgacccaaatctatggattattggtgcagctgttgtcaacgccttctatagccccaatcgcaaccaaatagtgtttccagccggtatacttcagcctcccttctttagtaaagaacagccccaggcactcaattttggaggaatcggaatggtaatcgggcacgaaattacccatgggttcgatgacaacgggagaaacttcgacaagaatgggaacatgatggactggtggtctaacttttcaacccagcattttcgcgagcagtctgagtgtatgatctatcaatacgggaactatagctgggacctggcagacgaacagaatgttaatggatttaataccttgggagaaaatatcgcagacaacggaggagtcagacaggcctataaggcttacctgaagtggatggccgaaggtggaaaagaccagcagttgcctggattagaccttacgcacgagcaactcttcttcattaattatgcccaagtgtggtgtggtagttaccgtcccgaatttgccattcagtccatcaaaaccgatgtgcacagccccctgaagtatcgcgtcctggggagccttcagaatttggctgccttcgcagacacctttcattgtgcccgaggaacccctatgcatccaaaagagcgttgtagagtctggtag

SEQ ID NO: 343793 - DNA, 1943 bp, Artificial Sequence
  derived and/or modified sequence
agccctgctgatggggaagtccgaaggcccagtggggatggtggagagcgccggccgtgcagggcagaagcgcccggggttcctggagggggggctgctgctgctgctgctgctggtgaccgctgccctggtggccttgggtgtcctctacgccgaccgcagagggaagcagctgccacgccttgctagccggctgtgcttcttacaggaggagaggacctttgtaaaacgaaaaccccgagggatcccagaggcccaagaggtgagcgaggtctgcaccacccctggctgcgtgatagcagctgccaggatcctccagaacatggacccgaccacggaaccgtgtgacgacttctaccagtttgcatgcggaggctggctgcggcgccacgtgatccctgagaccaactcaagatacagcatctttgacgtcctccgcgacgagctggaggtcatcctcaaagcggtgctggagaattcgactgccaaggccacggtaccccaggaggagagacacgacgtcatcgccttgtaccaccggatgggactggaggagctgcaaagccagtttggcctgaagggatttaactggactctgttcatacaaactgtgctatcctctgtcaaaatcaagctgctgccagatgaggaagtggtggtctatggcatcccctacctgcagaaccttgaaaacatcatcgacacctactcagccaggaccatacagaactacctggtctggcgcctggtgctggaccgcattggtagcctaagccagagattcaaggacacacgagtgaactaccgcaaggcgctgtttggcacaatggtggaggaggtgcgctggcgtgaatgtgtgggctacgtcaacagcaacatggagaacgccgtgggctccctctacgtcagggaggcgttccctggagacagcaagagcatggtcagagaactcattgacaaggtgcggacagtgtttgtggagacgctggacgagctgggctggatggacgaggagtccaagaagaaggcgcaggagaaggccatgagcatccgggagcagatcgggcaccctgactacatcctggaggagatgaacaggcgcctggacgaggagtactccaatctgaacttctcagaggacctgtactttgagaacagtctgcagaacctcaaggtgggcgcccagcggagcctcaggaagcttcgggaaaaggtggacccaaatctctggatcatcggggcggcggtggtcaatgcgttctactccccaaaccgaaaccagattgtattccctgccgggatcctccagccccccttcttcagcaaggagcagccacaggccttgaactttggaggcattgggatggtgatcgggcacgagatcacgcacggctttgacgacaatggccggaacttcgacaagaatggcaacatgatggattggtggagtaacttctccacccagcacttccgggagcagtcagagtgcatgatctaccagtacggcaactactcctgggacctggcagacgaacagaacgtgaacggattcaacacccttggggaaaacattgctgacaacggaggggtgcggcaagcctataaggcctacctcaagtggatggcagagggtggcaaggaccagcagctgcccggcctggatctcacccatgagcagctcttcttcatcaactatgcccaggtgtggtgcgggtcctaccggcccgagttcgccatccaatccatcaagacagacgtccacagtcccctgaagtacagggtactggggtcgctgcagaacctggccgccttcgcagacacgttccactgtgcccggggcacccccatgcaccccaaggagcgatgccgcgtgtggtagccaaggccctgccgcgctgtgcggcccacgcccacccgctgctcggaggcatctgtgcgaaggt

SEQ ID NO: 343794 - DNA, 1869 bp, Artificial Sequence
  derived and/or modified sequence
atgggcaagagcgagggccccgtgggcatggtggagagcgccggcagagccggccagaagagacccggcttcctggagggcggcctgctgctgctgctgctgctggtgaccgccgccctggtggccctgggcgtgctgtacgccgacagaagaggcaagcagctgcccagactggccagcagactgtgcttcctgcaggaggagagaaccttcgtgaagagaaagcccagaggcatccccgaggcccaggaggtgagcgaggtgtgcaccacccccggctgcgtgatcgccgccgccagaatcctgcagaacatggaccccaccaccgagccctgcgacgacttctaccagttcgcctgcggcggctggctgagaagacacgtgatccccgagaccaacagcagatacagcatcttcgacgtgctgagagacgagctggaggtgatcctgaaggtggagctggagacccagctggccaaggccaccgtgccccaggaggagagacacgacgtgatcgccctgtaccacagaatgggcctggaggagctgcagagccagttcggcctgaagggcttcaactggaccctgttcatccagaccgtgctgagcagcgtgaagatcaagctgctgcccgacgaggaggtggtggtgtacggcatcccctacctgcagaacctggagaacatcatcgacacctacagcgccagaaccatccagaactacctggtgtggagactggtgctggacagaatcggcagcctgagccagagattcaaggacaccagagtgaactacagaaaggccctgttcggcaccatggtggaggaggtgagatggagagagtgcgtgggctacgtgaacagcaacatggagaacgccgtgggcagcctgtacgtgagagaggccttccccggcgacagcaagagcatggtgagagagctgatcgacaaggtgagaaccgtgttcgtggagaccctggacgagctgggctggatggacgaggagagcaagaagaaggcccaggagaaggccatgagcatcagagagcagatcggccaccccgactacatcctggaggagatgaacagaagactggacgaggagtacagcaacctgaacttcagcgaggacctgtacttcgagaacagcctgcagaacctgaaggtgggcgcccagagaagcctgagaaagctgagagagaaggtggaccccaacctgtggatcatcggcgccgccgtggtgaacgccttctacagccccaacagaaaccagatcgtgttccccgccggcatcctgcagccccccttcttcagcaaggagcagccccaggccctgaacttcggcggcatcggcatggtgatcggccacgagatcacccacggcttcgacgacaacggcagaaacttcgacaagaacggcaacatgatggactggtggagcaacttcagcacccagcacttcagagagcagagcgagtgcatgatctaccagtacggcaactacagctgggacctggccgacgagcagaacgtgaacggcttcaacaccctgggcgagaacatcgccgacaacggcggcgtgagacaggcctacaaggcctacctgaagtggatggccgagggcggcaaggaccagcagctgcccggcctggacctgacccacgagcagctgttcttcatcaactacgcccaggtgtggtgcggcagctacagacccgagttcgccatccagagcatcaagaccgacgtgcacagccccctgaagtacagagtgctgggcagcctgcagaacctggccgccttcgccgacaccttccactgcgccagaggcacccccatgcaccccaaggagagatgcagagtgtggtag

SEQ ID NO: 343795 - DNA, 1869 bp, Artificial Sequence
  derived and/or modified sequence
atgggcaagagcgagggccccgtgggcatggtggagagcgccggcagagccggccagaagagacccggcttcctggagggcggcctgctgctgctgctgctgctggtgaccgccgccctggtggccctgggcgtgctgtacgccgacagaagaggcaagcagctgcccagactggccagcagactgtgcttcctgcaggaggagagaaccttcgtgaagagaaagcccagaggcatccccgaggcccaggaggtgagcgaggtgtgcaccacccccggctgcgtgatcgccgccgccagaatcctgcagaacatggaccccaccaccgagccctgcgacgacttctaccagttcgcctgcggcggctggctgagaagacacgtgatccccgagaccaacagcagatacagcatcttcgacgtgctgagagacgagctggaggtgatcctgaaggccgtgctggagaacagcaccgccaaggccaccgtgccccaggaggagagacacgacgtgatcgccctgtaccacagaatgggcctggaggagctgcagagccagttcggcctgaagggcttcaactggaccctgttcatccagaccgtgctgagcagcgtgaagatcaagctgctgcccgacgaggaggtggtggtgtacggcatcccctacctgcagaacctggagaacatcatcgacacctacagcgccagaaccatccagaactacctggtgtggagactggtgctggacagaatcggcagcctgagccagagattcaaggacaccagagtgaactacagaaaggccctgttcggcaccatggtggaggaggtgagatggagagagtgcgtgggctacgtgaacagcaacatggagaacgccgtgggcagcctgtacgtgagagaggccttccccggcgacagcaagagcatggtgagagagctgatcgacaaggtgagaaccgtgttcgtggagaccctggacgagctgggctggatggacgaggagagcaagaagaaggcccaggagaaggccatgagcatcagagagcagatcggccaccccgactacatcctggaggagatgaacagaagactggacgaggagtacagcaacctgaacttcagcgaggacctgtacttcgagaacagcctgcagaacctgaaggtgggcgcccagagaagcctgagaaagctgagagagaaggtggaccccaacctgtggatcatcggcgccgccgtggtgaacgccttctacagccccaacagaaaccagatcgtgttccccgccggcatcctgcagccccccttcttcagcaaggagcagccccaggccctgaacttcggcggcatcggcatggtgatcggccacgagatcacccacggcttcgacgacaacggcagaaacttcgacaagaacggcaacatgatggactggtggagcaacttcagcacccagcacttcagagagcagagcgagtgcatgatctaccagtacggcaactacagctgggacctggccgacgagcagaacgtgaacggcttcaacaccctgggcgagaacatcgccgacaacggcggcgtgagacaggcctacaaggcctacctgaagtggatggccgagggcggcaaggaccagcagctgcccggcctggacctgacccacgagcagctgttcttcatcaactacgcccaggtgtggtgcggcagctacagacccgagttcgccatccagagcatcaagaccgacgtgcacagccccctgaagtacagagtgctgggcagcctgcagaacctggccgccttcgccgacaccttccactgcgccagaggcacccccatgcaccccaaggagagatgcagagtgtggtag

SEQ ID NO: 343796 - DNA, 1869 bp, Artificial Sequence
  derived and/or modified sequence
atgggaaaatccgagggacccgtgggtatggtggaaagcgccggccgcgcgggacaaaaaaggccaggctttttagaggggggcttactcttgctgctgctgctggtcacagccgcgttagtagcactgggagtgctctatgccgatcgccggggaaagcagctgccacggttggcctcacggttatgtttcctgcaggaggaacggacctttgtgaagaggaagcctagaggaatcccggaggcccaggaggtgagcgaagtgtgcacaactccaggttgcgtaatcgcagctgcacgaatactacagaacatggatcccactacagagccatgtgatgacttctaccagttcgcgtgtggtggatggctgagacgccacgtgatcccagagacgaatagccgctactccatctttgacgtgctgcgggatgaactggaagttatactgaaagtggagttagagacccagctagccaaggccactgttccacaggaggagaggcatgatgtaattgccctgtatcataggatgggtctcgaagagctgcaatcacagttcggcctaaagggatttaattggacactgtttatccaaaccgtgttatctagcgtcaaaattaaattactgcccgacgaggaggtggttgtgtatggcatcccctacctgcagaacttggagaacattatcgacacctacagtgctagaaccatacagaattacttagtttggcggctagtactcgaccgcattgggtctctttcccaacgctttaaggatactagggttaactaccgcaaggcccttttcggaaccatggtagaggaggtccgttggagggaatgcgtggggtacgtgaattcaaatatggaaaacgccgtggggtcactgtacgttcgtgaagcattcccgggggactccaaatcgatggtccgggaactcattgataaggtccgcactgtgttcgtggagaccctggacgaactggggtggatggatgaagagtccaagaagaaagcgcaagaaaaggcgatgagtatccgcgagcagattggccacccagattacattctcgaggaaatgaatcggaggctagatgaagagtactctaatctgaatttttcggaggatttgtattttgaaaacagcttgcagaatttaaaggtgggggcacagcgctctctgaggaaactaagggagaaagtcgatcccaacctgtggatcatcggcgccgctgtcgtgaatgccttctactccccaaaccgaaaccagatcgtgtttcccgcagggatacttcagcctccctttttcagcaaggagcagccccaggcactgaactttggcggcatcggtatggtcataggacacgaaatcactcacggcttcgacgataatggaagaaactttgataaaaatggaaatatgatggactggtggtccaatttcagtacacagcattttcgtgaacaatcagagtgcatgatctaccagtacggcaactattcatgggatctcgccgacgagcagaatgtgaatggcttcaataccctaggcgaaaatattgcagataacgggggagtgcgtcaggcctacaaggcttacttgaagtggatggccgaaggcgggaaagatcaacagctgccaggcctagacctcacccatgagcagctgtttttcatcaactacgcacaggtctggtgcggttcctacaggccagaatttgcaattcagagcataaaaactgatgtgcattcgcctttgaaatatcgcgttctcggttctttgcaaaaccttgcggcatttgccgacacattccattgcgcccgggggacccctatgcatccaaaggagcggtgcagagtatggtag

SEQ ID NO: 343797 - DNA, 1869 bp, Artificial Sequence
  derived and/or modified sequence
atggggaagtctgagggcccagttggaatggtggaaagtgcgggtagagcaggccagaaaagacctggctttctggaaggagggctgttactgctgctgctgctcgttactgctgccctggtcgccctgggggtgctgtacgccgatagaagaggaaaacagttgccacgcctggcctcacgcctgtgcttcctacaggaagagcgtacgtttgtcaagagaaaacctcgaggaatacccgaagcccaagaggtgagcgaggtgtgcactactcctgggtgtgtgatcgcggcagcccggatcttgcagaacatggacccaaccacggaaccctgtgacgatttttatcagttcgcctgcggtggctggttacggcgacacgtcataccagagacaaattcccggtattcgattttcgacgttttgcgggatgagctggaagtgatcctgaaggccgtgctcgagaattccaccgccaaggcaaccgtgccccaggaagagcggcacgatgtaatcgccttgtatcatagaatgggcctggaggaactgcagtctcagttcggactgaagggcttcaactggacacttttcatccagaccgttttgagctccgttaagatcaaactgctgccagatgaggaagtcgtagtctatgggattccctatctgcagaacctagagaacatcatcgacacttactcagctcgcacaatccaaaattaccttgtgtggcggctcgtgctcgaccggatcgggtctttgtcacagcgtttcaaggacactagagtcaactacaggaaggccctcttcggaactatggtggaagaagttcgctggagagagtgcgtcggctatgtgaacagcaacatggaaaacgcagtgggctctttatatgtcagagaagcttttccgggggattcaaagtctatggtgcgagagctaattgacaaggtgcgtacagtgtttgtggagaccttggacgagctgggatggatggacgaggagtccaagaaaaaggctcaggaaaaagccatgagtatcagagagcagatcgggcaccccgattatattctggaagagatgaatcgcagacttgatgaagaatacagtaatctcaacttctcggaggatttatattttgagaacagtttgcagaatctcaaagtgggagcccagagatcccttcggaagctacgggaaaaggtcgatccaaacctgtggattattggcgcggccgtcgtgaatgcgttttattcacccaatcggaaccagatcgtatttcctgcaggaatcttacagcctccttttttctcaaaagagcagccccaggcgttgaattttggaggcatcggcatggtcatcggacacgagataacacatggcttcgatgacaacggacgcaacttcgacaaaaacggaaatatgatggactggtggagtaatttcagtacacagcatttcagggaacagtctgagtgtatgatttaccagtatgggaactattcatgggatctcgccgatgaacagaatgtgaatgggttcaataccctgggggagaatattgccgacaatggaggcgtgcggcaagcatataaagcgtatctcaagtggatggccgaaggtgggaaagatcagcagttgcccggactcgacctgacacatgagcagctattttttatcaactatgcccaggtgtggtgtggctcctaccgaccagaattcgcgatccagtccatcaaaacggatgtgcattccccactcaagtatagggtgctgggcagtctgcaaaaccttgcagcctttgccgacaccttccactgtgcccgcggaacaccgatgcatccaaaagaacgctgtcgcgtctggtag

SEQ ID NO: 343798 - DNA, 1869 bp, Artificial Sequence
  derived and/or modified sequence
atgggcaagtctgagggccctgtgggcatggtggagagcgctggccgggccggccagaagaggcctggcttcctggagggcggcctgctgctgctgctgctgctggtgacagctgccctggtggccctgggcgtgctgtatgctgaccggcggggcaagcagctgccccggctggccagccggctgtgcttcctgcaggaggagaggacctttgtgaagaggaagccccggggcatccctgaggcccaggaggtgtctgaggtgtgcaccaccccaggctgtgtgattgctgctgcccgcatcctgcagaacatggaccccaccacagagccctgtgatgacttctaccagtttgcctgtggcggctggctgcggagacatgtgattcctgagaccaacagccgctacagcatctttgatgtgctgagagatgagctggaggtgatcctgaaggtggagctggagacccagctggccaaggccaccgtgccccaggaggagagacatgatgtgattgccctgtaccacaggatgggcctggaggagctgcagagccagtttggcctgaagggcttcaactggaccctcttcatccagacagtgctgagctctgtgaagatcaagctgctgcctgatgaggaggtggtggtgtatggcatcccctacctgcagaacctggagaacatcatcgacacctacagcgcccggaccatccagaactacctggtgtggaggctggtgctggacagaattggcagcctgagccagcgcttcaaggacaccagggtgaactacaggaaggccctgtttggcaccatggtggaggaggtgcgctggagagaatgtgtgggctacgtgaacagcaacatggagaatgctgtgggcagcctgtatgtgcgggaggccttccctggggacagcaagtccatggtgcgggagctgattgacaaggtgaggacagtgtttgtggagaccctggatgagctgggctggatggatgaggagagcaagaagaaggcccaggagaaggccatgagcatccgggagcagatcggccacccagactacatcctggaggagatgaacagaaggctggatgaggagtacagcaacctgaacttcagcgaggacctgtactttgagaacagcctgcagaacctgaaggtgggcgcccagaggagcctgaggaagctgcgggagaaggtggaccccaacctgtggatcattggagctgctgtggtgaatgccttctacagccccaacagaaaccagatcgtgtttcctgctggcatcctgcagccccccttcttcagcaaggagcagccccaggccctgaactttggaggcatcggcatggtgattggccacgagatcacccacggctttgatgacaatggaagaaactttgacaagaatggaaacatgatggactggtggagcaacttcagcacccagcacttccgggagcagagcgagtgcatgatctaccagtatggcaactacagctgggacctggctgatgagcagaatgtgaatggcttcaacaccctgggagaaaatattgctgacaatggaggagtgcggcaggcctacaaggcctacctgaagtggatggccgagggcggcaaggaccagcagctgcccggcctggacctgacccatgagcagctgttcttcatcaactatgcccaggtgtggtgtggcagctacagacctgagtttgccatccagagcatcaagacagatgtgcacagccccctgaagtacagagtgctgggcagcctgcagaacctggccgcctttgctgacaccttccactgtgcccggggcacccccatgcaccccaaggagcgctgccgggtgtggtag

SEQ ID NO: 343799 - DNA, 1869 bp, Artificial Sequence
  derived and/or modified sequence
atgggcaagtctgagggccctgtgggcatggtggagagcgctggccgggccggccagaagaggcctggcttcctggagggcggcctgctgctgctgctgctgctggtgacagctgccctggtggccctgggcgtgctgtatgctgaccggcggggcaagcagctgccccggctggccagccggctgtgcttcctgcaggaggagaggacctttgtgaagaggaagccccggggcatccctgaggcccaggaggtgtctgaggtgtgcaccaccccaggctgtgtgattgctgctgcccgcatcctgcagaacatggaccccaccacagagccctgtgatgacttctaccagtttgcctgtggcggctggctgcggagacatgtgattcctgagaccaacagccgctacagcatctttgatgtgctgagagatgagctggaggtgatcctgaaggctgtgctggagaacagcacagccaaggccaccgtgccccaggaggagagacatgatgtgattgccctgtaccacaggatgggcctggaggagctgcagagccagtttggcctgaagggcttcaactggaccctcttcatccagacagtgctgagctctgtgaagatcaagctgctgcctgatgaggaggtggtggtgtatggcatcccctacctgcagaacctggagaacatcatcgacacctacagcgcccggaccatccagaactacctggtgtggaggctggtgctggacagaattggcagcctgagccagcgcttcaaggacaccagggtgaactacaggaaggccctgtttggcaccatggtggaggaggtgcgctggagagaatgtgtgggctacgtgaacagcaacatggagaatgctgtgggcagcctgtatgtgcgggaggccttccctggggacagcaagtccatggtgcgggagctgattgacaaggtgaggacagtgtttgtggagaccctggatgagctgggctggatggatgaggagagcaagaagaaggcccaggagaaggccatgagcatccgggagcagatcggccacccagactacatcctggaggagatgaacagaaggctggatgaggagtacagcaacctgaacttcagcgaggacctgtactttgagaacagcctgcagaacctgaaggtgggcgcccagaggagcctgaggaagctgcgggagaaggtggaccccaacctgtggatcattggagctgctgtggtgaatgccttctacagccccaacagaaaccagatcgtgtttcctgctggcatcctgcagccccccttcttcagcaaggagcagccccaggccctgaactttggaggcatcggcatggtgattggccacgagatcacccacggctttgatgacaatggaagaaactttgacaagaatggaaacatgatggactggtggagcaacttcagcacccagcacttccgggagcagagcgagtgcatgatctaccagtatggcaactacagctgggacctggctgatgagcagaatgtgaatggcttcaacaccctgggagaaaatattgctgacaatggaggagtgcggcaggcctacaaggcctacctgaagtggatggccgagggcggcaaggaccagcagctgcccggcctggacctgacccatgagcagctgttcttcatcaactatgcccaggtgtggtgtggcagctacagacctgagtttgccatccagagcatcaagacagatgtgcacagccccctgaagtacagagtgctgggcagcctgcagaacctggccgcctttgctgacaccttccactgtgcccggggcacccccatgcaccccaaggagcgctgccgggtgtggtag

SEQ ID NO: 343800 - DNA, 2431 bp, Artificial Sequence
  derived and/or modified sequence
atcacaaaggaggcccagaagccttcaggcagcctcaactcagccccaagccactgctctcccatcccagtccctggaaatccacccacttggcccagctcaccccaactccaacccactgggacccagtctccaggggcctgactgtgggcggcagccactcctgagtgagcaaaggttcctccgcggtgctctcccgtccagagccctgctgatggggaagtccgaaggcccagtggggatggtggagagcgccggccgtgcagggcagaagcgcccggggttcctggagggggggctgctgctgctgctgctgctggtgaccgctgccctggtggccttgggtgtcctctacgccgaccgcagagggaagcagctgccacgccttgctagccggctgtgcttcttacaggaggagaggacctttgtaaaacgaaaaccccgagggatcccagaggcccaagaggtgagcgaggtctgcaccacccctggctgcgtgatagcagctgccaggatcctccagaacatggacccgaccacggaaccgtgtgacgacttctaccagtttgcatgcggaggctggctgcggcgccacgtgatccctgagaccaactcaagatacagcatctttgacgtcctccgcgacgagctggaggtcatcctcaaagtggagctggagacacagctggccaaggccacggtaccccaggaggagagacacgacgtcatcgccttgtaccaccggatgggactggaggagctgcaaagccagtttggcctgaagggatttaactggactctgttcatacaaactgtgctatcctctgtcaaaatcaagctgctgccagatgaggaagtggtggtctatggcatcccctacctgcagaaccttgaaaacatcatcgacacctactcagccaggaccatacagaactacctggtctggcgcctggtgctggaccgcattggtagcctaagccagagattcaaggacacacgagtgaactaccgcaaggcgctgtttggcacaatggtggaggaggtgcgctggcgtgaatgtgtgggctacgtcaacagcaacatggagaacgccgtgggctccctctacgtcagggaggcgttccctggagacagcaagagcatggtcagagaactcattgacaaggtgcggacagtgtttgtggagacgctggacgagctgggctggatggacgaggagtccaagaagaaggcgcaggagaaggccatgagcatccgggagcagatcgggcaccctgactacatcctggaggagatgaacaggcgcctggacgaggagtactccaatctgaacttctcagaggacctgtactttgagaacagtctgcagaacctcaaggtgggcgcccagcggagcctcaggaagcttcgggaaaaggtggacccaaatctctggatcatcggggcggcggtggtcaatgcgttctactccccaaaccgaaaccagattgtattccctgccgggatcctccagccccccttcttcagcaaggagcagccacaggccttgaactttggaggcattgggatggtgatcgggcacgagatcacgcacggctttgacgacaatggccggaacttcgacaagaatggcaacatgatggattggtggagtaacttctccacccagcacttccgggagcagtcagagtgcatgatctaccagtacggcaactactcctgggacctggcagacgaacagaacgtgaacggattcaacacccttggggaaaacattgctgacaacggaggggtgcggcaagcctataaggcctacctcaagtggatggcagagggtggcaaggaccagcagctgcccggcctggatctcacccatgagcagctcttcttcatcaactatgcccaggtgtggtgcgggtcctaccggcccgagttcgccatccaatccatcaagacagacgtccacagtcccctgaagtacagggtactggggtcgctgcagaacctggccgccttcgcagacacgttccactgtgcccggggcacccccatgcaccccaaggagcgatgccgcgtgtggtagccaaggccctgccgcgctgtgcggcccacgcccacccgctgctcggaggcatctgtgcgaaggtgcagctagcggcgacccagtgtacgtcccgccccggccaaccatgccaagcctgcctgccaggcctctgcgcctggcctagggtgcagccacctgcctgacacccagggatgagcagtgtccagtgcagtacctggaccggagccccctccacagacacccgcggggctcagtgcccccgtcacagctctgtagagacaatcaactgtgtcctgcccaccctccaaggtgcattgtcttccagtatctacagcttcagacttgagctaagtaaatgcttcaaag

SEQ ID NO: 343801 - DNA, 1869 bp, Artificial Sequence
  derived and/or modified sequence
atgggcaagagcgagggccccgtgggcatggtggagagcgccggccgtgcagggcaaaagcggccaggctttctggagggcggccttctcctcctgctgttgctggtaaccgccgctctggtcgcactcggcgttctctatgccgacagacgcggaaaacagctcccccgtctggcctcacgtttatgcttccttcaggaggagcgcacctttgttaaaagaaagccgcgcgggatccctgaggctcaggaagtcagcgaggtatgcaccacgcctgggtgcgtgatcgctgcagccagaatcctgcagaacatggatcccaccacagagccatgcgatgacttctaccaatttgcctgcggagggtggctgagacgccacgtcattcctgaaaccaatagtcgctattccatttttgacgtgcttcgagatgaactggaggttattttaaaggtggagctggaaacacagcttgccaaggccacagtgccccaggaggaacgacatgatgtgattgcattgtaccaccggatgggtctcgaggagctacagtcccagtttgggctgaagggctttaactggacgctctttatccagaccgtcctaagtagcgttaaaattaagctactccccgacgaggaagttgtggtctatggcattccgtacctgcagaatctggaaaatatcatcgacacttattcggctcggactatacagaactatttagtttggagactcgtcctggacagaatcggatcactgtcacagcggtttaaagacactagggtgaactatagaaaagcactctttggaacgatggtggaggaggtcagatggcgggaatgcgtgggctatgtgaactccaatatggagaatgccgtaggctccttgtacgtccgcgaagctttccctggggattccaagtctatggttagggaactaatagacaaagtccgcaccgtgtttgtcgagaccctggatgagctgggatggatggacgaggaatcaaagaaaaaggctcaggaaaaggccatgagcattcgagaacagatcggacaccccgactacatcctggaagaaatgaatagaaggttggatgaggagtatagtaatttgaattttagcgaggacctttacttcgagaattccctccaaaacctcaaggtgggcgcccagcggtctctgagaaagcttagggagaaagtggatccaaacctgtggatcatcggtgccgccgttgttaacgctttttatagccccaataggaatcagatcgtctttccagccggtattctgcagcctccatttttcagtaaggagcagccccaggcactcaacttcgggggaatcggtatggtaattggacatgagatcacacatggctttgacgataatggacggaattttgacaagaatggtaacatgatggattggtggtcaaactttagcactcagcactttcgcgaacagagcgagtgtatgatttatcagtacggaaattattcctgggacctggcagacgagcagaacgtaaacggctttaacacgctgggtgagaacatagctgacaacggcggagtgcgccaagcctataaggcttacctcaaatggatggcagaaggcgggaaggaccagcagctgccgggcctagatctgactcatgagcagctcttcttcattaactacgcccaagtgtggtgtgggagctaccggcctgagttcgctattcagagcatcaagacagatgtccactctcctttaaagtacagagttctgggctctctgcagaatttagctgcatttgccgatacatttcactgtgcacgcggtacaccgatgcatcccaaggagcgctgtagagtgtggtag

SEQ ID NO: 343802 - DNA, 1869 bp, Artificial Sequence
  derived and/or modified sequence
atgggcaagagcgagggccccgtgggcatggtggagagcgccggccgggccggccagaagagacctggctttctcgaggggggtttgctacttctacttctgcttgtcactgcagctctcgtggccctgggcgtcttgtatgccgatcgtcgtggcaagcagctgcccaggctggcaagtcggctatgctttctacaggaggaacgcacattcgtgaagcgcaagccaagaggaatcccagaagcgcaggaagttagcgaagtttgtaccactcccggctgcgtaattgcggccgcacgaattctccagaatatggaccccactaccgaaccatgtgatgacttctaccagtttgcctgcggaggatggctgcgtagacacgtcattccagaaacgaatagcaggtactccatattcgatgttctgcgtgatgagttagaggtgatccttaaggcggtgttggagaacagtacagctaaagccaccgtgccccaggaagagagacatgacgtcatcgcgctttatcaccggatgggcctggaggagctgcagagtcaatttggactgaagggttttaactggacactgttcatccagacggtgctgtccagtgtgaagattaaactgctgcctgacgaagaagtggtcgtgtacggaattccttatcttcagaacctggaaaacatcatcgatacatactcagcgagaacgattcagaactaccttgtgtggcggctcgtgctggatcgcatcggcagtctatctcaacgctttaaagacacaagagtgaactatagaaaagccctcttcgggactatggtggaggaagtaagatggagagaatgtgtcgggtacgttaactcaaacatggaaaacgcagtgggatccctatacgtgcgggaagcgtttcccggcgacagtaaaagcatggtgcgcgaactcattgataaggtgaggacagtgtttgtggagacgctcgacgagctagggtggatggatgaggaaagcaagaaaaaggcccaggagaaagcaatgtctatcagggagcaaattggtcaccccgactacatcttggaggagatgaatagacggctggacgaggagtactctaatctaaatttctccgaggatctttatttcgaaaactccctgcagaatcttaaggttggagcccagaggtccctgcgcaaattgagagaaaaagtggacccaaatctgtggataattggcgcggccgtggtgaatgccttttactctcctaaccggaatcagatagtcttcccagccggtatcctgcagccccccttcttttctaaagaacagcctcaggcgctgaactttggcggcatcggaatggtgatcggacatgagatcacccacgggttcgatgacaatgggcggaacttcgataagaacggcaatatgatggactggtggtcgaatttctcaacccagcacttcagggaacagtccgagtgtatgatttaccaatacgggaactatagctgggatctggcagatgaacagaatgttaacgggtttaatacattaggcgagaacatcgcagacaacggcggggtgagacaagcatataaggcttaccttaagtggatggccgaaggcggtaaagatcagcagttgccaggtctcgaccttacgcacgagcagttgttttttatcaactacgcccaggtgtggtgcgggtcttatagacctgaattcgccatccagagtataaagactgacgtgcactcgccgcttaaatacagagtgctggggtcattgcagaaccttgccgcctttgccgatacattccattgcgccaggggcacccccatgcatcccaaggagcgatgcagggtctggtag

SEQ ID NO: 343803 - RNA, 1869 nt, Artificial Sequence
  derived and/or modified sequence
auggggaaaagcgaaggccccguagguaugguagaauccgccgggagagcaggccagaagaggcccggauuuuuagaggguggcuugcuucugcugcuucugcuggugaccgccgcucuugucgcccuggggguccucuacgcagaucgccggggaaagcagcugccgcggcucgcaucccgacuaugcuuucugcaggaggaacgaacauucgugaaacgcaaaccuagaggcauuccagaagcacaggaaguaucagagguguguacaacuccugggugcgucaucgcugcagcccggauccugcagaacauggacccaacaacugagcccugcgacgauuucuaccaguucgcgugugggggcuggcugcgccggcauguuaucccggaaacaaauagccgcuacagcauuuuugauguuuuaagagaugaacuggaggucauucucaagguugagcucgaaacacagcuugccaaagcaacaguaccucaagaggagagacaugaugucauugcacuuuaucacagaaugggcuuggaggaacugcagucccaguuuggacucaagggauuuaauuggacacuguucauucagacugugcugaguucuguuaaaauuaagcugcugcccgacgaagaagugguuguauacggaauuccauaccugcaaaaccuagagaauaucaucgacacuuauucugccagaacaauccaaaacuaucuuguguggaggcugguguuggauagaauuggcucccugucccagcgauucaaggauaccagagugaauuacaggaaagcccucuucggcacgaugguggaggagguuagauggcgggagugcgugggcuacgucaauuccaauauggaaaaugcugugggcucccuuuacguuagggaagccuuccccggagauaguaaauccaugguucgggagcucaucgacaaggugcgcacuguauucguugagacguuggaugagcucggauggauggacgaagaaucuaagaagaaggcacaggagaaggcaauguccauuagagagcagaucggacauccagauuauauuuuagaggagaugaaccgacgccuggacgaagaguacaguaauuugaacuuuucugaagauuuauacuuugagaauagucugcagaaccugaaagucggugcucagaggucgcugaggaagcugcgcgagaaaguugauccaaaucuguggauaaucggugcagcugucgucaacgcuuuuuacucacccaacaggaaucagauuguguucccugcaggaauacuccaaccgccauucuuuucuaaggagcagccccaagcccucaacuucggcgggauugguauggucauuggccaugagauuacgcacgguuucgacgacaacgggaggaauuucgacaaaaaugguaauaugauggacugguggucuaauuucucgacucagcauuucagggagcaguccgagugcaugaucuaucaauauggcaacuauucaugggaucuggcagaugagcagaacgucaacgguuuuaacacgcucggcgaaaacaucgcugauaacgggggcguccggcaggccuacaaagccuaucuaaaguggauggccgagggugggaaagaccaacaguuaccaggacuggaucugacccaugaacaacucuuuuucauuaacuacgcccaggucuggugcggcagcuaucgacccgaguuugcuauacaguccauuaagacugauguccacucuccccugaaguaccgcguucuggggucccuucagaaccuugcagccuuugcugacacuuuccacugugcgagaggcaccccgaugcauccuaaagaaagaugucggguuugguag

SEQ ID NO: 343804 - RNA, 1869 nt, Artificial Sequence
  derived and/or modified sequence
augggcaagagugaagguccaguggggaugguggaguccgcagggcgggcgggacaaaagcggccagguuuccucgagggcggucuguuguugcuauuguuauuagucacagcugcgcuggucgcccucggaguacuguacgccgaucgccgagguaaacagcugccgagacuagcaagucggcuuuguuuucugcaagaagagcgcaccuuugucaaacgcaagccaagagguauucccgaggcucaagagguuucagaggucugcacuacuccuggcuguguaauugccgcagccaggauuuugcagaauauggaucccacuaccgaaccaugugaugauuuuuaucaguucgcuuguggagggugguuacgccgacacguaauucccgaaacaaauuccagauauucaaucuucgauguucuucgcgaugaauuagaaguaauuuugaaagccguucucgagaauagcacugcuaaggcaacaguuccccaagaagagagacaugacguaauugcucuguaccauagaaugggccuugaagaacuccaaagucaguucggcuuaaaagguuuuaauuggacauuguucauccagaccguguugagcucaguuaaaaucaagcugcugcccgaugaggagguggugguauaugguaucccguaccugcaaaaccuggagaacaucaucgauaccuauagugccaggaccauucaaaauuaucugguguggcggcucgugcucgacaggaucgggucccugagccagagauucaaagacacucgugucaauuacaggaaggcacuguuugggacaaugguggaagagguacgguggcgggaaugcgugggcuaugucaacagcaauauggagaacgcaguagguagccuguauguuagagaggcguucccaggugacaguaagagcaugguuagggagcugaucgacaaggugcguaccgucuuuguggagaccuuagaugagcuuggcuggauggacgaggagucuaagaagaaggcacaggagaaagcuauguccauaagggaacagaucggucacccagauuauauacuggaggaaaugaacagacgucuagacgaggaguauucuaaucuaaacuuuucagaggacuuguacuuugaaaacuccuuacaaaaccucaaagugggcgcccagcgcagccuacgcaagcugcgggaaaaagucgaucccaaccuguggaucauuggugcugcaguaguaaaugcguucuacucaccaaaccgcaaccagaucguuuuccccgcugguauacuacagcccccuuucuucaguaaagagcagccacaggcucucaauuucgguggcauuggcauggugauuggacacgagauuacccaugguuucgacgacaauggccguaauuucgacaagaaugggaacaugauggacugguggucgaacuuuagcacgcagcacuuucgggaacagucugaauguaugauuuaccaguacggaaauuacuccugggaucucgcggaugaacaaaaugugaacggcuucaacacacugggugaaaacauugcagauaauggcgggguacgccaggcuuacaaggcuuaccugaaguggauggccgagggcggaaaagaccaacagcugccuggauuagaccugacacacgaacagcuuuuuuucauaaacuaugcccaaguuuggugugguucuuauaggccugaguuugccauccagucaauaaaaacugacgugcacagcccacuuaaauaucgcgugcuugggagucugcagaaucuggcugcauuugcagauaccuuccauugcgcuagagggacccccaugcaucccaaggagcguuguagagucugguag

SEQ ID NO: 343805 - RNA, 1869 nt, Artificial Sequence
  derived and/or modified sequence
augggaaagagcgaaggacccgucgguauggucgaaucugcuggacgagccggacagaagcguccagguuuucuggagggaggucuguuguugcuacugcuucuggugacagcagcucuuguggcuuuaggagugcuguaugccgacagaagaggaaagcagcugccucggcuggccagccgccuguguuuuuuacaagaagaacguaccuuugucaagcggaaaccucguggaaucccagaagcucaagaggucucagaggucugcacuacaccaggaugcguuauugccgcugcccgaaucuuacaaaacauggacccuacuaccgagccaugugacgauuucuaccaauucgccugugguggguggcuucgcagacacgugaucccugaaacaaacagccgcuauucuauuuuugauguccuacgugaugaacucgaggugaucuugaaaguugagcuggaaacccaacucgccaaggccacuguuccacaagaagaaaggcaugacgugaucgcucucuaccaucgaauggggcuugaggagcugcagucccaguucggccugaagggguuuaauuggacucuuuuuauucagacgguuuugucaagugugaaaaucaagcuccuuccagaugaagaggucgucguuuacgggauccccuaucuacagaaucuugagaauauaauagacaccuacucggcucggacaauccagaacuaccuuguuuggcgcuugguucucgaucgcauugggagccugucccagcguuuuaaggauacccguguuaauuaucggaaggcauuauucgggaccaugguggaagagguuagauggagagagugugugggauaugugaacagcaauauggagaaugccgucgggucgcuguacgugagggaggccuuuccaggggacuccaaauccauggugagagagcucauugacaaagucagaaccguguuuguagagacuuuggacgaacugggauggauggaugaagagaguaagaaaaaggcccaagaaaaagcuaugucuauaagagagcaaauuggccacccugauuacauccuugaagagaugaaccgccgcuuggacgaagaguauaguaaccucaacuuuucagaggauuuguauuucgaaaacagccugcagaaccucaagguuggcgcccagcgaagcuugcguaaauuacgagagaaaguugacccuaaucucuggauuaucggcgccgccguuguaaacgcguuuuauucgcccaacagaaaucagauuguuuuuccagcuggaauccuucaaccuccauucuucucuaaagaacaaccacaggcucugaacuucggcggcauuggcauggugauuggccaugaaauaacucacggauucgaugacaauggcagaaacuuugacaagaacgggaauaugauggauugguggagcaacuuuaguacacagcacuucagagagcagagcgagugcaugaucuaucaguacgguaauuauagcugggaccuggcugacgaacaaaacgugaaugguuucaauacccuuggggaaaacauagcugauaacggagggguuagacaggcuuauaaagcuuaucugaaauggauggcugaaggcggaaaggaucagcagcuaccaggacucgaccuaacccaugagcaacuuuuuuucauuaacuaugcacagguauggugugguuccuauagacccgaguuugccauucaauccauuaaaaccgacgugcacucaccccugaaguauaggguacuuggcucacuccagaauuuagcggccuucgcugauaccuuccacugcgccagaggaacaccuaugcauccaaaagaacgaugucgcguuugguag

SEQ ID NO: 343806 - RNA, 1869 nt, Artificial Sequence
  derived and/or modified sequence
augggaaagagugagggucccgugggaaugguagaaagugcggggagggccggucagaaaagacccggcuuucuggagggcgguuuacuacuccugcuccuccuggugaccgcagcguuaguugcgcucggaguucuguacgccgacaggagagguaaacagcugccacgucuggcauccaggcuguguuucuuacaagaagaaagaacauuugugaaaagaaagccucguggaauucccgaagcucaagaggugucugaaguuugcaccacuccaggcugugugaucgcugcagcacggauuuugcagaauauggaucccacuaccgaaccaugugaugauuuuuaucaguucgcuuguggagggugguuacgccgacacguaauucccgaaacaaauuccagauauucaaucuucgauguucuucgcgaugaauuagaaguaauuuugaaagccguucucgagaauagcacugcuaaggcaacaguuccccaagaagagagacaugacguaauugcucuguaccauagaaugggccuugaagaacuccaaagucaguucggcuuaaaagguuuuaauuggacauuguucauccagaccgucuugagcuccgugaagauaaagcuguuacccgaugaagaagugguuguguacggcauccccuaccugcagaauuuggaaaacaucauugauacauauagcgcgcgcacaauacaaaacuauuuaguguggagguuagugcuggauagaauaggaucccucucgcagcgguuuaaggacacacguguaaacuauaggaaggcgcuguuuggcacaaugguugaagaaguuagguggcgggagugcguugguuacgugaauuccaacauggagaacgccguuggcucuuuguaugugcgcgaggcguuucccggcgacucuaagucgaugguacgggaacugauagauaaagugaggacgguguucguugagacgcuagaugagcugggauggauggacgaggaaucuaagaagaaagcccaggagaaggcaaugaguauacgagaacaaaucgggcaccccgauuacauccuggaagaaaugaacagaaggcuagacgaggaguauagcaaucuaaacuucagcgaagaccuuuauuucgagaacucacugcaaaacuugaaggugggugcccagaggagucugagaaaguugagggagaaggucgacccaaaucuauggauuauuggugcagcuguugucaacgccuucuauagccccaaucgcaaccaaauaguguuuccagccgguauacuucagccucccuucuuuaguaaagaacagccccaggcacucaauuuuggaggaaucggaaugguaaucgggcacgaaauuacccauggguucgaugacaacgggagaaacuucgacaagaaugggaacaugauggacugguggucuaacuuuucaacccagcauuuucgcgagcagucugaguguaugaucuaucaauacgggaacuauagcugggaccuggcagacgaacagaauguuaauggauuuaauaccuugggagaaaauaucgcagacaacggaggagucagacaggccuauaaggcuuaccugaaguggauggccgaagguggaaaagaccagcaguugccuggauuagaccuuacgcacgagcaacucuucuucauuaauuaugcccaaguguggugugguaguuaccgucccgaauuugccauucaguccaucaaaaccgaugugcacagcccccugaaguaucgcguccuggggagccuucagaauuuggcugccuucgcagacaccuuucauugugcccgaggaaccccuaugcauccaaaagagcguuguagagucugguag

SEQ ID NO: 343807 - protein, 139 aa, Artificial Sequence
  derived and/or modified sequence
MSDVTIVKEGWVQKRGEYIKNWRPRYFLLKTDGSFIGYKEKPQDVDLPYPLNNFSVAKCQLMKTERPKPNTFIIRCLQWTTVIERTFHVDTPEEREEWTEAIQAVADRLQRQEEERMNCSPTSQIDNIGEEEMDASTTH

SEQ ID NO: 343808 - protein, 414 aa, Artificial Sequence
  derived and/or modified sequence
LLDASEKLKLTYEEKCEIEESQLKFLRNDLAEYQRTCEDLKEQLKHKEFLLAANTCNRVGGLCLKCAQHEAVLSQTHTNVHMQTIERLVKERDDLMSALVSVRSSLADTQQREASAYEQVKQVLQISEEANFEKTKALIQCDQLRKELERQAERLEKELASQQEKRAIEKDMMKKEITKEREYMGSKMLILSQNIAQLEAQVEKVTKEKISAINQLEEIQSQLASREMDVTKVCGEMRYQLNKTNMEKDEAEKEHREFRAKTNRDLEIKDQEIEKLRIELDESKQHLEQEQQKAALAREECLRLTELLGESEHQLHLTRSEIAQLSQEKRYTYDKLGKLQRRNEELEEQCVQHGRVHETMKQRLRQLDKHSQATAQQLVQLLSKQNQLLLERQSLSEEVDRLRTQLPSMPQSDC

SEQ ID NO: 343809 - DNA, 1245 bp, Artificial Sequence
  derived and/or modified sequence
cttctggacgcgtcagagaaactgaagttgacgtacgaggaaaagtgcgaaattgaggagagtcagttgaagttcctccgcaatgatctggccgaatatcagcgtacatgcgaggacctgaaggaacaactgaaacacaaggaatttttgttagcagccaacacctgtaaccgggtagggggcctgtgtttgaaatgcgcacaacatgaggccgtcctttctcagacccacactaacgtccacatgcaaacaatcgaaaggctcgtaaaagagcgagacgatctgatgtccgcgttggttagtgtgcggtcttcccttgctgacacccaacagcgggaggcatccgcatacgaacaggtgaaacaagtcctgcaaatttcagaagaggcaaactttgaaaagacgaaggctttaattcagtgcgaccaactgcggaaggagttggaaaggcaggccgagcgtctggaaaaagaactcgcttcccagcaggaaaagagggccattgagaaagatatgatgaagaaggaaatcacaaaggagcgcgagtacatggggtcaaaaatgctgatcttaagtcagaacatagcacagctcgaggctcaggtggaaaaggttaccaaagagaagatatcagccataaaccaacttgaagagatccaatcgcagcttgcttctagagagatggacgtgacgaaagtgtgtggagagatgaggtaccagcttaataaaaccaacatggaaaaagatgaggcggaaaaggaacaccgggagttcagagccaaaaccaatcgcgacctcgaaatcaaagatcaggaaatcgagaagctgcgaatcgaactggacgaaagcaagcagcatcttgagcaagaacagcaaaaggccgctctggctcgggaggagtgcctgcggctcactgaactactgggcgagtccgaacaccagcttcaccttacccggtctgaaattgctcagctctcacaggagaagcgctatacctacgataagttgggcaaactgcagcggcggaacgaggaacttgaagagcaatgcgtacagcacggtcgagttcatgaaacaatgaaacagcgcctgaggcaattagataaacatagtcaagctacagcccagcagctggtgcagctgttgtcaaaacaaaaccagctacttctcgagcggcagtctctctcagaggaggtggatagactacgaacgcagctgccatcaatgccacagagtgactgttag

SEQ ID NO: 343810 - DNA, 1245 bp, Artificial Sequence
  derived and/or modified sequence
ctgctggatgccagcgagaagctgaagctgacctatgaggagaagtgtgaaattgaggagagccagctgaagttcctgagaaatgacctggccgagtaccagaggacctgtgaggacctgaaggagcagctgaagcacaaggagttcctgctggccgccaacacctgcaacagagtgggcggcctgtgcctgaagtgtgcccagcatgaagctgtgctgagccagacccacaccaacgtgcacatgcagaccatcgagcggctggtgaaggagagagatgacctgatgtctgccctggtgtctgtgcgcagcagcctggccgacacccagcagcgggaggccagcgcctatgagcaggtgaagcaggtgctgcagatcagcgaggaggccaactttgagaagaccaaggccctgatccagtgtgaccagctgaggaaggagctggagcggcaggccgagcggctggagaaggagctggccagccagcaggagaagagggccatcgagaaggacatgatgaagaaggagatcaccaaggagcgggagtacatgggcagcaagatgctgatcctgagccagaacatcgcccagctggaggcccaggtggagaaggtgaccaaggagaagatcagcgccatcaaccagctggaggagatccagagccagctggccagccgggagatggatgtgaccaaggtgtgtggggagatgagataccagctgaacaagaccaacatggagaaggatgaagctgagaaggagcaccgggagttccgggccaagaccaacagagacctggagatcaaggaccaggagattgagaagctgcgcatcgagctggatgagagcaagcagcacctggagcaggagcagcagaaggccgccctggcccgggaggagtgcctgcggctgacagagctgctgggggagagcgagcaccagctgcacctgaccaggtctgagatcgcccagctgagccaggagaagcgctacacctatgacaagctgggcaagctgcagaggagaaatgaggagctggaggagcagtgtgtgcagcacggccgggtgcatgagaccatgaagcagaggctgcggcagctggacaagcacagccaggccacagcccagcagctggtgcagctgctgagcaagcagaaccagctgctgctggagcggcagagcctgtctgaggaggtggaccggctgcggacccagctgcccagcatgccccagagcgactgctag

SEQ ID NO: 343811 - DNA, 1245 bp, Artificial Sequence
  derived and/or modified sequence
ctgctggacgccagcgagaagctgaagctgacctacgaggagaagtgtgaaatcgaagaatcgcagctaaagttcttgaggaacgacttagcagaatatcagagaacatgcgaagatttaaaggaacagctgaagcataaggagttcctccttgctgctaacacctgtaatcgggtaggcggactgtgcctgaagtgcgcacagcatgaagcggtactatctcagacccatacaaacgtgcatatgcagacaattgagaggttggttaaggaacgagacgacctaatgagtgccctggtttctgtacgctcgagtctggccgatacccagcagagagaagcctccgcctacgagcaggtgaaacaggtgctccagatttctgaggaggctaacttcgagaagactaaggcccttatccaatgtgaccagctccgcaaagaattagagagacaggctgagcgcctggagaaagaattggcctcacagcaagagaaacgtgccattgagaaagatatgatgaaaaaagagatcacgaaagagcgcgagtatatgggctctaagatgctgattctgtcccagaatattgctcagctggaggcccaggtcgaaaaggtgacaaaggaaaagatcagtgcaatcaaccagttggaggagatacagtcacagctagcatctagggagatggatgtaaccaaagtgtgcggcgaaatgcgttatcagttgaacaaaacaaacatggagaaagatgaggccgagaaagaacaccgagagttcagggccaaaaccaacagagacctggagatcaaagaccaggaaatcgaaaaactcagaatcgagctggacgagtccaaacaacatctagaacaagagcaacaaaaggccgcccttgcaagggaggagtgtctccgattgaccgaactgcttggtgaatccgagcaccagctccacttaacgagatccgaaatcgctcagctgagtcaggaaaagcgctacacttacgacaaattaggcaaactgcaacgacgaaacgaagagctggaagaacaatgcgttcagcacggcagagtccatgagactatgaaacagcggctgcgacagctggacaagcactcgcaagcgaccgcacaacaactcgtgcagctcctgtctaagcagaatcagctgcttcttgagaggcagtccctgtcagaggaggtggaccgcctgcggacccagttgccctccatgcctcaatctgactgttag

SEQ ID NO: 343812 - DNA, 1245 bp, Artificial Sequence
  derived and/or modified sequence
cttctcgatgcttctgagaagttgaagctgacctatgaagagaagtgtgagatcgaggaaagccaactgaagtttctgcggaacgacctggccgagtaccagagaacgtgcgaggacctgaaggaacagttgaagcataaggaatttctgctggccgctaacacttgcaatcgcgtaggcggactctgcctcaagtgcgctcagcacgaggccgtgctgagtcagacacacactaacgtccatatgcaaacaatagagagacttgtgaaggagcgggacgacctgatgtctgctctcgtgagcgtcagaagctctctagctgacacccagcagagggaggcaagcgcctacgaacaagtgaagcaggtgctgcaaatttccgaggaggcgaattttgagaagacgaaggcactgatccaatgtgatcagttgcggaaagaactggaaagacaggcggagaggctggaaaaggagttggcatctcagcaggaaaagagggcaattgaaaaggacatgatgaaaaaggagatcactaaagagcgtgagtatatgggctctaaaatgctaattctgagccagaatatcgcccagctcgaagcgcaagtggagaaggttaccaaagagaagataagcgctatcaatcagctggaagagatccaaagccagctggcttcccgggaaatggacgttacaaaggtgtgtggcgagatgcgctaccagctcaacaaaaccaacatggagaaggacgaggcagaaaaggagcaccgcgaatttagagctaaaaccaaccgcgatctggaaatcaaggatcaagagatagaaaagcttagaattgaactggacgaatccaagcagcatcttgaacaggaacagcagaaagcagcactggcgcgagaggagtgtctccgcctgacagaactgttgggcgagtctgagcaccagttgcacctgacccgctctgaaatagcacagttgtctcaggaaaaacgctacacttacgataaactaggaaagcttcagaggcggaacgaggaactggaggaacagtgtgtccaacacggtagggttcacgagactatgaagcaacgtctgaggcagcttgacaaacactcgcaggccaccgctcaacaacttgtgcagctgctttctaagcagaaccagttactgctcgagaggcagtccttgtccgaggaagtggaccggctgcggacccagctgccctcgatgcctcagagtgattgttag

SEQ ID NO: 343813 - DNA, 1551 bp, Artificial Sequence
  derived and/or modified sequence
cttctggatgcatccgagaagctaaaacttacttatgaggaaaagtgtgaaattgaggaatcccaattgaagtttttgaggaacgacttagctgaatatcagagaacttgtgaagatcttaaagagcaactaaagcataaagaatttcttctggctgctaatacttgtaaccgtgttggtggtctttgtttgaaatgtgctcagcatgaagctgttctttcccaaacccatactaatgttcatatgcagaccatcgaaagactggttaaagaaagagatgacttgatgtctgcactagtttccgtaaggagcagcttggcagatacgcagcaaagagaagcaagtgcttatgaacaggtgaaacaagttttgcaaatatctgaggaagccaattttgaaaaaaccaaggctttaatccagtgtgaccagttgaggaaggagctggagaggcaggcggagcgacttgaaaaagaacttgcatctcagcaagagaaaagggccattgagaaagacatgatgaaaaaggaaataacgaaagaaagggagtacatgggatcaaagatgttgatcttgtctcagaatattgcccaactggaggcccaggtggaaaaggttacaaaggaaaagatttcagctattaatcaactggaggaaattcaaagccagctggcttctcgggaaatggatgtcacaaaggtgtgtggagaaatgcgctatcagctgaataaaaccaacatggagaaggatgaggcagaaaaggagcacagagagttcagagcaaaaactaacagggatcttgaaattaaagatcaggaaatagagaaattgagaatagaactggatgaaagcaaacaacacttggaacaggagcagcagaaggcagccctggccagagaggagtgcctgagactaacagaactgctgggcgaatctgagcaccaactgcacctcaccagatctgaaatagctcaactcagtcaagaaaaaaggtatacatatgataaattgggaaagttacagagaagaaatgaagaattggaggaacagtgtgtccagcatgggagagtacatgagacgatgaagcaaaggctaaggcagctggataagcacagccaggccacagcccagcagctggtgcagctcctcagcaagcagaaccagcttctcctggagaggcagagcctgtcggaagaggtggaccggctgcggacccagttacccagcatgccacaatctgattgctgacctggatggaacagagtgaaataaatgatttacaaagagatatttacattcatctggtttagacttaatatgccacaacgcaccacgaccttcccagggtgacaccgcctcagcctgcagtggggctggtcctcatcaacgcgggcgctgtccccgcacgcagtcgggctggagctggagtctgactctagctgagcagagctcctggtgtatgttttcagaaatggcttgaagttatgtgtttaaatctgctcattcgtatgctaggttatacatatgattttcaataaatgaactttttaaaga

SEQ ID NO: 343814 - DNA, 1245 bp, Artificial Sequence
  derived and/or modified sequence
ctgctggacgccagcgagaagctgaagctgacctacgaggagaagtgcgagatcgaggagagccagctgaagttcctgagaaacgacctggccgagtaccagagaacctgcgaggacctgaaggagcagctgaagcacaaggagttcctgctggccgccaacacctgcaacagagtgggcggcctgtgcctgaagtgcgcccagcacgaggccgtgctgagccagacccacaccaacgtgcacatgcagaccatcgagagactggtgaaggagagagacgacctgatgagcgccctggtgagcgtgagaagcagcctggccgacacccagcagagagaggccagcgcctacgagcaggtgaagcaggtgctgcagatcagcgaggaggccaacttcgagaagaccaaggccctgatccagtgcgaccagctgagaaaggagctggagagacaggccgagagactggagaaggagctggccagccagcaggagaagagagccatcgagaaggacatgatgaagaaggagatcaccaaggagagagagtacatgggcagcaagatgctgatcctgagccagaacatcgcccagctggaggcccaggtggagaaggtgaccaaggagaagatcagcgccatcaaccagctggaggagatccagagccagctggccagcagagagatggacgtgaccaaggtgtgcggcgagatgagataccagctgaacaagaccaacatggagaaggacgaggccgagaaggagcacagagagttcagagccaagaccaacagagacctggagatcaaggaccaggagatcgagaagctgagaatcgagctggacgagagcaagcagcacctggagcaggagcagcagaaggccgccctggccagagaggagtgcctgagactgaccgagctgctgggcgagagcgagcaccagctgcacctgaccagaagcgagatcgcccagctgagccaggagaagagatacacctacgacaagctgggcaagctgcagagaagaaacgaggagctggaggagcagtgcgtgcagcacggcagagtgcacgagaccatgaagcagagactgagacagctggacaagcacagccaggccaccgcccagcagctggtgcagctgctgagcaagcagaaccagctgctgctggagagacagagcctgagcgaggaggtggacagactgagaacccagctgcccagcatgccccagagcgactgctag

SEQ ID NO: 343815 - DNA, 402 bp, Artificial Sequence
  derived and/or modified sequence
atgagcttgacaagttggtttctggtaagcagtgggggcacccggcatcgccttcctcgcgagatgatttttgtggggcgagacgactgcgagctgatgctgcaatcgaggagtgttgataaacagcacgccgttattaactacgacgcgagcactgatgaacatctggttaaggatctgggctcgctcaacggaactttcgtaaacgatgtcagaatccccgagcagacctacatcaccttaaaattagaggataagctaagattcggctacgataccaatctcttcactgtggtgcaaggtgagatgcgtgtgccagaggaggccctgaagcacgagaagttcacaattcagttgcagctgtcccagaagagcagtgaaagtgagctgagtaagagttag

SEQ ID NO: 343816 - DNA, 267 bp, Artificial Sequence
  derived and/or modified sequence
atgtctttgaccagctggtttctcgtctccagcggcggcaccagacatcggctccctagagaaatgatctttgtgggcagggacgattgcgagctgatgctgcagtcccgatccgtcgacaagcagcatgctgtgatcaactatgacgcttccaccgatgaacacctcgtgaaagatctgggaagtctgaacggcacctttgtgaatgacgtgcggatcccggaacagacatacataaccctcaagctggaggataaactacgctag

SEQ ID NO: 343817 - DNA, 336 bp, Artificial Sequence
  derived and/or modified sequence
atgagccttacgtcctggttcttagtctctagtggagggaccaggcataggctgcctagggagatgatattcgtcggacgagacgattgcgaactcatgctccagagccgcagtgtcgataaacaacatgcggtgataaactacgacgcctccaccgacgagcatctagtgaaggatctgggaagtctgaacggcactttcgtgaatgatgtgcgtatccctgaacagacatatattacactcaagctagaggataagctacggtttggttacgacaccaatttgtttaccgtggtgcagggcgaaatgagggtccctgaagaggctctcaagtag

SEQ ID NO: 343818 - DNA, 402 bp, Artificial Sequence
  derived and/or modified sequence
atgagcctgacctcctggttcctggtgtcctctgggggcaccaggcaccggctgccccgggagatgatctttgtgggcagagatgactgtgagctgatgctgcagagccgctctgtggacaagcagcacgccgtcatcaactatgatgccagcacagatgagcacctggtgaaggacctgggcagcctgaatggcacctttgtgaatgatgtgcgcatccctgagcagacctacatcaccctgaagctggaggacaagctgcgcttcggctatgacaccaacctcttcaccgtggtgcagggcgagatgagggtgcctgaggaggccctgaagcatgagaagttcaccatccagctgcagctgagccagaagagcagcgagagcgagctgagcaagagctag

SEQ ID NO: 343819 - DNA, 267 bp, Artificial Sequence
  derived and/or modified sequence
atgagcctgacctcctggttcctggtgtcctctgggggcaccaggcaccggctgccccgggagatgatctttgtgggcagagatgactgtgagctgatgctgcagagccgctctgtggacaagcagcacgccgtcatcaactatgatgccagcacagatgagcacctggtgaaggacctgggcagcctgaatggcacctttgtgaatgatgtgcgcatccctgagcagacctacatcaccctgaagctggaggacaagctgaggtag

SEQ ID NO: 343820 - DNA, 336 bp, Artificial Sequence
  derived and/or modified sequence
atgagcctgacctcctggttcctggtgtcctctgggggcaccaggcaccggctgccccgggagatgatctttgtgggcagagatgactgtgagctgatgctgcagagccgctctgtggacaagcagcacgccgtcatcaactatgatgccagcacagatgagcacctggtgaaggacctgggcagcctgaatggcacctttgtgaatgatgtgcgcatccctgagcagacctacatcaccctgaagctggaggacaagctgcgcttcggctatgacaccaacctcttcaccgtggtgcagggcgagatgagggtgcctgaggaggccctgaagtag

SEQ ID NO: 343821 - DNA, 402 bp, Artificial Sequence
  derived and/or modified sequence
atgagcctgaccagctggttcctggtgagcagcggcggcacccggcaccgacttccaagggaaatgatcttcgtgggacgtgacgattgcgagctgatgctgcagagccgctccgttgataagcagcacgccgtcatcaactatgacgccagtaccgatgaacacttggtcaaggacctgggttctcttaacggtacatttgtgaacgatgtacgaattccggagcagacatatatcaccctgaagctggaagataagctgaggttcggatatgacaccaatctgtttacagttgtgcagggtgagatgcgcgttcctgaggaggccttaaagcacgagaaattcaccattcagctccaattatctcaaaagtccagcgaaagcgagctgtcaaaatcctag

SEQ ID NO: 343822 - DNA, 267 bp, Artificial Sequence
  derived and/or modified sequence
atgagcctgaccagctggttcctggtgagcagcggcggcacccggcatcggctccctcgcgagatgattttcgtcggtcgcgatgactgtgagcttatgttgcagtcaaggtcagtggataagcagcatgcagtgatcaattacgatgcttccacagacgagcacctagtgaaggacctcggatctctgaatggtacattcgtgaatgacgttaggattcccgagcagacgtacatcacactgaagctggaggacaagctccgctag

SEQ ID NO: 343823 - DNA, 336 bp, Artificial Sequence
  derived and/or modified sequence
atgagcctgaccagctggttcctggtgagcagcggcggcacccggcatcgcctgccgagggagatgatcttcgtaggccgcgacgattgtgagctgatgctgcaatctaggagcgttgacaagcagcacgctgtaatcaattatgatgcgtccaccgatgagcatctggtaaaagatttggggagccttaatggtacattcgtgaatgatgtgaggatcccagagcagacatacataactttaaaactcgaggacaaactccgatttgggtacgatacgaacctgtttaccgtggtgcagggcgaaatgagagtgcccgaggaggccctgaagtag

SEQ ID NO: 343824 - DNA, 402 bp, Artificial Sequence
  derived and/or modified sequence
atgtcacttacctcctggtttcttgtgtcctctggcggtacccggcatcggctgccacgcgagatgattttcgtgggtagggatgactgcgaattgatgctgcagagtcggtctgtcgataaacagcacgccgtgataaattacgacgccagcaccgatgagcatctcgtgaaggacctcggatccctgaatggcacttttgttaacgatgtccgcatccctgagcagacctacattacgctgaagttggaagacaagttgaggtttggctatgacacaaaccttttcacagtcgtgcagggcgaaatgagagtaccagaagaggccttaaaacacgaaaagtttacaattcagcttcaattgtctcagaagtccagtgaatctgagctcagcaagagctag

SEQ ID NO: 343825 - DNA, 267 bp, Artificial Sequence
  derived and/or modified sequence
atgtctctcactagctggtttttggtcagctcagggggtacgaggcacaggctgccaagagagatgatctttgtggggagggacgactgtgaactaatgctgcaatcaagaagcgtggacaaacagcacgcagttatcaactacgacgctagcactgatgaacaccttgtcaaggacctcggttccctgaatggtaccttcgtcaacgacgttcgtatccccgagcagacctatattacacttaaactcgaggacaagctccgctag

SEQ ID NO: 343826 - DNA, 336 bp, Artificial Sequence
  derived and/or modified sequence
atgagcctcacatcctggttcctcgtgagctcaggaggaacaagacaccgtcttcccagagaaatgattttcgtaggtagagatgactgcgaactgatgctgcagagccggtctgtggacaagcagcatgctgtgattaattacgatgcctcaaccgacgaacacctggtcaaggacctggggtcccttaatgggacttttgtcaacgacgtcagaattcctgagcaaacgtacataacattgaagctggaagataaactcagattcggatacgataccaacctgtttacagtggtccagggcgagatgagagttcccgaggaggccctaaaatag

SEQ ID NO: 343827 - DNA, 561 bp, Artificial Sequence
  derived and/or modified sequence
gtcatgcaccctgcctggcgactgcaccccgtggaggctctggctctgtagtaaacccgggggaggagagagtggcttcctgtcggcttcattgtcctaggattcagatgtagggttttggatgacgtagctttgccaaagacttagaagctaagcagaaaatgagcttaacatcctggtttttggtgagcagtggaggcactcgccacaggctgccacgagaaatgatttttgttggaagagatgactgtgagctcatgttgcagtctcgtagtgtggataagcaacacgctgtcatcaactatgatgcgtctacggatgagcatttagtgaaggatttgggcagcctcaatgggacttttgtgaatgatgtaaggattccggaacagacttatatcaccttgaaacttgaagataagctgagatttggatatgatacaaatcttttcactgtagtacaaggagaaatgagggtccctgaagaagctcttaagcatgagaagtttaccattcagcttcagttgtcccaaaaatcttcagaatcagaattatccaaatctg

SEQ ID NO: 343828 - DNA, 593 bp, Artificial Sequence
  derived and/or modified sequence
atgtgctccctgagtaggctgtgactatcactgaacttgattctcaccgtgattaatctagttcttgcctttgtgatgtaaaagtagtaatcctcctaaaatggacctttactttcataaagtaacttactacatgaggaaagatgtcctaacatgtgcttttcataaaaacgaagtgttgcagtgttttccctactacctaatggtagctacttaacggatgacgtagctttgccaaagacttagaagctaagcagaaaatgagcttaacatcctggtttttggtgagcagtggaggcactcgccacaggctgccacgagaaatgatttttgttggaagagatgactgtgagctcatgttgcagtctcgtagtgtggataagcaacacgctgtcatcaactatgatgcgtctacggatgagcatttagtgaaggatttgggcagcctcaatgggacttttgtgaatgatgtaaggattccggaacagacttatatcaccttgaaacttgaagataagctgagatttggatatgatacaaatcttttcactgtagtacaaggagaaatgagggtccctgaagaagctcttaag

SEQ ID NO: 343829 - DNA, 402 bp, Artificial Sequence
  derived and/or modified sequence
atgagcctgaccagctggttcctggtgagcagcggcggcaccagacacagactgcccagagagatgatcttcgtgggcagagacgactgcgagctgatgctgcagagcagaagcgtggacaagcagcacgccgtgatcaactacgacgccagcaccgacgagcacctggtgaaggacctgggcagcctgaacggcaccttcgtgaacgacgtgagaatccccgagcagacctacatcaccctgaagctggaggacaagctgagattcggctacgacaccaacctgttcaccgtggtgcagggcgagatgagagtgcccgaggaggccctgaagcacgagaagttcaccatccagctgcagctgagccagaagagcagcgagagcgagctgagcaagagctag

SEQ ID NO: 343830 - DNA, 267 bp, Artificial Sequence
  derived and/or modified sequence
atgagcctgaccagctggttcctggtgagcagcggcggcaccagacacagactgcccagagagatgatcttcgtgggcagagacgactgcgagctgatgctgcagagcagaagcgtggacaagcagcacgccgtgatcaactacgacgccagcaccgacgagcacctggtgaaggacctgggcagcctgaacggcaccttcgtgaacgacgtgagaatccccgagcagacctacatcaccctgaagctggaggacaagctgagatag

SEQ ID NO: 343831 - DNA, 336 bp, Artificial Sequence
  derived and/or modified sequence
atgagcctgaccagctggttcctggtgagcagcggcggcaccagacacagactgcccagagagatgatcttcgtgggcagagacgactgcgagctgatgctgcagagcagaagcgtggacaagcagcacgccgtgatcaactacgacgccagcaccgacgagcacctggtgaaggacctgggcagcctgaacggcaccttcgtgaacgacgtgagaatccccgagcagacctacatcaccctgaagctggaggacaagctgagattcggctacgacaccaacctgttcaccgtggtgcagggcgagatgagagtgcccgaggaggccctgaagtag

SEQ ID NO: 343832 - protein, 468 aa, Artificial Sequence
  derived and/or modified sequence
MSSDQETYSCKPHGRTPLTSADEHVHSKLEGSKVTKSKTSPVVSGSSSKSTTLPRPRPTRTSLLRRARLGEASDSELADADKASVASEVSTTSSTSKPPTGRRNISRIDLLAQPRRTRLGSLSARSDSEATISRSSASSRTAEAIIRSGARLVPSDKFSPRIRANSISRLSDSKVKSMTSAHGSASALKTTRLQSAGSAMPTSSSFKHRIKEQEDYIRDWTAHREEIARISQDLALIAREINDVAGEIDSVTSSGTAPSTTVSTAATTPGSAIDTREEVGDLHGEMHKLVDRVFDESLNFRKIPPLVHSKTPEGNNGRSGDPRPQAAEPPDHLTITRRRTWSRDEVMGDNLLLSSVFQFSKKIRQSIDKTAGKIRILFKDKDRNWDDIESKLRAESEVPIVKTSSMEISSILQELKRVEKQLQAINAMIDPDGTLEALNNMGFPSAMLPSPPKQKSSPVNNHHSPAML

SEQ ID NO: 343833 - protein, 88 aa, Artificial Sequence
  derived and/or modified sequence
MSLTSWFLVSSGGTRHRLPREMIFVGRDDCELMLQSRSVDKQHAVINYDASTDEHLVKDLGSLNGTFVNDVRIPEQTYITLKLEDKLR

SEQ ID NO: 343834 - protein, 412 aa, Artificial Sequence
  derived and/or modified sequence
MRVPEEALKHEKFTIQLQLSQKSSESELSKSASAKSIDSKVADAATEVQHKTTEALKSEEKAMDISAMPRGTPLYGQPSWWGDDEVDEKRAFKTNGKPEEKNHEAGTSGCGIDAKQVEEQSAAANEEVLFPFCREPSYFEIPTKEFQQPSQITESTIHEIPTKDTPSSHITGAGHASFTIEFDDSTPGKVTIRDHVTKFTSDQRHKSKKSSPGTQDLLGIQTGMMAPENKVADWLAQNNPPQMLWERTEEDSKSIKSDVPVYLKRLKGNKHDDGTQSDSENAGAHRRCSKRATLEEHLRRHHSEHKKLQKVQATEKHQDQAVTSSAHHRGGHGVPHGKLLKQKSEEPSVSIPFLQTALLRSSGSLGHRPSQEMDKMLKNQADCGSVAFCGFMIFKLNLMITPFPFIDLFSFF

SEQ ID NO: 343835 - protein, 133 aa, Artificial Sequence
  derived and/or modified sequence
MSLTSWFLVSSGGTRHRLPREMIFVGRDDCELMLQSRSVDKQHAVINYDASTDEHLVKDLGSLNGTFVNDVRIPEQTYITLKLEDKLRFGYDTNLFTVVQGEMRVPEEALKHEKFTIQLQLSQKSSESELSKS

SEQ ID NO: 343836 - protein, 111 aa, Artificial Sequence
  derived and/or modified sequence
MSLTSWFLVSSGGTRHRLPREMIFVGRDDCELMLQSRSVDKQHAVINYDASTDEHLVKDLGSLNGTFVNDVRIPEQTYITLKLEDKLRFGYDTNLFTVVQGEMRVPEEALK

SEQ ID NO: 343837 - protein, 1021 aa, Artificial Sequence
  derived and/or modified sequence
MATEGAAQLGNRVAGMVCSLWVLLLVSSVLALEEVLLDTTGETSEIGWLTYPPGGWDEVSVLDDQRRLTRTFEACHVAGAPPGTGQDNWLQTHFVERRGAQRAHIRLHFSVRACSSLGVSGGTCRETFTLYYRQAEEPDSPDSVSSWHLKRWTKVDTIAADESFPSSSSSSSSSSSAAWAVGPHGAGQRAGLQLNVKERSFGPLTQRGFYVAFQDTGACLALVAVRLFSYTCPAVLRSFASFPETQASGAGGASLVAAVGTCVAHAEPEEDGVGGQAGGSPPRLHCNGEGKWMVAVGGCRCQPGYQPARGDKACQACPRGLYKSSAGNAPCSPCPARSHAPNPAAPVCPCLEGFYRASSDPPEAPCTGPPSAPQELWFEVQGSALMLHWRLPRELGGRGDLLFNVVCKECEGRQEPASGGGGTCHRCRDEVHFDPRQRGLTESRVLVGGLRAHVPYILEVQAVNGVSELSPDPPQAAAINVSTSHEVPSAVPVVHQVSRASNSITVSWPQPDQTNGNILDYQLRYYDQAEDESHSFTLTSETNTATVTQLSPGHIYGFQVRARTAAGHGPYGGKVYFQTLPQGELSSQLPERLSLVIGSILGALAFLLLAAITVLAVVFQRKRRGTGYTEQLQQYSSPGLGVKYYIDPSTYEDPCQAIRELAREVDPAYIKIEEVIGTGSFGEVRQGRLQPRGRREQTVAIQALWAGGAESLQMTFLGRAAVLGQFQHPNILRLEGVVTKSRPLMVLTEFMELGPLDSFLRQREGQFSSLQLVAMQRGVAAAMQYLSSFAFVHRSLSAHSVLVNSHLVCKVARLGHSPQGPSCLLRWAAPEVIAHGKHTTSSDVWSFGILMWEVMSYGERPYWDMSEQEVLNAIEQEFRLPPPPGCPPGLHLLMLDTWQKDRARRPHFDQLVAAFDKMIRKPDTLQAGGDPGERPSQALLTPVALDFPCLDSPQAWLSAIGLECYQDNFSKFGLCTFSDVAQLSLEDLPALGITLAGHQKKLLHHIQLLQQHLRQQGSVEV

SEQ ID NO: 343838 - DNA, 3066 bp, Artificial Sequence
  derived and/or modified sequence
atggccactgagggcgcggctcagctgggcaatagagtggcagggatggtttgctccctgtgggttctcctgcttgtgagtagtgtcttagctctggaagaagtactcctggacacaacgggggagacgtccgagattgggtggctgacttacccgccaggggggtgggatgaagtgagcgtcctggacgatcagaggcgactgacacgcacatttgaggcttgtcacgtcgccggtgcgccacccggcacaggccaggataattggctgcagactcacttcgtggaaaggaggggtgcccagcgagcccacatccgtctgcacttcagtgtccgtgcctgttcaagcctcggcgtcagcgggggtacctgtcgggagacatttacgttgtattaccgccaagctgaggaacctgactctcccgattccgttagttcctggcacctcaaacgttggacaaaagttgatacaattgctgctgatgaaagcttcccctcctcgtcatcttcctcctctagttcgagctctgcagcgtgggctgtgggaccccacggagctggacagcgagccggcttgcagctcaacgtgaaggaacggagtttcggcccgttgacccagcggggtttttacgttgctttccaggacaccggggcatgcctggccctagttgccgtgaggcttttttcctatacctgtcccgctgtgctgcggagcttcgcgtcatttccggaaacacaggcctccggggctggtggggctagtctggtggctgccgtagggacttgtgttgctcacgcagaacccgaggaagatggagtaggagggcaggcaggcggctcccctcctcgccttcattgtaacggggagggtaaatggatggttgcggtggggggatgtagatgtcagcctggttaccagcctgcaagaggagacaaggcttgtcaggcttgtccacgcggactttataagagcagcgcgggaaatgccccatgttctccgtgcccagcaagatctcacgcccccaatcctgctgcaccagtgtgtccatgtttagaggggttctacagggccagcagtgaccccccagaagctccatgtacgggtcccccatctgccccccaggagctttggtttgaggtccaagggtcagccctgatgctgcactggcgcctacctcgtgaacttggaggtcgcggcgatttgctgttcaacgtcgtgtgcaaagaatgcgaaggacgacaggagcctgcgagcggtggaggtgggacatgtcataggtgtagagacgaggtgcatttcgatcccagacagcgggggctcactgaaagccgagtgctggtcgggggcttgcgcgctcacgtcccatacatattggaggttcaggcagtgaatggcgtgtccgagctttcaccagatccaccacaggccgcagccataaatgtctccacaagtcacgaagtgccaagtgcggttccggtggtacaccaggtgtccagagcgtccaatagcatcaccgtctcctggccacaacccgatcagaccaacgggaatatcctggattatcagctgaggtattacgaccaagccgaagatgagagccactcttttacacttacaagcgagacaaatacagcaactgtcacccagttgagtccagggcacatatatggcttccaagtgagagcccggacagccgccgggcacgggccttatggcgggaaggtatactttcagacgttaccccaaggagaactgagctcgcagttaccggaaaggttgtccctcgtgattggaagcattctcggagcacttgcctttctccttcttgcagccattaccgttctcgcagtcgtctttcagcgcaagaggcgcggtaccggctacacagaacagcttcagcagtactcttctccaggactgggcgtgaaatattatatcgacccctcgacatatgaagacccgtgtcaggcaattcgcgagctcgccagggaggtcgatcccgcgtacattaaaatcgaagaagtcattggtaccggcagctttggtgaagtacggcagggtcggttgcaaccaagaggaagaagagagcagaccgtcgcaattcaggccctttgggccggaggcgccgagtcattacagatgaccttcctgggacgggctgcggtccttggccagttccagcacccaaacattctacggctggaaggagtcgttacaaagagcagaccactaatggtcctgactgaattcatggaattaggccccctcgattcatttctcaggcagcgggagggccaatttagttcattgcagcttgttgcgatgcagcgcggtgtggccgctgccatgcagtacctctctagtttcgcatttgtccacaggtccctcagcgcacattccgtgctggtgaacagtcatctagtgtgtaaggttgcccgactgggacattcccctcagggtccaagttgtctactgcgctgggcggctccagaggtcatcgcccatggcaagcacactacttcttctgatgtttggagcttcggcattcttatgtgggaggtgatgagctacggggagcgcccctactgggacatgtcagagcaagaggtgcttaacgccatagagcaggagtttcgcctgccaccgcctccagggtgccctcctggcctgcatcttcttatgttagatacgtggcagaaggaccgagctcgtcgaccacactttgaccagttggtggccgcgttcgataagatgatcaggaagcctgacaccctgcaggcagggggcgatccaggcgaaaggccgtctcaagctcttctgacccccgttgccctggatttcccatgtctggatagccctcaggcctggctctccgcaattggcctggaatgctatcaagataacttttctaaattcggtctctgtacattttccgacgtcgcacagctgtctctggaagatcttccagcactgggtataactctggcaggtcaccagaagaaattactccaccatattcagctactacagcagcacctccggcagcagggctcagtggaggtatag

SEQ ID NO: 343839 - DNA, 2235 bp, Artificial Sequence
  derived and/or modified sequence
atggcgacagagggagcggcgcagctcgggaatagggtggccggtatggtttcagtcgggggttgtcgatgtcagcctggctaccagccagcaagaggggacaaagcgtgccaggcctgtccccgcggcttgtacaaatccagtgctggtaacgcaccctgcagcccttgcccggctcggtcgcacgctccgaacccggctgctccagtctgcccctgtctggagggattttatagagcttcttccgaccccccagaggccccctgcaccggtccaccttctgccccccaggagttgtggttcgaggtacaaggtagtgcattgatgttgcactggcggctcccacgagagttaggcgggaggggtgatctgttattcaacgtggtgtgtaaagagtgtgagggacgccaggagcccgctagtggcggcgggggcacatgccaccggtgccgcgacgaagttcacttcgacccccgtcaaaggggtctgacagagtcccgagttctcgtcggcggcctccgcgcgcacgtgccctacatcctggaggtacaagctgttaatggagtctcggaactgtcgccagatcccccccaagctgccgctataaacgtatcaacttcacatgaggtgccaagtgccgtgccagtcgtccatcaggtctccagggcttctaattcaattaccgtgtcgtggccccagcctgaccagaccaacgggaatattctggactaccagttgcggtactacgaccaagctgaggacgaaagtcactccttcacactgactagtgaaactaatacagccaccgtgacacagcttagccccggtcacatctacggctttcaggtcagggcgagaaccgccgccggccatggaccatacggagggaaggtgtactttcagacattgccacagggggaattgagtagccagttgccagagaggttgagccttgttatcggatcaatcttaggggctctggcttttctcctgctggctgctatcacagtgctcgcagtggtgttccaaagaaagcggcggggtaccggctacacagaacagctccaacagtactcatctccaggtctgggagtcaagtattacattgatccgtctacgtacgaggacccatgtcaggccatacgcgagctcgcaagagaagtcgatcccgcctacattaaaattgaggaggttatcggtaccggatccttcggggaagtgagacagggccggctgcagccccggggccgacgcgagcagacagttgccattcaggccctttgggcggggggcgccgaatcacttcagatgacctttcttggtcgcgccgccgtgctaggccagtttcagcatccaaatatcctacgcctcgaaggcgtggtcactaagtctagaccgctgatggttttgaccgaattcatggaattagggcctttagacagcttcctccgacagcgcgagggccaattttctagtctgcagcttgtcgccatgcaaaggggggtcgcagccgccatgcagtatctgagctctttcgcctttgtgcatagatctctcagtgcccatagtgtgctggtcaactcccacttagtgtgtaaagtggctaggctgggtcacagtcctcagggcccaagctgtttgctacggtgggccgcccctgaagtaatagcacacggcaagcacaccacgagcagcgatgtctggtccttcggcatcctgatgtgggaggtaatgagctacggagagaggccatactgggacatgagcgagcaggaggttttgaatgcaattgagcaggagtttagactgccacctcctccggggtgtccccccggtctacatttactcatgctggacacatggcaaaaagaccgagcacgccgcccccacttcgatcaactggtggccgcgtttgacaagatgatccgcaaacccgacaccctgcaagctggtggggatccgggtgagaggccctcccaggcactgttgactcctgtcgctctggactttccctgtctggacagcccccaggcatggttatctgcaatcgggctggaatgttaccaagataacttcagcaagttcggcctctgtactttttcggatgtagctcaactctctctggaggatctgccagcactaggtattaccttagccggccatcaaaagaagctcttgcatcatatacaactgctgcaacagcacctacgacaacaaggtagtgtcgaagtttag

SEQ ID NO: 343840 - DNA, 3066 bp, Artificial Sequence
  derived and/or modified sequence
atggcaactgagggtgcagctcagttggggaaccgtgtggcaggtatggtctgtagcctgtgggtcctgctcctagtgtcctcagttctggctctagaagaggtcctgctcgacactactggggagacctccgagatcggctggctcacatatccccccggaggctgggacgaagttagcgtcctggatgatcagcggcgcttaactaggacgtttgaggcctgccacgtagcgggcgcacccccaggaaccgggcaagataactggttacagacccacttcgtcgaacggaggggcgctcagagagcgcacatacgtctgcacttttcagttcgagcatgcagcagcttaggggtaagtggagggacgtgtcgcgagacatttacactttactatagacaggccgaagagcccgatagccctgatagtgtttccagctggcaccttaagaggtggactaaggtggacactatcgccgcagatgaatcttttccttcgtcaagctccagttccagctcatcatcttcagccgcgtgggccgtgggaccccacggcgccggacaaagggcaggcctacagctgaacgtcaaggaacggtcgttcgggcctttgacccagcgcgggttttacgtagcgttccaggacacaggggcctgcctggcactggtagccgttaggctgttctcttacacatgccccgcggttctgcggagctttgcttcgttcccagagacacaggcttccggcgcagggggggctagtctggtggccgccgtcggcacatgtgtcgctcacgcagaaccggaggaagatggggtcggcgggcaagccggcggctctccacccaggcttcactgtaatggagagggcaagtggatggttgccgtgggcgggtgccgatgccagcccggatatcagccggcacggggcgacaaggcttgccaggcttgtccacgtggcctgtacaaaagcagcgcaggcaacgccccgtgctcgccatgtcccgcacggtcccacgccccaaaccccgccgcaccagtgtgtccctgcctcgagggtttttaccgcgcctcctcggaccctcctgaggcaccctgtactggacctccctcagccccgcaagaactatggtttgaggtccagggttctgcattgatgctgcactggagacttccccgagagcttggcgggcgaggagatctcctgtttaatgttgtttgtaaggaatgcgagggaagacaagagcccgcatcaggcggaggcggtacttgccacaggtgccgcgacgaggtccattttgaccctagacaacgtggcctgactgagtcgcgagtgctcgtgggcggcctcagagcgcatgtgccatacattctggaggtgcaggccgtgaatggagtctccgaactctcccctgacccgccacaggctgccgcgatcaacgtctcaaccagtcacgaggtgccttctgcggttccggttgtccaccaggtgtcacgggcatctaacagcatcaccgttagctggccgcagcccgaccagaccaatgggaatattctggattatcagcttcgctactacgaccaggctgaagacgagtcccattcattcacgctcacctccgagaccaacaccgccaccgtgactcagctctcacctgggcatatctacggatttcaggtgagggctcgaaccgctgcggggcacggcccctatggaggtaaggtgtactttcagaccctccctcagggcgagctgtccagccaactgcctgagaggctgagtctcgtgattggctccatcctcggagcccttgctttccttcttttggcagcgatcactgtcttggccgtcgtgttccagagaaaaaggagggggacggggtacacagaacagctccagcagtactcttctccagggctcggcgtaaagtactacatcgacccctccacttacgaagatccatgccaggcaatccgagagctcgctagagaggttgaccccgcctatatcaagatcgaggaagtgattgggaccgggagctttggcgaggtaaggcagggaaggctacaacccagaggacggagagaacagacggtggctatacaggccctgtgggctggaggcgccgaatcactccagatgacctttttaggtcgtgccgcggtcctcggtcagttccaacaccccaatatattgaggttggagggggtggtgaccaaatcacggccgttgatggtactgactgaattcatggagctgggtccacttgacagctttttgcggcaacgcgagggtcagttcagcagtctgcagctcgtggcaatgcagcgcggcgtcgccgccgctatgcagtatctgagctctttcgcatttgttcatcgatcgctgtcggcccactccgttcttgtgaactcccacctcgtctgcaaggtagcgcgcttaggtcattccccacagggaccgtcttgcttgctcaggtgggctgcacctgaggtcatcgcacatggcaagcataccacctcctctgatgtctggtccttcggcatcctgatgtgggaggtaatgagctatggggagaggccgtactgggatatgtccgaacaggaagttttaaatgctattgagcaagaatttcgactcccacccccaccagggtgtcctccaggcctgcatctcctcatgctggacacatggcaaaaggatcgcgcccggagaccgcactttgatcaactggtcgccgcttttgataaaatgatcagaaagcccgatacactgcaggcggggggagaccctggagagaggccatcacaggccttgttgacccccgtagccctcgactttccatgtctcgactctccccaggcctggctctctgcgatcggcctggagtgctaccaggacaacttcagcaaatttgggctgtgcacattcagcgatgtggctcagctgtctcttgaggacctgccagctctgggcataaccctggctggtcatcagaagaagttattgcaccacatccagctcctgcaacagcatcttagacagcagggatcggtggaggtttag

SEQ ID NO: 343841 - DNA, 3066 bp, Artificial Sequence
  derived and/or modified sequence
atggccacagaaggagctgcccagctgggcaacagagtggccggcatggtgtgcagcctgtgggtgctgctgctggtgtcctctgtgctggccctggaggaggtgctgctggacaccaccggggagaccagcgagatcggctggctgacctacccacctgggggctgggatgaggtgtctgtgctggatgaccagaggcggctgaccaggacctttgaggcctgccacgtggccggggcccctcctggcaccggccaggacaactggctgcagacccactttgtggagaggagaggagcccagagggcccacatccggctgcacttctctgtgcgggcctgcagcagcctgggcgtgtctgggggcacctgccgggagaccttcaccctgtactaccggcaggccgaggagccagacagcccagattctgtgtcctcctggcacctgaagcgctggaccaaggtggacaccatcgccgcagatgagagcttccccagcagcagcagcagcagcagcagcagcagcagcgctgcctgggccgtgggcccccacggggccggccagagagctggcctgcagctgaatgtgaaggagaggagctttggccccctgacccagaggggcttctacgtggccttccaggacaccggggcctgcctggccctggtggccgtgcggctcttctcctacacctgcccagctgtgctgcggagctttgccagcttccctgagacccaggccagcggggccggcggggccagcctggtggccgctgtgggcacctgtgtggcccacgccgagcctgaggaggatggagtgggcggccaggccggcggcagccccccccggctgcactgcaatggagagggcaagtggatggtggccgtgggcggctgccgctgccagcccggctaccagcctgcccggggggacaaggcctgccaggcctgcccccggggcctgtacaagagcagcgctggaaatgccccctgcagcccctgcccagcccggagccacgcccccaacccagctgcccctgtgtgcccctgcctggagggcttctaccgggccagcagtgaccccccagaggccccctgcaccggccccccatctgccccccaggagctgtggtttgaggtgcagggcagcgccctgatgctgcactggaggctgccccgggagctgggcggccgcggggacctgctcttcaacgtggtgtgcaaggaatgtgagggccggcaggagcccgccagcggcggcggcggcacctgccaccgctgcagagatgaggtgcactttgacccccggcagaggggcctgacagagagccgggtgctggtgggcggcctgcgggcccacgtgccctacatcctggaggtgcaggccgtgaatggagtgtctgagctgagcccagaccccccccaggccgccgccatcaacgtgtccaccagccatgaggtgcccagcgctgtgcctgtggtgcaccaggtgtcccgggccagcaacagcatcaccgtgtcctggccccagcctgaccagaccaatggaaacatcctggactaccagctgcgctactatgaccaggccgaggatgagagccacagcttcaccctgaccagcgagaccaacacagccaccgtgacccagctgagccctggccacatctacggcttccaggtgcgggccaggacagctgctggccacggcccctatggaggcaaggtgtacttccagaccctgccccagggcgagctgagcagccagctgcctgagcggctgagcctggtgattggcagcatcctgggcgccctggccttcctgctgctggccgccatcaccgtgctggccgtggtgttccagaggaagagaagaggcaccggctacacagagcagctgcagcagtacagcagccctggcctgggcgtgaagtactacatcgaccccagcacctatgaggacccctgccaggccatccgggagctggcccgggaggtggaccctgcctacatcaagattgaggaggtgattggcaccggcagctttggagaggtgcggcagggccgcctgcagccccggggccggcgggagcagacagtggccatccaggccctgtgggccggcggcgctgagagcctgcagatgaccttcctgggccgggctgctgtgctgggccagttccagcaccccaacatcctgcggctggagggcgtggtgaccaagagccggcccctgatggtgctgacagagttcatggagctgggccccctggacagcttcctgcggcagcgggagggccagttcagcagcctgcagctggtggccatgcagaggggcgtggccgccgccatgcagtacctgagcagctttgcctttgtgcacaggagcctgagcgcccacagcgtgctggtgaacagccacctggtgtgcaaggtggcccggctgggccacagcccccagggccccagctgcctgctgcgctgggccgcccctgaggtgattgcccacggcaagcacaccaccagcagtgatgtgtggagctttggcatcctgatgtgggaggtgatgtcctatggagagcggccctactgggacatgtctgagcaggaggtgctgaatgccatcgagcaggagttccggctgcccccacctcctggctgccccccaggcctgcacctgctgatgctggacacctggcagaaggaccgggcccggcggccccactttgaccagctggtggccgcctttgacaagatgatcaggaagccagacaccctgcaggccggcggggaccctggagagcggcccagccaggccctgctgacccctgtggccctggacttcccctgcctggacagcccccaggcctggctgagcgccatcggcctggagtgctaccaggacaacttcagcaagtttggcctgtgcaccttcagtgatgtggcccagctgagcctggaggacctgcctgccctgggcatcaccctggccggccaccagaagaagctgctgcaccacatccagctgctgcagcagcacctgcggcagcagggctctgtggaggtgtag

SEQ ID NO: 343842 - DNA, 2235 bp, Artificial Sequence
  derived and/or modified sequence
atggccacagaaggagctgcccagctgggcaacagagtggccggcatggtgtctgtgggcggctgccgctgccagcccggctaccagcctgcccggggggacaaggcctgccaggcctgcccccggggcctgtacaagagcagcgctggaaatgccccctgcagcccctgcccagcccggagccacgcccccaacccagctgcccctgtgtgcccctgcctggagggcttctaccgggccagcagtgaccccccagaggccccctgcaccggcccccccagcgccccccaggagctgtggtttgaggtgcagggcagcgccctgatgctgcactggaggctgccccgggagctgggcggccgcggggacctgctcttcaacgtggtgtgcaaggaatgtgagggccggcaggagcccgccagcggcggcggcggcacctgccaccgctgcagagatgaggtgcactttgacccccggcagaggggcctgacagagagccgggtgctggtgggcggcctgcgggcccacgtgccctacatcctggaggtgcaggccgtgaatggagtgtctgagctgagcccagaccccccccaggccgccgccatcaacgtgtccaccagccatgaggtgcccagcgctgtgcctgtggtgcaccaggtgtcccgggccagcaacagcatcaccgtgtcctggccccagcctgaccagaccaacggcaacatcctggactaccagctgcgctactatgaccaggctgaagatgagagccacagcttcaccctgaccagcgagaccaacacagccaccgtgacccagctgagccctggccacatctacggcttccaggtgcgggccaggacagctgctggccacggcccctacggcggcaaggtgtacttccagaccctgccccagggcgagctgagcagccagctgcctgagcggctgagcctggtgattggcagcatcctgggcgccctggccttcctgctgctggccgccatcaccgtgctggccgtggtgttccagaggaagaggcggggcaccggctacacagagcagctgcagcagtacagcagccctggcctgggcgtgaagtactacatcgaccccagcacctatgaggacccctgccaggccatccgggagctggcccgggaggtggaccctgcctacatcaagattgaggaggtgattggaacaggcagctttggagaggtgcggcagggccgcctgcagccccggggcagaagagagcagacagtggccatccaggccctgtgggccggcggcgctgagagcctgcagatgaccttcctgggccgggctgctgtgctgggccagttccagcaccccaacatcctgcggctggagggcgtggtgaccaagagccggcccctgatggtgctgacagagttcatggagctgggccccctggacagcttcctgcggcagcgggagggccagttcagcagcctgcagctggtggccatgcagaggggcgtggccgccgccatgcagtacctgagcagctttgcctttgtgcacaggagcctgagcgcccacagcgtgctggtgaacagccacctggtgtgcaaggtggcccggctgggccacagcccccagggccccagctgcctgctgcgctgggccgcccctgaggtgattgcccacggcaagcacaccaccagcagtgatgtgtggagctttggcatcctgatgtgggaggtgatgtcctatggagagcggccctactgggacatgtctgagcaggaggtgctgaatgccatcgagcaggagttccggctgcccccacctcctggctgccccccaggcctgcacctgctgatgctggacacctggcagaaggaccgggcccggcggccccactttgaccagctggtggccgcctttgacaagatgatcaggaagccagacaccctgcaggccggcggggaccccggggagcggcccagccaggccctgctgacccctgtggccctggacttcccctgcctggacagcccccaggcctggctgagcgccatcggcctggagtgctaccaggacaacttcagcaagtttggcctgtgcaccttcagtgatgtggcccagctgagcctggaggacctgcctgccctgggcatcaccctggccggccaccagaagaagctgctgcaccacatccagctgctgcagcagcacctgcggcagcagggctctgtggaggtgtag

SEQ ID NO: 343843 - DNA, 3066 bp, Artificial Sequence
  derived and/or modified sequence
atggccaccgagggcgccgcccagctgggcaaccgggtggccggcatggtctgtagtctgtgggtacttttacttgtgagtagcgtcctggccttggaagaagtcctgcttgatactaccggggaaacaagcgagattgggtggctcacctacccacctgggggatgggatgaagtgtctgttctcgacgaccaacgccggttgactcgcacttttgaagcttgccacgtggcgggtgctcctcctggcactggacaggacaactggctgcagactcacttcgtggagagaaggggggcacagagggcgcacatacggctgcacttcagtgttcgggcttgcagctctctcggagtatcaggcggcacatgcagagaaaccttcacgctgtactacagacaagccgaggaacccgacagcccagacagcgtcagctcttggcacctgaagagatggactaaggtagataccatcgcagctgatgagtcattcccatcatcttcatcatcatctagctctagtagcagcgctgcgtgggccgtcgggcctcatggtgccgggcagagggctggccttcaactgaacgtaaaggagcggtccttcggacctctgacgcagcgtggcttctatgtggcttttcaggacacaggagcatgtctcgccctcgttgctgtgcgcctcttttcctacacttgtcctgcggtacttcgcagcttcgcatcattccccgagacacaagccagtggcgcaggcggcgcctcgctggtagccgcagtgggcacatgcgtggctcatgccgaacccgaggaggatggtgtgggaggccaagcagggggttctccgccaaggctgcactgcaacggtgagggaaaatggatggtggccgttggcgggtgtcgttgccagccgggatatcaaccggccagaggcgacaaggcatgtcaggcctgccccagaggactgtacaaatctagcgctggcaatgctccctgcagcccatgcccggcaagatctcacgcacctaacccagctgcacctgtatgcccctgcctggagggattctaccgcgccagcagcgacccccccgaagccccatgtacagggccaccctcagctccccaagaactctggttcgaggtacagggaagtgcgctcatgctgcactggagactcccgagagaattaggcggaaggggggacctcctattcaatgttgtttgtaaggagtgtgaaggtcgccaggagccagcctctggtgggggcggaacatgccacaggtgcagagatgaggtgcacttcgaccctcgccagcgaggactgacagagagtagggttttggtgggcggactgagagctcacgtcccttatatcctcgaggtgcaagcagtcaacggcgtcagcgagctgtcacctgacccccctcaggccgccgctataaacgtctcgacctcccatgaggtgccaagtgcagtgccggttgtacatcaagtcagccgcgcttctaattcaatcacagtgagctggcctcagcctgatcagacaaatggcaacatcctcgattatcagctccgctactacgaccaggctgaagacgaatctcacagcttcaccctgacaagcgagactaatacagccaccgtaacccaactgtcccccggccacatttacggttttcaggttcgagctcggaccgcggccggccacggtccctatggggggaaggtgtacttccaaacgctgccgcagggcgagctgagctcacagctccccgagagactgtccttggtgatcggcagtatactgggcgctctggcattcctgctgctcgcagcaattaccgtgctggccgtggtgttccagaggaaacggagagggaccgggtatactgaacagctccagcagtattccagcccaggactgggtgtgaagtactacattgacccaagcacctacgaggatccgtgccaggctatacgggagttggcgagggaggttgatccggcatatataaaaatagaggaagtgatcggcacaggctcattcggcgaggttcgccaaggaaggctgcagcctaggggccggcgggaacaaacagtggcaatacaagctctgtgggccggaggcgccgagtctctgcagatgacttttcttggtcgggcggccgtcctgggccagttccagcatcctaacattttgcggctggagggggttgttactaaaagtagacctctaatggtgctgactgagttcatggaactggggccccttgatagtttcctgcggcagcgcgaaggccaattcagctccctgcagctagttgctatgcagcgcggtgttgcagccgccatgcaatacctcagtagtttcgctttcgtacaccggagcctttccgcacactcggtgttggtcaactcgcatctggtttgtaaagtcgcccggttaggacattctcctcaggggcctagctgtctgcttcgatgggccgctcccgaggtgattgcacatggtaagcacacaaccagttccgacgtttggtcctttggcattttaatgtgggaggtcatgtcttacggggagagaccatattgggatatgtctgagcaggaggtgctgaatgccattgaacaggagtttcggcttccgccacctcctggatgccctcctgggcttcacctgttgatgctcgacacctggcaaaaggaccgcgcccggagacctcattttgaccagctggtcgctgcctttgacaaaatgatcaggaagcccgatacactgcaggccgggggtgacccgggagagagaccttctcaggctctgctgacccccgtagccctggatttcccatgcctggactccccccaggcatggttaagcgccatagggttggagtgttaccaagacaacttctctaagtttgggttgtgtacattctctgacgtcgcccagctgtccctggaagatctgcctgctctgggcataaccctagctggccaccagaagaagctgcttcaccatattcagctcctgcaacaacacctccggcaacagggctccgtggaggtctag

SEQ ID NO: 343844 - DNA, 2235 bp, Artificial Sequence
  derived and/or modified sequence
atggccaccgagggcgccgcccagctgggcaaccgggtggccggcatggtatcagtcgggggctgcagatgccagcccggttatcagcccgcaagaggcgataaggcatgtcaggcatgcccccgcggactttataagagttccgctggcaatgctccgtgttccccatgtcctgctagatcccacgctccaaatcccgccgcgcctgtgtgcccctgtctcgaagggttctatagagcttcaagtgatccacccgaggctccatgcacaggccccccttctgcgcctcaagagctatggtttgaggttcagggcagcgctttaatgctccattggagactgccacgggagctcggtggtcgcggtgacttacttttcaacgttgtgtgcaaggagtgcgagggccgtcaggaacccgctagcggaggggggggcacttgtcacagatgtagggacgaagtgcacttcgacccccgccaacgcggcttgaccgagtcccgggttctagtcgggggcctgcgagcccacgtgccttacattcttgaagtccaggccgtcaacggagtctctgaattgtcccccgaccccccacaggccgctgccattaacgtgtcaacatctcacgaggttcccagcgctgtgccagtggtgcatcaggtgtccagggcatccaactccatcactgtcagctggccgcagccagatcagactaacggaaatattttggactaccagctacgatactatgatcaagccgaagacgaatcgcactcttttaccctgacttctgagaccaataccgcgaccgtgacccaattgtctcccgggcatatctacggttttcaggtccgggccaggaccgccgccggccacgggccatatgggggcaaggtctactttcagacattaccgcaaggagaattgagctctcaattgcctgaacgactgtcattagtaatcggatctatcctgggggccctggcattcttgctcttggctgccattacggtcctggccgttgtttttcaacgcaagcgccgaggtactgggtacacagagcagctgcagcagtacagttcccccgggctcggagttaagtactatatcgatccttccacgtatgaagatccttgtcaagccattagagagctcgctagagaggttgatcctgcctatattaaaatagaggaggtgattggcacaggctcgtttggcgaggttagacagggacgcctccagccacgcggaaggagggagcagaccgtagctatccaggctttgtgggccggcggagccgagagcctccagatgaccttccttggccgggctgccgttctggggcagtttcagcaccccaacattctccggctcgaaggagtggtgacaaaaagcagacctctgatggtgttaacagagttcatggaactcgggccgctggactcttttttgagacagcgggaggggcagtttagcagcctacaactcgtggccatgcagcgcggggtggccgcggctatgcagtatctttcaagcttcgctttcgtccaccgctctcttagcgcccactctgtattagtgaacagccatctcgtctgcaaggtcgcccgtctgggccattcgccacagggtccctcttgtttgctgagatgggcagcaccggaggttatagcgcatgggaagcacaccacatcttctgatgtgtggagcttcggcattttgatgtgggaggtcatgagttatggggagcggccatactgggatatgagcgaacaggaggtcttaaacgcaatcgagcaggagtttagactcccgccgccgccagggtgtcccccagggcttcaccttttaatgctagatacttggcagaaggaccgggcccgccgtcctcacttcgaccagctcgtggctgcattcgacaagatgatcaggaaacccgataccctccaggccggcggggatcccggggaaagaccgtcacaagcgctcctgactccagtggctcttgacttcccctgtcttgacagcccccaagcttggctgtccgctattggtctcgagtgttaccaagataatttttccaagtttgggctctgcaccttcagcgatgtcgctcagttgtcattggaggatttaccagctcttggaataactctggccgggcatcagaagaagctgctccatcacatccagctgctccagcagcatttaaggcaacagggctcagttgaagtgtag

SEQ ID NO: 343845 - DNA, 3066 bp, Artificial Sequence
  derived and/or modified sequence
atggccaccgagggcgccgcccagctgggcaaccgggtggccggcatggtgtgtagcctctgggttctcctgctcgtctcatccgtactggcacttgaggaagtgctcctggacacaacaggtgagacctctgagattgggtggctgacctatccgcctgggggttgggatgaagtcagtgtgctagatgatcaacggcgattgactagaacttttgaggcctgtcacgtagcgggagcacctcccggcactgggcaggataactggctgcagacgcactttgttgagcgcagaggggcccagagagctcatattcgcctccacttctcagtacgggcttgcagcagtctgggcgtttctggcggcacctgtcgggagactttcacactatattacagacaagcggaggagcccgactctccggacagtgtttcatcatggcacctaaagagatggactaaggttgacactatcgccgccgatgagtcgttcccctccagcagttctagcagcagttcatcttcatcggccgcctgggccgtggggccgcacggggccggccaaagagcaggtctccaacttaacgtgaaggagcggagcttcggccctctgactcaacggggcttttatgttgcttttcaagatactggggcctgccttgccctcgtagccgttcggttgttctcctatacttgtccagccgtgctgagaagcttcgctagctttcctgagacacaagccagcggtgctggtggggcctcacttgttgccgccgtggggacatgtgtggcgcatgccgagcctgaggaagatggagtcggtggtcaggctggtggatctcccccgcgactgcactgtaacggcgagggcaagtggatggttgcagttggggggtgccggtgtcaacccggataccagccagcccgcggcgataaagcatgtcaggcgtgtccccggggactgtacaagagctccgccggcaatgcaccatgctctccctgccctgcccgcagccacgcccccaatcctgccgccccggtgtgtccttgtctggaagggttttacagagcctcctccgacccgcctgaggcgccatgcaccggtcctccctccgctccccaggagctgtggtttgaggtgcagggatcagctctcatgctgcattggagattgccccgggagctgggtggcagaggtgacctgcttttcaatgtcgtgtgcaaggagtgcgagggacgccaggagccagcctccggcggaggaggaacatgtcatagatgccgggacgaagtgcatttcgatccacggcagagaggattaactgagtctagagttctggtcggcgggctgcgggcacacgtaccctatatcttggaggttcaggcagtgaatggagtcagcgagttgagtccggatccaccccaggccgccgccatcaatgtctccacttcccacgaagtaccgagtgccgtaccagtggtgcaccaggtgagcagggcaagcaacagcatcactgtgagctggccacagccagaccagactaacggaaacatactcgactaccagttgaggtactacgatcaggcagaggacgagagtcacagttttactcttaccagcgaaaccaacacggccacagtgacacagctgtcccccggacacatatacggcttccaggtgcgggctagaaccgccgcaggacatggcccctatggaggcaaggtgtactttcaaacactgcctcagggcgagttgtcttctcaactacctgaaagactgagtcttgtgatcggctctattctgggagctctagccttcctgctgttagcagcgatcacagtgcttgccgtcgtattccaaagaaagcgaaggggaacaggatatacagagcagcttcagcagtactcctcacccgggcttggcgtgaagtactacatagacccatctacctacgaagatccctgtcaggccatccgcgagcttgccagggaagtggacccggcctacattaagatcgaagaagtcattggaaccggctcattcggagaagtcagacaaggtaggctgcagccacgcggacgaagagagcaaactgtggcgattcaggcgctgtgggccggcggggccgagtctctgcagatgacttttctggggcgggctgcagtattagggcagtttcagcatcccaatattcttagacttgagggagtggtcaccaaatcacgccctctcatggtattaacagagttcatggaactgggtcctttagacagctttctgcgacagagagagggccagttcagttcacttcagctggttgctatgcagcggggagtagccgcagccatgcagtatttaagttccttcgcatttgtgcataggtctctgagcgcccactctgttctcgtgaactcccatctggtgtgcaaagtggccaggctcggccactctcctcagggcccttcctgccttctaaggtgggccgccccagaggtcatcgcccacggtaaacataccacctcaagtgatgtctggtcttttgggattctgatgtgggaggtaatgagttacggggaacgcccatactgggatatgagcgaacaggaggtgctcaatgccatcgaacaggagttccgattacctccaccccccgggtgtcccccaggactgcatctgttgatgctcgacacttggcagaaggacagagcaaggaggccccattttgaccagctggtagcagctttcgacaagatgattcgtaaacctgatactcttcaagcggggggcgatcccggcgaaagaccctcccaggccctgctgacacctgtggccctggatttcccgtgtctggacagtcctcaggcatggctgtcagccattgggctggagtgctaccaagataacttctccaaatttggtctgtgcacattcagtgacgtggcccagttgtctctagaggatctgccagcgctcggcatcactctcgctggccaccaaaagaaactgcttcatcatatacagctactgcagcagcatttaaggcagcaggggagcgtggaggtgtag

SEQ ID NO: 343846 - DNA, 3066 bp, Artificial Sequence
  derived and/or modified sequence
atggctaccgagggcgctgcacagctggggaatcgcgtggctgggatggtttgtagtctatgggtacttcttctcgtgtcatccgtcctcgccctggaagaggtcctgctcgacacaacgggggagacatccgagataggatggctgacttaccccccaggcggttgggacgaagtaagcgtgttagatgaccagcggagactaacccggactttcgaagcgtgccacgttgctggcgcacccccaggaacaggacaggacaattggctgcagactcacttcgtcgagcgacgcggagcccaacgcgctcacattcgactccatttctccgtaagagcctgtagctctttaggtgtttctggagggacatgtcgagagacttttaccctgtattacaggcaagctgaagagcctgactcgcccgacagcgtgagctcctggcatttaaagcggtggactaaggtggacactatagcagctgacgagtcattcccgtcatcatcttcaagctcatcttcctcttccagcgccgcttgggctgtgggcccacacggagccggtcaacgcgctggtctgcaactgaacgtgaaagagcgcagctttggtccgctcacccaacgaggattttatgtagcattccaggataccggcgcttgtctggccttggtggcggtcaggttgtttagctatacatgtcccgcagtcttgaggtctttcgcttcattccctgaaacccaggctagcggtgctggtggagccagtctcgtggctgccgtgggcacatgtgtcgcacacgctgagcccgaggaagacggggtgggaggacaggcaggcggtagccccccacggctgcactgtaatggggagggcaagtggatggtcgccgtgggtggctgtcgctgccagccaggctaccagccagcacgaggcgacaaggcttgtcaagcatgtccaagagggctctataaaagcagtgccggaaatgccccttgctccccctgccctgcacgaagccatgctccaaatccagccgctccagtctgtccatgtctggaggggttctaccgagccagcagtgacccccctgaagccccttgcaccggacccccttccgcacctcaggaactgtggtttgaagttcagggaagcgccctcatgcttcactggaggcttccgagagaactgggtggacgaggagatcttctgttcaatgtggtctgtaaggagtgcgagggcagacaggaaccggcttcaggagggggaggaacatgccacagatgccgagatgaagtccactttgaccccagacaacgcggactgacagagtctcgggtcttagtgggaggcctgagagcacatgtcccttacatcttggaagtacaagcggtgaacggcgtcagtgaacttagtcccgatccaccccaggccgctgcaatcaatgtgagcacttcccacgaagtgccttctgcggtgccagtggttcatcaagtcagtagagcctctaacagcattaccgtcagttggccacagccagatcagactaacggcaatattctggactaccagcttagatactacgatcaggcagaagacgaatcccattcattcacacttaccagcgagaccaacacagcgacagttacacaactcagcccaggtcatatctacggtttccaggtgcgggctagaacagctgctgggcatggcccatatggcggaaaagtgtattttcagactctgccacagggggagctgagctctcagctgcccgaaagactttctctggtgatcgggtcaattttaggcgctcttgcctttctcctcctagcggctataactgtcctggcagtcgtgttccagcggaaacgtcgagggactggttacaccgaacaactgcagcagtatagctctcctggtctgggcgtgaaatactatattgacccttccacctacgaggacccatgccaggccataagagagctcgcacgggaagtagaccccgcatatatcaagattgaggaggtgatcggtaccggatccttcggtgaggtcagacaggggagactgcagccccgagggcgacgagagcagaccgtagccattcaggccctctgggcaggaggagccgagtccctgcaaatgacatttctgggcagagccgctgtgctgggccagtttcagcatcccaatattttaagactcgaaggggtggtgaccaaaagtagacctctgatggtcctcactgagttcatggagttaggacctctggattcctttcttcgacagcgcgaaggtcagttcagcagcttgcagctggttgccatgcagaggggggtggcagctgccatgcagtacctgagttccttcgctttcgttcaccgaagcttatcagctcactccgtgctggtgaacagccacctggtgtgcaaagtggctcggctggggcatagtccacaagggccatcttgcctgctcagatgggcggcacctgaagtaatcgctcacggaaagcatacaacttcctctgacgtatggtcctttggcatactgatgtgggaggtcatgagttacggagagcgcccttattgggacatgagcgaacaagaagtgctcaacgctattgagcaggaattcagattaccccctcctcccggttgtcccccaggcctacacctgcttatgttggacacctggcagaaggacagagctaggcggcctcatttcgaccaattggtcgctgcattcgacaaaatgatccggaaacccgacacccttcaggccggaggcgatccaggggaacgacccagccaagctttactgacacctgtggccctggacttcccctgcctcgacagcccccaggcctggttatcagctattgggcttgaatgttaccaagacaattttagtaaatttgggctctgcactttcagtgatgtggcccagctaagcctcgaagatctgccagcactgggaattaccctcgccggacatcagaaaaaattattacaccacattcaactgttgcagcagcacctgcgtcagcagggatcagtcgaagtatag

SEQ ID NO: 343847 - DNA, 2235 bp, Artificial Sequence
  derived and/or modified sequence
atggccacagagggggctgcccagctgggaaacagggtggctggcatggtgtccgtcggcggttgtagatgccagccgggataccaacctgccaggggcgacaaagcttgtcaggcatgccccagaggcctttacaagagcagcgcaggtaacgccccatgttctccttgccccgcacgaagccacgctcctaacccagccgcacctgtttgcccgtgtctcgagggattttacagagcaagcagtgatcctcccgaggcaccatgcaccgggcctccatccgctccacaagaattgtggttcgaagtgcaagggtccgccctcatgcttcactggagattgcctagggagctggggggtcgtggcgacctgctgtttaatgttgtatgtaaggaatgtgaagggaggcaggaacccgctagtggcggaggcggtacttgtcaccggtgtagggatgaggtccacttcgatcctaggcagcgcggactgacagaatctagagttctagtagggggtctgagggcccatgtgccatatatccttgaagtgcaagcggtgaatggcgtctccgaattgtcgcctgaccctccgcaggccgctgctattaacgtgtccacaagccatgaagtgcctagcgcagtgcccgttgtccaccaggttagccgtgcttccaactccataaccgtgtcttggccgcaaccagaccagacaaatggtaatattttggactatcagctgagatactatgaccaggccgaggatgaatcccattcattcacccttacttcagaaactaacaccgcgaccgtaacccagttaagtcccggacacatctatggctttcaagtaagagccagaactgctgccggtcatggcccatacgggggtaaggtatacttccagactcttccccagggcgagctgagctcacagctgcctgaacggctgagtctggtgatcggctccatcctgggcgctttagcatttcttctgctggcagccatcacagtattagccgtcgtgtttcagcgtaagagaagaggaacagggtatactgaacagctgcagcaatattctagcccgggtctgggcgtgaaatactatattgatccgtccacatatgaggatccctgtcaggcgatcagagagctggccagagaggtagaccccgcttatatcaagatcgaggaggtcataggtaccggttcttttggagaggtcaggcagggcaggctacagccaaggggaaggcgggaacagaccgtggcgattcaggctctgtgggcgggtggtgctgagtccttgcaaatgacgttcttgggtagggcagccgtgttgggtcagtttcagcatcctaacattctgcgattagagggagtagtgaccaaatcacggccactgatggttctgaccgagttcatggagctgggccctttagattcctttctgcggcagcgggagggtcagttcagctcgctgcagctggtggctatgcagcgaggcgtggccgctgccatgcagtatctgtcttcttttgctttcgtgcataggtccctctctgctcactctgtgctcgtaaactctcatctcgtctgtaaggtcgcccgactcgggcacagcccccaagggccttcctgtctgctacggtgggcggctcctgaggtgatcgcgcatggtaagcacactacctcgtccgacgtatggtcattcggtatactcatgtgggaggtcatgtcttacggcgaaaggccatactgggacatgagcgagcaggaggtgttaaacgccattgagcaggaattcaggcttcctccacctcccggttgccctccagggttgcacctgttgatgctggatacgtggcagaaagacagagcgcgaagaccccactttgaccagctcgttgccgctttcgacaaaatgatccgaaaacctgacactttacaagccggaggtgaccccggagagagaccatcccaagccctcttgacccctgtggccctcgactttccttgtctggactccccccaggcctggctcagcgctattggcttagagtgttaccaagacaatttttcaaagtttggcctctgtacctttagtgatgttgcccaactgtcactggaggatctgcctgccctggggatcacactcgccggacaccagaagaagctccttcatcatattcagttgctgcaacaacacctaagacaacagggaagtgtagaggtgtag

SEQ ID NO: 343848 - DNA, 3066 bp, Artificial Sequence
  derived and/or modified sequence
atggcaaccgaaggggctgcacagctcggcaaccgcgtggcgggtatggtgtgttccctgtgggtgctgttgttggttagcagtgtcctggcgctcgaggaggtgttgcttgataccaccggcgaaacttcagaaattggatggctgacttatcctcccggaggctgggacgaagtaagcgtgcttgacgatcaacgtagattaacccgtactttcgaggcctgccacgtcgccggagccccacctggaactggacaggacaattggctgcaaacccactttgtggagcggagaggagctcagagggcacatataaggctacatttcagtgtcagggcatgttctagcttgggcgtaagtggcggaacctgtcgggagaccttcactttatactacaggcaagctgaggagcctgatagtcccgattctgtgtccagttggcacctgaaaaggtggacaaaggttgacaccatagccgctgatgagtcctttccatctagctcctcaagcagtagctcaagcagctccgcggcttgggcagtggggccacacggcgctggccaacgagcaggcctacaattgaatgttaaagagcgctcctttggtccactgactcagcgcggattctatgtcgcattccaggacactggtgcatgtctggccttggtggctgtcagactgttttcatacacatgcccagctgttctcaggtcctttgcctcttttcctgagacgcaagcctctggtgccggtggggcttccctggtcgcagctgtaggaacttgcgtcgcacacgcggagcccgaggaagatggggttggtgggcaggccggtggcagtcccccacgtctgcactgcaacggcgaagggaagtggatggtggctgtcggcggatgtcgttgccagccagggtaccagccggcacgaggggataaggcttgccaggcctgccctcgcggtctttataaatcatcggcaggaaatgccccttgttctccatgccccgcaaggagtcacgcacctaacccagccgctccggtctgcccttgcctagaaggattctaccgcgcatcttccgaccccccagaggcaccttgcacgggccctccttcagctcctcaggagctatggtttgaagtacagggtagtgcattgatgctgcactggcgactgcctcgcgagctgggtggcaggggggacctgctgttcaacgtcgtgtgcaaagaatgtgaaggtcgccaagagccggctagcggtgggggaggaacatgccacaggtgcagggacgaagtgcactttgaccctagacagagaggactcactgagtcacgggtgctagtggggggacttcgtgcccatgtgccatacatcttagaggtacaggctgtgaacggggtgtcagagttaagccccgatcccccacaggcggctgcaatcaatgtgagtacgtcccatgaggtgccaagcgccgttcctgtggtgcatcaggtgagtcgcgcttctaacagtatcactgtctcatggccccagccagatcagacgaacggaaacattctcgactatcagctacgttactacgatcaggctgaggatgaatctcatagttttacattgaccagcgagaccaacaccgctacagttacccagcttagccctggccacatttatggcttccaggttcgagccagaacagctgctggtcatgggccatacggcggaaaggtctacttccaaaccctcccacagggtgagctgagttctcagctcccagagcggctctcactggtcatcggcagcattctgggggcacttgctttccttctgctcgccgctattactgttctcgccgtggtctttcagcgaaaaaggcggggaaccgggtataccgagcaactgcagcagtactcctcccctggcctgggagtgaagtattacattgaccccagcacgtatgaagatccttgtcaggctatcagggagctggcccgtgaggtggatccagcctacatcaaaatcgaagaagtgatcggcaccggatcattcggcgaggtgcgacagggcagactgcaacccaggggccgacgtgaacaaacagtcgcaatccaggcactttgggcaggcggagccgaaagcctgcagatgacctttctcggtagggctgctgtcctgggccagttccagcatccgaatatcctccgccttgagggtgtggtgacaaaaagtcggcctctgatggtgcttaccgaattcatggagttgggcccactggattctttcctacgccagagggaaggacagttttccagcctccaactggttgcaatgcagcgaggggtggcagcagcgatgcagtatttgagtagttttgcctttgtgcacaggagtctgtcggcacattccgtgctggtgaattcccacctggtctgtaaggtggcacgtctcgggcatagcccccagggcccttcttgcctgttacgatgggctgcgccagaggtaattgcccacggtaagcatacaactagttctgacgtctggagctttggcattctcatgtgggaggtgatgagctatggcgagaggccctattgggatatgtctgagcaggaggttctgaacgccatcgaacaggagtttcgcctgccacccccacctggatgccctcctggactccatctgctgatgctcgacacctggcagaaagaccgcgcacgcaggccacatttcgaccagttggtggccgctttcgacaagatgattcgcaaacccgacacactgcaggccggtggcgacccgggtgaaagacctagccaggccctcttgacccccgttgccctggatttcccctgccttgacagcccccaggcctggctatctgctatcggattggagtgctaccaggacaattttagcaagttcggcctgtgcacattttctgacgtggcccagctgtccttggaggatctgccggctttaggaattaccttggccggtcatcagaagaagttgctgcatcatatccagctgctccagcagcatctccgccagcagggtagcgtggaggtgtag

SEQ ID NO: 343849 - DNA, 3066 bp, Artificial Sequence
  derived and/or modified sequence
atggccaccgagggcgccgcccagctgggcaacagagtggccggcatggtgtgcagcctgtgggtgctgctgctggtgagcagcgtgctggccctggaggaggtgctgctggacaccaccggcgagaccagcgagatcggctggctgacctacccccccggcggctgggacgaggtgagcgtgctggacgaccagagaagactgaccagaaccttcgaggcctgccacgtggccggcgccccccccggcaccggccaggacaactggctgcagacccacttcgtggagagaagaggcgcccagagagcccacatcagactgcacttcagcgtgagagcctgcagcagcctgggcgtgagcggcggcacctgcagagagaccttcaccctgtactacagacaggccgaggagcccgacagccccgacagcgtgagcagctggcacctgaagagatggaccaaggtggacaccatcgccgccgacgagagcttccccagcagcagcagcagcagcagcagcagcagcagcgccgcctgggccgtgggcccccacggcgccggccagagagccggcctgcagctgaacgtgaaggagagaagcttcggccccctgacccagagaggcttctacgtggccttccaggacaccggcgcctgcctggccctggtggccgtgagactgttcagctacacctgccccgccgtgctgagaagcttcgccagcttccccgagacccaggccagcggcgccggcggcgccagcctggtggccgccgtgggcacctgcgtggcccacgccgagcccgaggaggacggcgtgggcggccaggccggcggcagcccccccagactgcactgcaacggcgagggcaagtggatggtggccgtgggcggctgcagatgccagcccggctaccagcccgccagaggcgacaaggcctgccaggcctgccccagaggcctgtacaagagcagcgccggcaacgccccctgcagcccctgccccgccagaagccacgcccccaaccccgccgcccccgtgtgcccctgcctggagggcttctacagagccagcagcgacccccccgaggccccctgcaccggcccccccagcgccccccaggagctgtggttcgaggtgcagggcagcgccctgatgctgcactggagactgcccagagagctgggcggcagaggcgacctgctgttcaacgtggtgtgcaaggagtgcgagggcagacaggagcccgccagcggcggcggcggcacctgccacagatgcagagacgaggtgcacttcgaccccagacagagaggcctgaccgagagcagagtgctggtgggcggcctgagagcccacgtgccctacatcctggaggtgcaggccgtgaacggcgtgagcgagctgagccccgaccccccccaggccgccgccatcaacgtgagcaccagccacgaggtgcccagcgccgtgcccgtggtgcaccaggtgagcagagccagcaacagcatcaccgtgagctggccccagcccgaccagaccaacggcaacatcctggactaccagctgagatactacgaccaggccgaggacgagagccacagcttcaccctgaccagcgagaccaacaccgccaccgtgacccagctgagccccggccacatctacggcttccaggtgagagccagaaccgccgccggccacggcccctacggcggcaaggtgtacttccagaccctgccccagggcgagctgagcagccagctgcccgagagactgagcctggtgatcggcagcatcctgggcgccctggccttcctgctgctggccgccatcaccgtgctggccgtggtgttccagagaaagagaagaggcaccggctacaccgagcagctgcagcagtacagcagccccggcctgggcgtgaagtactacatcgaccccagcacctacgaggacccctgccaggccatcagagagctggccagagaggtggaccccgcctacatcaagatcgaggaggtgatcggcaccggcagcttcggcgaggtgagacagggcagactgcagcccagaggcagaagagagcagaccgtggccatccaggccctgtgggccggcggcgccgagagcctgcagatgaccttcctgggcagagccgccgtgctgggccagttccagcaccccaacatcctgagactggagggcgtggtgaccaagagcagacccctgatggtgctgaccgagttcatggagctgggccccctggacagcttcctgagacagagagagggccagttcagcagcctgcagctggtggccatgcagagaggcgtggccgccgccatgcagtacctgagcagcttcgccttcgtgcacagaagcctgagcgcccacagcgtgctggtgaacagccacctggtgtgcaaggtggccagactgggccacagcccccagggccccagctgcctgctgagatgggccgcccccgaggtgatcgcccacggcaagcacaccaccagcagcgacgtgtggagcttcggcatcctgatgtgggaggtgatgagctacggcgagagaccctactgggacatgagcgagcaggaggtgctgaacgccatcgagcaggagttcagactgccccccccccccggctgcccccccggcctgcacctgctgatgctggacacctggcagaaggacagagccagaagaccccacttcgaccagctggtggccgccttcgacaagatgatcagaaagcccgacaccctgcaggccggcggcgaccccggcgagagacccagccaggccctgctgacccccgtggccctggacttcccctgcctggacagcccccaggcctggctgagcgccatcggcctggagtgctaccaggacaacttcagcaagttcggcctgtgcaccttcagcgacgtggcccagctgagcctggaggacctgcccgccctgggcatcaccctggccggccaccagaagaagctgctgcaccacatccagctgctgcagcagcacctgagacagcagggcagcgtggaggtgtag

SEQ ID NO: 343850 - DNA, 2235 bp, Artificial Sequence
  derived and/or modified sequence
atggccaccgagggcgccgcccagctgggcaacagagtggccggcatggtgagcgtgggcggctgcagatgccagcccggctaccagcccgccagaggcgacaaggcctgccaggcctgccccagaggcctgtacaagagcagcgccggcaacgccccctgcagcccctgccccgccagaagccacgcccccaaccccgccgcccccgtgtgcccctgcctggagggcttctacagagccagcagcgacccccccgaggccccctgcaccggcccccccagcgccccccaggagctgtggttcgaggtgcagggcagcgccctgatgctgcactggagactgcccagagagctgggcggcagaggcgacctgctgttcaacgtggtgtgcaaggagtgcgagggcagacaggagcccgccagcggcggcggcggcacctgccacagatgcagagacgaggtgcacttcgaccccagacagagaggcctgaccgagagcagagtgctggtgggcggcctgagagcccacgtgccctacatcctggaggtgcaggccgtgaacggcgtgagcgagctgagccccgaccccccccaggccgccgccatcaacgtgagcaccagccacgaggtgcccagcgccgtgcccgtggtgcaccaggtgagcagagccagcaacagcatcaccgtgagctggccccagcccgaccagaccaacggcaacatcctggactaccagctgagatactacgaccaggccgaggacgagagccacagcttcaccctgaccagcgagaccaacaccgccaccgtgacccagctgagccccggccacatctacggcttccaggtgagagccagaaccgccgccggccacggcccctacggcggcaaggtgtacttccagaccctgccccagggcgagctgagcagccagctgcccgagagactgagcctggtgatcggcagcatcctgggcgccctggccttcctgctgctggccgccatcaccgtgctggccgtggtgttccagagaaagagaagaggcaccggctacaccgagcagctgcagcagtacagcagccccggcctgggcgtgaagtactacatcgaccccagcacctacgaggacccctgccaggccatcagagagctggccagagaggtggaccccgcctacatcaagatcgaggaggtgatcggcaccggcagcttcggcgaggtgagacagggcagactgcagcccagaggcagaagagagcagaccgtggccatccaggccctgtgggccggcggcgccgagagcctgcagatgaccttcctgggcagagccgccgtgctgggccagttccagcaccccaacatcctgagactggagggcgtggtgaccaagagcagacccctgatggtgctgaccgagttcatggagctgggccccctggacagcttcctgagacagagagagggccagttcagcagcctgcagctggtggccatgcagagaggcgtggccgccgccatgcagtacctgagcagcttcgccttcgtgcacagaagcctgagcgcccacagcgtgctggtgaacagccacctggtgtgcaaggtggccagactgggccacagcccccagggccccagctgcctgctgagatgggccgcccccgaggtgatcgcccacggcaagcacaccaccagcagcgacgtgtggagcttcggcatcctgatgtgggaggtgatgagctacggcgagagaccctactgggacatgagcgagcaggaggtgctgaacgccatcgagcaggagttcagactgccccccccccccggctgcccccccggcctgcacctgctgatgctggacacctggcagaaggacagagccagaagaccccacttcgaccagctggtggccgccttcgacaagatgatcagaaagcccgacaccctgcaggccggcggcgaccccggcgagagacccagccaggccctgctgacccccgtggccctggacttcccctgcctggacagcccccaggcctggctgagcgccatcggcctggagtgctaccaggacaacttcagcaagttcggcctgtgcaccttcagcgacgtggcccagctgagcctggaggacctgcccgccctgggcatcaccctggccggccaccagaagaagctgctgcaccacatccagctgctgcagcagcacctgagacagcagggcagcgtggaggtgtag

SEQ ID NO: 343851 - DNA, 4043 bp, Artificial Sequence
  derived and/or modified sequence
ggggcgggccgggccggcttgggaggggacgcggagggggcgggccgggctgcgttcgctccagccgcggctctacagcagcgggcggcgggacccgggacccagcttggcgacggcgatctcgacgcgggcccccaggatctcccggcgccccacctctggagcagcccctgccgccagcgtcaggtccaccccggaatcccagggactctcggcgccgaacggacccgggccgggtgcaacggggtccccggactggagaagacgcgggtggcaccgtgcgagctccaggagccccgggtccactgcgaggcctcggggggcgcagacctgcagagactgcggccaacgggaagaaataaagggattatagtccacccaattcacagacttctgagactcagacacgaggagagatagagaaccgccaatctctagatcaacaagcaaaggaggtgccaagcctgtttgtcttcattgtgacactggagtctagatgctgggaagtccaagatcagggtgccggcatggtcagttcctggcgaagcctctcttctaggtttcagactgccctcttctttgttgtgtcctcgaatggcagaaaaaggggtggctgttggaggaagggaggagagtaaatgaagagaaagaactggaataaccccttgcagaaaaaaaaaaaaagggaagcaagcttagctgtacaccctgagtcttgcaaaagctgcagccccacccaggagcagggtggtggctggggcgatggtggacgccctgaagatgtcccatggctactgaaggggctgcccagttagggaacagagtggcgggcatggtgtgtagcctatgggtgctgctcctggtgtcttcagttctggctctggaagaggtattgctggacaccaccggagagacatctgagattggctggctcacctacccaccaggggggtgggacgaggtgagtgttctggacgaccagcgacgcctgactcggacctttgaggcatgtcatgtggcaggggcccctccaggcaccgggcaggacaattggttgcagacacactttgtggagcggcgcggggcccagagggcgcacattcgactccacttctctgtgcgggcatgctccagcctgggtgtgagcggcggcacctgccgggagaccttcaccctttactaccgtcaggctgaggagcccgacagccctgacagcgtttcctcctggcacctcaaacgctggaccaaggtggacacaattgcagcagacgagagctttccctcctcctcctcctcctcctcctcttcttcctctgcagcgtgggctgtgggaccccacggggctgggcagcgggctggactgcaactgaacgtcaaagagcggagctttgggcctctcacccaacgcggcttctacgtggccttccaggacacgggggcctgcctggccctggtcgctgtcaggctcttctcctacacctgccctgccgtgctccgatcctttgcttcctttccagagacgcaggccagtggggctgggggggcctccctggtggcagctgtgggcacctgtgtggctcatgcagagccagaggaggatggagtagggggccaggcaggaggcagcccccccaggctgcactgcaacggggagggcaagtggatggtagctgtcgggggctgccgctgccagcctggataccaaccagcacgaggagacaaggcctgccaagcctgcccacgggggctctataagtcttctgctgggaatgctccctgctcaccatgccctgcccgcagtcacgctcccaacccagcagcccccgtttgcccctgcctggagggcttctaccgggccagttccgacccaccagaggccccctgcactggtcctccatcggctccccaggagctttggtttgaggtgcaaggctcagcactcatgctacactggcgcctgcctcgggagctggggggtcgaggggacctgctcttcaatgtcgtgtgcaaggagtgtgaaggccgccaggaacctgccagcggtggtgggggcacttgtcaccgctgcagggatgaggtccacttcgaccctcgccagagaggcctgactgagagccgagtgttagtggggggactccgggcacacgtaccctacatcttagaggtgcaggctgttaatggggtgtctgagctcagccctgaccctcctcaggctgcagccatcaatgtcagcaccagccatgaagtgccctctgctgtccctgtggtgcaccaggtgagccgggcatccaacagcatcacggtgtcctggccgcagcccgaccagaccaatgggaacatcctggactatcagctccgctactatgaccaggcagaagacgaatcccactccttcaccctgaccagcgagaccaacactgccaccgtgacacagctgagccctggccacatctatggtttccaggtgcgggcccggactgctgccggccacggcccctacgggggcaaagtctatttccagacacttcctcaaggggagctgtcttcccagcttccggaaagactctccttggtgatcggctccatcctgggggctttggccttcctcctgctggcagccatcaccgtgctggcggtcgtcttccagcggaagcggcgtgggactggctacacggagcagctgcagcaatacagcagcccaggactcggggtgaagtattacatcgacccctccacctacgaggacccctgtcaggccatccgagaacttgcccgggaagtcgatcctgcttatatcaagattgaggaggtcattgggacaggctcttttggagaagtgcgccagggccgcctgcagccacggggacggagggagcagactgtggccatccaggccctgtgggccgggggcgccgaaagcctgcagatgaccttcctgggccgggccgcagtgctgggtcagttccagcaccccaacatcctgcggctggagggcgtggtcaccaagagccgacccctcatggtgctgacggagttcatggagcttggccccctggacagcttcctcaggcagcgggagggccagttcagcagcctgcagctggtggccatgcagcggggagtggctgctgccatgcagtacctgtccagctttgccttcgtccatcgctcgctgtctgcccacagcgtgctggtgaatagccacttggtgtgcaaggtggcccgtcttggccacagtcctcagggcccaagttgtttgcttcgctgggcagccccagaggtcattgcacatggaaagcatacaacatccagtgatgtctggagctttgggatactcatgtgggaagtgatgagttatggagaacggccttactgggacatgagtgagcaggaggtactaaatgcaatagagcaggagttccggctgcccccgcctccaggctgtcctcctggattacatctacttatgttggacacttggcagaaggaccgtgcccggcggcctcattttgaccagctggtggctgcatttgacaagatgatccgcaagccagataccctgcaggctggcggggacccaggggaaaggccttcccaggcccttctgacccctgtggccctggactttccttgtctggactcaccccaggcctggctttcagccattggactggagtgctaccaggacaacttctccaagtttggcctctgtaccttcagtgatgtggctcagctcagcctagaagacctgcctgccctgggcatcaccctggctggccaccagaagaagctgctgcaccacatccagctccttcagcaacacctgaggcagcagggctcagtggaggtctgagaatgacgatacccgtgactcagccctggacactggtccgagaagggacatgtgggacgtgagccgggctccaacagcctctgtgagagatgccccacaccaaacccaaccctcccgatggctgcattccctggtcctccgcctctccaccagccccctcctcattaaagggaaagaagggaatttgcaa

SEQ ID NO: 343852 - DNA, 2425 bp, Artificial Sequence
  derived and/or modified sequence
atggctactgaaggggctgcccagttagggaacagagtggcgggcatggtgtctgtcgggggctgccgctgccagcctggataccaaccagcacgaggagacaaggcctgccaagcctgcccacgggggctctataagtcttctgctgggaatgctccctgctcaccatgccctgcccgcagtcacgctcccaacccagcagcccccgtttgcccctgcctggagggcttctaccgggccagttccgacccaccagaggccccctgcactggtcctccatcggctccccaggagctttggtttgaggtgcaaggctcagcactcatgctacactggcgcctgcctcgggagctggggggtcgaggggacctgctcttcaatgtcgtgtgcaaggagtgtgaaggccgccaggaacctgccagcggtggtgggggcacttgtcaccgctgcagggatgaggtccacttcgaccctcgccagagaggcctgactgagagccgagtgttagtggggggactccgggcacacgtaccctacatcttagaggtgcaggctgttaatggggtgtctgagctcagccctgaccctcctcaggctgcagccatcaatgtcagcaccagccatgaagtgccctctgctgtccctgtggtgcaccaggtgagccgggcatccaacagcatcacggtgtcctggccgcagcccgaccagaccaatgggaacatcctggactatcagctccgctactatgaccaggcagaagacgaatcccactccttcaccctgaccagcgagaccaacactgccaccgtgacacagctgagccctggccacatctatggtttccaggtgcgggcccggactgctgccggccacggcccctacgggggcaaagtctatttccagacacttcctcaaggggagctgtcttcccagcttccggaaagactctccttggtgatcggctccatcctgggggctttggccttcctcctgctggcagccatcaccgtgctggcggtcgtcttccagcggaagcggcgtgggactggctacacggagcagctgcagcaatacagcagcccaggactcggggtgaagtattacatcgacccctccacctacgaggacccctgtcaggccatccgagaacttgcccgggaagtcgatcctgcttatatcaagattgaggaggtcattgggacaggctcttttggagaagtgcgccagggccgcctgcagccacggggacggagggagcagactgtggccatccaggccctgtgggccgggggcgccgaaagcctgcagatgaccttcctgggccgggccgcagtgctgggtcagttccagcaccccaacatcctgcggctggagggcgtggtcaccaagagccgacccctcatggtgctgacggagttcatggagcttggccccctggacagcttcctcaggcagcgggagggccagttcagcagcctgcagctggtggccatgcagcggggagtggctgctgccatgcagtacctgtccagctttgccttcgtccatcgctcgctgtctgcccacagcgtgctggtgaatagccacttggtgtgcaaggtggcccgtcttggccacagtcctcagggcccaagttgtttgcttcgctgggcagccccagaggtcattgcacatggaaagcatacaacatccagtgatgtctggagctttgggatactcatgtgggaagtgatgagttatggagaacggccttactgggacatgagtgagcaggaggtactaaatgcaatagagcaggagttccggctgcccccgcctccaggctgtcctcctggattacatctacttatgttggacacttggcagaaggaccgtgcccggcggcctcattttgaccagctggtggctgcatttgacaagatgatccgcaagccagataccctgcaggctggcggggacccaggggaaaggccttcccaggcccttctgacccctgtggccctggactttccttgtctggactcaccccaggcctggctttcagccattggactggagtgctaccaggacaacttctccaagtttggcctctgtaccttcagtgatgtggctcagctcagcctagaagacctgcctgccctgggcatcaccctggctggccaccagaagaagctgctgcaccacatccagctccttcagcaacacctgaggcagcagggctcagtggaggtctgagaatgacgatacccgtgactcagccctggacactggtccgagaagggacatgtgggacgtgagccgggctccaacagcctctgtgagagatgccccacaccaaacccaaccctcccgatggctgcattccctggtcctccgcctctccaccagccccctcctcattaaagggaaagaagggaatttgcaa

SEQ ID NO: 343853 - DNA, 4008 bp, Artificial Sequence
  derived and/or modified sequence
cggagggggcgggccgggctgcgttcgctccagccgcggctctacagcagcgggcggcgggacccgggacccagcttggcgacggcgatctcgacgcgggcccccaggatctcccggcgccccacctctggagcagcccctgccgccagcgtcaggtccaccccggaatcccagggactctcggcgccgaacggacccgggccgggtgcaacggggtccccggactggagaagacgcgggtggcaccgtgcgagctccaggagccccgggtccactgcgaggcctcggggggcgcagacctgcagagactgcggccaacgggaagaaataaagggattatagtccacccaattcacagacttctgagactcagacacgaggagagatagagaaccgccaatctctagatcaacaagcaaaggaggtgccaagcctgtttgtcttcattgtgacactggagtctagatgctgggaagtccaagatcagggtgccggcatggtcagttcctggcgaagcctctcttctaggtttcagactgccctcttctttgttgtgtcctcgaatggcagaaaaaggggtggctgttggaggaagggaggagagtaaatgaagagaaagaactggaataaccccttgcagaaaaaaaaaaaaaggcaagcttagctgtacaccctgagtcttgcaaaagctgcagccccacccaggagcagggtggtggctggggcgatggtggacgccctgaagatgtcccatggctactgaaggggctgcccagttagggaacagagtggcgggcatggtgtgtagcctatgggtgctgctcctggtgtcttcagttctggctctggaagaggtattgctggacaccaccggagagacatctgagattggctggctcacctacccaccaggggggtgggacgaggtgagtgttctggacgaccagcgacgcctgactcggacctttgaggcatgtcatgtggcaggggcccctccaggcaccgggcaggacaattggttgcagacacactttgtggagcggcgcggggcccagagggcgcacattcgactccacttctctgtgcgggcatgctccagcctgggtgtgagcggcggcacctgccgggagaccttcaccctttactaccgtcaggctgaggagcccgacagccctgacagcgtttcctcctggcacctcaaacgctggaccaaggtggacacaattgcagcagacgagagctttccctcctcctcctcctcctcctcctcttcttcctctgcagcgtgggctgtgggaccccacggggctgggcagcgggctggactgcaactgaacgtcaaagagcggagctttgggcctctcacccaacgcggcttctacgtggccttccaggacacgggggcctgcctggccctggtcgctgtcaggctcttctcctacacctgccctgccgtgctccgatcctttgcttcctttccagagacgcaggccagtggggctgggggggcctccctggtggcagctgtgggcacctgtgtggctcatgcagagccagaggaggatggagtagggggccaggcaggaggcagcccccccaggctgcactgcaacggggagggcaagtggatggtagctgtcgggggctgccgctgccagcctggataccaaccagcacgaggagacaaggcctgccaagcctgcccacgggggctctataagtcttctgctgggaatgctccctgctcaccatgccctgcccgcagtcacgctcccaacccagcagcccccgtttgcccctgcctggagggcttctaccgggccagttccgacccaccagaggccccctgcactggtcctccatcggctccccaggagctttggtttgaggtgcaaggctcagcactcatgctacactggcgcctgcctcgggagctggggggtcgaggggacctgctcttcaatgtcgtgtgcaaggagtgtgaaggccgccaggaacctgccagcggtggtgggggcacttgtcaccgctgcagggatgaggtccacttcgaccctcgccagagaggcctgactgagagccgagtgttagtggggggactccgggcacacgtaccctacatcttagaggtgcaggctgttaatggggtgtctgagctcagccctgaccctcctcaggctgcagccatcaatgtcagcaccagccatgaagtgccctctgctgtccctgtggtgcaccaggtgagccgggcatccaacagcatcacggtgtcctggccgcagcccgaccagaccaatgggaacatcctggactatcagctccgctactatgaccaggcagaagacgaatcccactccttcaccctgaccagcgagaccaacactgccaccgtgacacagctgagccctggccacatctatggtttccaggtgcgggcccggactgctgccggccacggcccctacgggggcaaagtctatttccagacacttcctcaaggggagctgtcttcccagcttccggaaagactctccttggtgatcggctccatcctgggggctttggccttcctcctgctggcagccatcaccgtgctggcggtcgtcttccagcggaagcggcgtgggactggctacacggagcagctgcagcaatacagcagcccaggactcggggtgaagtattacatcgacccctccacctacgaggacccctgtcaggccatccgagaacttgcccgggaagtcgatcctgcttatatcaagattgaggaggtcattgggacaggctcttttggagaagtgcgccagggccgcctgcagccacggggacggagggagcagactgtggccatccaggccctgtgggccgggggcgccgaaagcctgcagatgaccttcctgggccgggccgcagtgctgggtcagttccagcaccccaacatcctgcggctggagggcgtggtcaccaagagccgacccctcatggtgctgacggagttcatggagcttggccccctggacagcttcctcaggcagcgggagggccagttcagcagcctgcagctggtggccatgcagcggggagtggctgctgccatgcagtacctgtccagctttgccttcgtccatcgctcgctgtctgcccacagcgtgctggtgaatagccacttggtgtgcaaggtggcccgtcttggccacagtcctcagggcccaagttgtttgcttcgctgggcagccccagaggtcattgcacatggaaagcatacaacatccagtgatgtctggagctttgggatactcatgtgggaagtgatgagttatggagaacggccttactgggacatgagtgagcaggaggtactaaatgcaatagagcaggagttccggctgcccccgcctccaggctgtcctcctggattacatctacttatgttggacacttggcagaaggaccgtgcccggcggcctcattttgaccagctggtggctgcatttgacaagatgatccgcaagccagataccctgcaggctggcggggacccaggggaaaggccttcccaggcccttctgacccctgtggccctggactttccttgtctggactcaccccaggcctggctttcagccattggactggagtgctaccaggacaacttctccaagtttggcctctgtaccttcagtgatgtggctcagctcagcctagaagacctgcctgccctgggcatcaccctggctggccaccagaagaagctgctgcaccacatccagctccttcagcaacacctgaggcagcagggctcagtggaggtctgagaatgacgatacccgtgactcagccctggacactggtccgagaagggacatgtgggacgtgagccgggctccaacagcctctgtgagagatgccccacaccaaacccaaccctcccgatggctgcattccctggtcctccgcctctccaccagccccctcctcattaaagggaaagaagggaatttgcaa

SEQ ID NO: 343854 - protein, 173 aa, Artificial Sequence
  derived and/or modified sequence
MARMNRPAPVEVSYKHMRFLITHNPTNATLSTFIEDLKKYGATTVVRVCEVTYDKTPLEKDGITVVDWPFDDGAPPPGKVVEDWLSLVKAKFCEAPGSCVAVHCVAGLGRAPVLVALALIESGMKYEDAIQFIRQKRRGAINSKQLTYLEKYRPKQRLRFKDPHTHKTRCCVM

SEQ ID NO: 343855 - protein, 70 aa, Artificial Sequence
  derived and/or modified sequence
MARMNRPAPVEVSYKHMRFLITHNPTNATLSTFIEDLKKYGATTVVRVCEVTYDKTPLEKDGITVVDWPF

SEQ ID NO: 343856 - DNA, 522 bp, Artificial Sequence
  derived and/or modified sequence
atggcacgcatgaatagaccagctcctgttgaagtgagctacaaacatatgagatttctgattacacataatcctactaatgccacactttcaaccttcatcgaagaccttaagaagtacggagcaaccacggtggtgcgcgtgtgcgaggtcacctacgataagacacctcttgagaaagacggaatcacagtagtggactggcccttcgacgacggggcccccccccctggaaaagtcgtggaagattggctatcgttggtgaaagcgaaattttgcgaggcgccaggatcatgcgtagccgtgcactgtgttgccggattggggcgcgcgcccgttttggtagccttagccttaatcgagagcggcatgaagtatgaggacgccatccaattcattagacaaaaacgaagaggcgccattaactctaagcagttaacttatctcgaaaagtacagaccaaaacagagattaaggtttaaggaccctcacacacacaaaacaaggtgctgcgtgatgtag

SEQ ID NO: 343857 - DNA, 522 bp, Artificial Sequence
  derived and/or modified sequence
atggcccggatgaatcgacccgctccagtggaggtgagttacaagcacatgcgctttttgattacacacaatcccactaacgccactctgtctacctttatagaagacctgaagaagtatggggctacaacagtggtgcgggtgtgtgaggtgacctacgacaagaccccattagagaaggatggcataacagttgtggactggccgttcgacgacggagcccccccgcccggcaaagtcgtcgaggattggttgtctctcgttaaagccaaattttgcgaagctcctggttcttgcgtagcggtccattgcgttgctgggctgggtagagcccccgttctcgtggctctggccctgatagaatcaggcatgaaatacgaggatgctatacagtttatccgacagaagcgacgaggggccattaactccaaacagctaacttatctggagaagtacagacctaaacaaaggctccggttcaaggaccctcacacacataagaccaggtgttgtgtgatgtag

SEQ ID NO: 343858 - DNA, 522 bp, Artificial Sequence
  derived and/or modified sequence
atggccaggatgaacagacctgcccctgtggaggtgtcctacaagcacatgaggttcctgatcacccacaaccccaccaatgccaccctgagcaccttcatcgaggacctgaagaagtacggggccaccaccgtggtgcgggtgtgtgaggtgacctatgacaagacccccctggagaaggatggcatcaccgtggtggactggccctttgatgatggagcccctcctcctgggaaggtggtggaggactggctgagcctggtgaaggccaagttctgtgaggcccctggcagctgtgtggccgtgcactgtgtggccggcctgggccgggcccctgtgctggtggccctggccctgattgagagcggcatgaagtatgaagatgccatccagttcatccggcagaagagaagaggagccatcaacagcaagcagctgacctacctggagaagtaccggcccaagcagaggctgcgcttcaaggacccccacacccacaagacccgctgctgcgtgatgtag

SEQ ID NO: 343859 - DNA, 522 bp, Artificial Sequence
  derived and/or modified sequence
atggcccggatgaaccggcccgcccccgtggaggtgagctacaagcacatgagattcttgatcactcacaaccctacaaatgccaccctgagcacctttattgaggatctgaaaaaatacggcgctaccacagttgtcagagtttgcgaagtaacctacgacaagacaccactagagaaagacggtataacagtggtagactggccttttgacgatggagccccgccacctgggaaagttgtggaggactggttgtcacttgtgaaagccaagttctgtgaagccccagggtcttgcgttgcggtgcactgcgtcgcggggctaggcagagcccctgtcctcgtggccctggcacttatcgaaagcggaatgaagtacgaagatgcgatccagtttatacggcagaagcgaaggggagccatcaacagcaaacagctgacatacctggaaaagtacaggccaaaacagcgtctcaggttcaaggaccctcacacacacaagacccgatgttgcgtaatgtag

SEQ ID NO: 343860 - DNA, 522 bp, Artificial Sequence
  derived and/or modified sequence
atggcccggatgaaccggcccgcccccgtggaggtgagctacaagcacatgcgattccttatcacccacaatccaactaacgccacactgtcaacatttattgaggatcttaagaaatatggtgcaactacagtcgtgcgcgtttgcgaagtaacctacgataaaaccccactggagaaagacggcatcacagtggtagattggccctttgacgatggtgcccctcctcccggcaaggtggtagaagactggctgagcttagtcaaagccaagttctgtgaggcaccaggatcctgtgttgcggtgcattgcgttgcaggtctaggccgtgcgcctgtactggtggcacttgctctaattgagtctgggatgaagtatgaggatgctatccagtttatcagacagaagcggcggggcgccatcaactccaagcagctgacatacctggagaagtacagacccaagcaaaggctgcgctttaaggacccccacacccacaaaacgaggtgctgcgttatgtag

SEQ ID NO: 343861 - DNA, 522 bp, Artificial Sequence
  derived and/or modified sequence
atggccagaatgaaccggccagcacccgtggaagtttcatataaacacatgcggttcctgattacacacaaccccaccaatgcgactctgtcaacattcatcgaagacttgaaaaagtacggagccactaccgtagtgcgagtctgcgaggtgacctatgacaagacaccgctggagaaagatggtataaccgttgttgactggcctttcgacgacggcgcacctccacccggaaaagtggtggaggattggctgagcctggtcaaagcaaaattctgtgaggcccctggctcctgcgtggcagtacactgcgtcgcagggcttggtcgcgctcctgtacttgtcgccctggctctcatcgagtccgggatgaaatatgaggatgctatccaatttattagacagaaacgcagaggcgctataaactctaaacagctgacttacttagagaagtaccgacctaagcaaaggctacggttcaaggatccacatacacacaagacccggtgttgtgtgatgtag

SEQ ID NO: 343862 - DNA, 522 bp, Artificial Sequence
  derived and/or modified sequence
atggctagaatgaaccgccctgcccctgtggaagtaagctacaagcacatgcgtttcctgatcactcacaaccctacgaatgcaactctaagtaccttcatcgaagatctgaagaaatatggggctacaaccgtcgtaagagtctgcgaagtgacttacgataaaacccccttggaaaaggatggcattaccgtcgttgactggcctttcgacgacggggcaccaccccctggaaaggtcgtggaggactggttgtccctcgtgaaagcaaagttctgcgaggctcccggaagttgtgtagctgttcactgtgtggccggattgggtagggcccctgtcctcgtggccctcgcactcattgagagtgggatgaagtacgaagatgccattcagttcatacgccagaaaagacgtggcgctatcaattctaagcagttgacctacttggagaagtatagaccaaaacagcgtcttaggttcaaagatcctcacactcataaaactagatgctgcgtgatgtag

SEQ ID NO: 343863 - DNA, 1332 bp, Artificial Sequence
  derived and/or modified sequence
tgactatccagctctgagagacgggagtttggagttgcccgctttactttggttgggttggggggggcggcgggctgttttgttccttttcttttttaagagttgggttttcttttttaattatccaaacagtgggcagcttcctcccccacacccaagtatttgcacaatatttgtgcggggtatgggggtgggtttttaaatctcgtttctcttggacaagcacagggatctcgttctcctcattttttgggggtgtgtggggacttctcaggtcgtgtccccagccttctctgcagtcccttctgccctgccgggcccgtcgggaggcgccatggctcggatgaaccgcccggccccggtggaggtgagctacaaacacatgcgcttcctcatcacccacaaccccaccaacgccacgctcagcaccttcattgaggacctgaagaagtacggggctaccactgtggtgcgtgtgtgtgaagtgacctatgacaaaacgccgctggagaaggatggcatcaccgttgtggactggccgtttgacgatggggcgcccccgcccggcaaggtagtggaagactggctgagcctggtgaaggccaagttctgtgaggcccccggcagctgcgtggctgtgcactgcgtggcgggcctgggccgggctccagtccttgtggcgctggcccttattgagagcgggatgaagtacgaggacgccatccagttcatccgccagaagcgccgcggagccatcaacagcaagcagctcacctacctggagaaataccggcccaaacagaggctgcggttcaaagacccacacacgcacaagacccggtgctgcgttatgtagctcaggaccttggctgggcctggtcgtcatgtaggtcaggaccttggctggacctggaggccctgcccagccctgctctgcccagcccagcaggggctccaggccttggctggccccacatcgccttttcctccccgacacctccgtgcacttgtgtccgaggagcgaggagcccctcgggccctgggtggcctctgggccctttctcctgtctccgccactccctctggcggcgctggccgtggctctgtctctctgaggtgggtcgggcgccctctgcccgccccctcccacaccagccaggctggtctcctctagcctgtttgttgtggggtgggggtatattttgtaaccactgggcccccagcccctcttttgcgaccccttgtcctgacctgttctcggcaccttaaattattagaccccggggcagtcaggtgctccggacacccgaaggcaataaaacaggagccgtg

SEQ ID NO: 343864 - DNA, 1717 bp, Artificial Sequence
  derived and/or modified sequence
ctaagccggtggagccgcggccgcgcctgtgcgcgagggcgcgcgcgtcccgagccctccacccgtcgtgccggcgccgcccggaccgccagatgctgtgtgctgtggacccacctggggttcatggagtgggccacggggcccagccctaagcactgctgcgcccagggtcgccgcgcctcctgctgaggggtccccgtgccactggctctcaccattgccctcgcctgccgatggcctctgctgcccagcctggggccagctctaccgcctgagccccctgccccactccaggactcaccgtaccccgatggggtaacgtgacacaggccccacacgtcagaggccgctgtccccacggccactgcccgtgacccctggcccaaggcagctggagttggttcagttcaagttcattcttcctctggcccttgggggcttggggcccacctctgagtgaagggggctgtctgcccatccaccaatgtggagagggcgcccccggtgtggggtccagctctggacactgcttggcggccgggttcactttgagtttttaagttttctttgctgagcttttttggttgttctttttattttttgcctctttatgactatccagctctgagagacgggagtttggagttgcccgctttactttggttgggttggggggggcggcgggctgttttgttccttttcttttttaagagttgggttttcttttttaattatccaaacagtgggcagcttcctcccccacacccaagtatttgcacaatatttgtgcggggtatgggggtgggtttttaaatctcgtttctcttggacaagcacagggatctcgttctcctcattttttgggggtgtgtggggacttctcaggtcgtgtccccagccttctctgcagtcccttctgccctgccgggcccgtcgggaggcgccatggctcggatgaaccgcccggccccggtggaggtgagctacaaacacatgcgcttcctcatcacccacaaccccaccaacgccacgctcagcaccttcattgaggacctgaagaagtacggggctaccactgtggtgcgtgtgtgtgaagtgacctatgacaaaacgccgctggagaaggatggcatcaccgttgtggactggccgtttgacgatggggcgcccccgcccggcaaggtagtggaagactggctgagcctggtgaaggccaagttctgtgaggcccccggcagctgcgtggctgtgcactgcgtggcgggcctgggccgggctccagtccttgtggcgctggcccttattgagagcgggatgaagtacgaggacgccatccagttcatccgccagaagcgccgcggagccatcaacagcaagcagctcacctacctggagaaataccggcccaaacagaggctgcggttcaaagacccacacacgcacaagacccggtgctgcgttatgtagctcaggaccttggctgggcctggtcgtcatgtaggtcaggaccttggctggacctggaggccctgcccagccctgctctgcccagcccagcaggggctccaggccttggctggccccacatcgccttttcctccccgacacctccgtgcacttgtgtccgaggagcgaggagcccctcgggccctgggtggcctctgggccctttctcctgtctccgccactccctctggcggcgctggccgtggctctg

SEQ ID NO: 343865 - DNA, 522 bp, Artificial Sequence
  derived and/or modified sequence
atggccagaatgaacagacccgcccccgtggaggtgagctacaagcacatgagattcctgatcacccacaaccccaccaacgccaccctgagcaccttcatcgaggacctgaagaagtacggcgccaccaccgtggtgagagtgtgcgaggtgacctacgacaagacccccctggagaaggacggcatcaccgtggtggactggcccttcgacgacggcgcccccccccccggcaaggtggtggaggactggctgagcctggtgaaggccaagttctgcgaggcccccggcagctgcgtggccgtgcactgcgtggccggcctgggcagagcccccgtgctggtggccctggccctgatcgagagcggcatgaagtacgaggacgccatccagttcatcagacagaagagaagaggcgccatcaacagcaagcagctgacctacctggagaagtacagacccaagcagagactgagattcaaggacccccacacccacaagaccagatgctgcgtgatgtag

SEQ ID NO: 343866 - protein, 1340 aa, Artificial Sequence
  derived and/or modified sequence
MRPPGFLSRAPSLNRAERGIWSCSMDQREPLPPAPAENEMKYDTNNNEEEEGEQFDFDSGDEIPEADRQAPSAPETGGAGASEAPAPTGGEDGAGAETTPVAEPTKLVLPMKVNPYSVIDITPFQEDQPPTPVPSAEEENVGLHVPCGYLVPVPCGYAVPSNLPLLLPAYSSPVIICATSLDEEAETPEVTEDRQPNSLSSEEPPTSEDQVGREDSALARWAADPANTAWMENPEEAIYDDVPRENSDSEPDEMIYDDVENGDEGGNSSLEYGWSSSEFESYEEQSDSECKNGIPRSFLRSNHKKQLSHDLTRLKEHYEKKMRDLMASTVGVVEIQQLRQKHELKMQKLVKAAKDGTKDGLERTRAAVKRGRSFIRTKSLIAQDHRSSLEEEQNLFIDVDCKHPEAILTPMPEGLSQQQVVRRYILGSVVDSEKNYVDALKRILEQYEKPLSEMEPKVLSERKLKTVFYRVKEILQCHSLFQIALASRVSEWDSVEMIGDVFVASFSKSMVLDAYSEYVNNFSTAVAVLKKTCATKPAFLEFLKQEQEASPDRTTLYSLMMKPIQRFPQFILLLQDMLKNTSKGHPDRLPLQMALTELETLAEKLNERKRDADQRCEVKQIAKAINERYLNKLLSSGSRYLIRSDDMIETVYNDRGEIVKTKERRVFMLNDVLMCATVSSRPSHDSRVMSSQRYLLKWSVPLGHVDAIEYGSSAGTGEHSRHLAVHPPESLAVVANAKPNKVYMGPGQLYQDLQNLLHDLNVIGQITQLIGNLKGNYQNLNQSVAHDWTSGLQRLILKKEDEIRAADCCRIQLQLPGKQDKSGRPTFFTAVFNTFTPAIKESWVNSLQMAKLALEEENHMGWFCVEDDGNHIKKEKHPLLVGHMPVMVAKQQEFKIGSCTHQMGQIAIVSFQNSTPKVIECFNVESRILCMLYVPVEEKRREPGAPPDPETPAVRASDVPTICVGTEEGSISIYKSSQGSKKVRLQHFFTPEKSTVMSLACTSQSLYAGLVNGAVASYARAPDGSWDSEPQKVIKLGVLPVRSLLMMEDTLWAASGGQVFIISVETHAVEGQLEAHQEEGMVISHMAVSGVGIWIAFTSGSTLRLFHTETLKHLQDINIATPVHNMLPGHQRLSVTSLLVCHGLLMVGTSLGVLVALPVPRLQGIPKVTGRGMVSYHAHNSPVKFIVLATALHEKDKDKSRDSLAPGPEPQDEDQKDALPSGGAGSSLSQGDPDAAIWLGDSLGSMTQKSDLSSSSGSLSLSHGSSSLEHRSEDSTIYDLLKDPVSLRSKARRAKKAKASSALVVCGGQGHRRVHRKARQPHQEELAPTVMVWQIPLLNI

SEQ ID NO: 343867 - protein, 683 aa, Artificial Sequence
  derived and/or modified sequence
MEPQRRELLAQCQQSLAQAMTEVEAVLGLLEAAGALSPGERRQLDEEAGGAKAELLLKLLLAKERDHFQDLRAALEKTQPHLLPILYLNGVVGPPQPAEGAGSTYSVLSTMPSDSESSSSLSSVGTTVKHLREQMESQLEKEARFRQLMAHSSHDSAIDTDSMEWETEVVEFERETEDIDLKALGFDMAEGVNEPCFPGDCGIFVTKVDKGSIADGRLRVNDWLLRINDVDLINKDKKQAIKALLNGEGAINMVVRRRKSLGGKVVTPLHINLSGQKDSGISLENGVYAAAVLPGSPAAKEGSLAVGDRIVAINGIALDNKSLNECESLLRSCQDSLTLSLLKVFPQSSSWSGQNIFENIKDSDKMLSFRAHGPEVQAHNKRNLIQHNNSTQTDIFYTDRLEDRKEPGPPGGSSSFLHKPFPGGPLQVCPQACPSASERSLSSFRSDASGDRGFGLVDVRGRRPLLPFETEVGPCGVGEASLDKADSEGSNSGGTWPKAMLSSTAVPEKLSVYKKPKQRKSIFDPNTFKRPQTPPKIDYLLPGPGPAHSPQPSKRAGPLTPPKPPRRSDSIKFQHRLETSSESEATLVGSSPSTSPPSALPPDVDPGEPMHASPPRKARVRIASSYYPEGDGDSSHLPAKKSCDEDLTSQKVDELGQKRRRPKSAPSFRPKLAPVVIPAQFLE

SEQ ID NO: 343868 - protein, 221 aa, Artificial Sequence
  derived and/or modified sequence
MFGFHKPKMYRSIEGCCICRAKSSSSRFTDSKRYEKDFQSCFGLHETRSGDICNACVLLVKRWKKLPAGSKKNWNHVVDARAGPSLKTTLKPKKVKTLSGNRIKSNQISKLQKEFKRHNSDAHSTTSSASPAQSPCYSNQSDDGSDTEMASGSNRTPVFSFLDLTYWKRQKICCGIIYKGRFGEVLIDTHLFKPCCSNKKAAAEKPEEQGPEPLPISTQEW

SEQ ID NO: 343869 - protein, 262 aa, Artificial Sequence
  derived and/or modified sequence
MSYLPTNPPGSILAGSASLSAVTGVPEGEARFTEDYCPEEKMFGFHKPKMYRSIEGCCICRAKSSSSRFTDSKRYEKDFQSCFGLHETRSGDICNACVLLVKRWKKLPAGSKKNWNHVVDARAGPSLKTTLKPKKVKTLSGNRIKSNQISKLQKEFKRHNSDAHSTTSSASPAQSPCYSNQSDDGSDTEMASGSNRTPVFSFLDLTYWKRQKICCGIIYKGRFGEVLIDTHLFKPCCSNKKAAAEKPEEQGPEPLPISTQEW

SEQ ID NO: 343870 - protein, 134 aa, Artificial Sequence
  derived and/or modified sequence
MFGFHKPKMYRSIEGCCICRAKSSSSRFTDSKRYEKDFQSCFGLHETRSGDICNACVLLVKRWKKLPAGSKKNWNHVVDARAGPSLKTTLKPKKVKTLSGNRIKSNQISKLQKEFKRHNSDAHSTTSSASPAQS

SEQ ID NO: 343871 - protein, 127 aa, Artificial Sequence
  derived and/or modified sequence
MFGFHKPKMYRSIEGCCICRAKSSSSRFTDSKRYEKDFQSCFGLHETRSGDICNACVLLVKRWKKLPAGSKKNWNHVVDARAGPSLKTTLKPKKVKTLSGNRIKSNQISKLQKEFKRHNSDAHSTTS

SEQ ID NO: 343872 - DNA, 789 bp, Artificial Sequence
  derived and/or modified sequence
atgagctacctgcccaccaacccccccggcagcatcctggccggcagcgccagcctgagcgccgtgaccggcgtgcccgagggcgaggccagattcaccgaggactactgccccgaggagaagatgttcggcttccacaagcccaagatgtacagaagcatcgagggctgctgcatctgcagagccaagagcagcagcagcagattcaccgacagcaagagatacgagaaggacttccagagctgcttcggcctgcacgagaccagaagcggcgacatctgcaacgcctgcgtgctgctggtgaagagatggaagaagctgcccgccggcagcaagaagaactggaaccacgtggtggacgccagagccggccccagcctgaagaccaccctgaagcccaagaaggtgaagaccctgagcggcaacagaatcaagagcaaccagatcagcaagctgcagaaggagttcaagagacacaacagcgacgcccacagcaccaccagcagcgccagccccgcccagagcccctgctacagcaaccagagcgacgacggcagcgacaccgagatggccagcggcagcaacagaacccccgtgttcagcttcctggacctgacctactggaagagacagaagatctgctgcggcatcatctacaagggcagattcggcgaggtgctgatcgacacccacctgttcaagccctgctgcagcaacaagaaggccgccgccgagaagcccgaggagcagggccccgagcccctgcccatcagcacccaggagtggtag

SEQ ID NO: 343873 - DNA, 789 bp, Artificial Sequence
  derived and/or modified sequence
atgtcatacctccctactaatccacctggctctattctcgctggctctgcgtccttatctgccgtgactggtgtcccggaaggagaagctagatttacagaggattactgtcccgaagaaaagatgttcgggtttcataaacctaagatgtacaggagcatcgaggggtgctgcatctgtcgggcaaaaagctcctcgtctagattcacggactcgaagaggtacgagaaagatttccaatcatgttttggcctccacgagactcgctcaggcgatatatgcaatgcctgcgtgctgctggtgaaaaggtggaaaaaactccctgccgggtcgaagaagaactggaatcacgtagtggacgctagagctggtccgtcgctcaagactacattgaagcccaagaaggttaaaaccctgagcggaaataggattaagagcaaccaaatttcaaagctccagaaggagttcaagcgtcacaatagcgacgctcacagcacaaccagcagtgcctcaccagcacagtcgccatgttactccaatcagtcagacgatgggtcagatacagaaatggctagcggctccaaccgcacgcccgtgtttagctttttggatttaacatattggaaaagacaaaagatttgttgtggaataatctacaagggcagattcggggaggttttgatcgacacacatctcttcaagccatgttgttccaataagaaagcagccgccgagaaacctgaggaacagggccccgaaccgttgcctatatctacgcaggagtggtag

SEQ ID NO: 343874 - DNA, 3163 bp, Artificial Sequence
  derived and/or modified sequence
ctctggccgccgcgtttcccgcgccgcggagcttctccccttaaaaggacaatagaggcctcgggagcgcgcgcggtcgccgggacttctccccctcccagcccgcaacgtgcgcgcgcccgtatgcaaataagttcgattcaagagaattttgtgccgggagccgcgcgtgcgcagagggaaagcggaatctacaccttcccggccagcggtagcaactgcagaactgcaggagactatctttctagacaaggcagttgaggaggagggagcgcttgagggggactggcctggcgtgcactccgcacctcggggacattattgcgcgtggaacggctgcttttggaagactattgcccagaagaaaagatgtttggttttcacaagccaaagatgtaccgaagtatagagggctgctgtatttgcagagctaagtcctccagttctcgattcactgacagtaaacgctatgaaaaggacttccagagctgttttggattgcatgagactcgttcaggagacatctgcaatgcctgtgtcctgcttgtgaaaagatggaagaagttgccagcaggatcaaaaaaaaactggaatcatgtggtagatgcaagggctggacccagtctaaagactacattgaaaccaaagaaagtgaaaactctatctgggaacaggataaaaagcaaccagatcagtaaactgcagaaggaatttaaacgtcataattctgatgctcacagtaccacctcaagtgcctccccagctcaatctccttgttacagtaaccagtcagatgacggctcagatacagagatggcttctggttctaacagaacaccagttttttcctttttagatctcacttactggaaaagacagaagatatgttgtgggatcatctataaaggccgttttggggaagtcctcattgacacacatctcttcaagccttgctgcagcaataagaaagcagctgctgagaagccagaggagcaggggccagagcctctgcccatctccactcaggagtggtgactgaggtttttatgtagaaggggaacaaaaaaaaaaatatctgaattttgaaaaaccacaaagctacaaactgaccctcttttttttttgagacggagttttgctcttgttacccaggctggagtgcagtggcgtgatcttggctcactgcaacttccgtctcccgggttcaagtgattctcctgcctcagcctcccaagtagctgggtttataggtgcccgccaccagacccggctaattttttagttttagtagagacggggtttcaccacgttggccaggctggtcttaaatgaccctcttatttttaacttggatacctgctattctgccaaaagacaatttctagagtagttttgaatgggttgatttcccccactcccacaaactctgaagccagtgtctagcttactaaaaaaagagttgtatataatatttaagatgctgagtatttcataggaaagctgaatgctgctgtaaagtgctctttaagtcttttttttttttaatccccttctaatgaatgaaactaggggaatttcaggggacagagatgggatttgttgtatgataaactgtatgtagtttttagtctttctgttttgagaagcagtggttggggcatttttaagatggctggctactcttgttttccctcatgataataaatttgtcataactcagtaacatgaacttgcccctagaggtagttgttaataattttgaaatattaaggtcttgccaagcttctgatgattcacacctgtactactgattattaagcaggacagactgagctttctgttgcaaataccttggaggagaaagtaatttctaaatatacagagaggtaacttgactatatatgttgcatcctgtgcctcccttcatattaatatttgataaagattttaatttatgtaaaacttctaaagcagaatcaaagctcctcttggggaaatggcaagtctttaggataggcaagaccctgtatgaatagtaccaaagcattaccgcatggtagagaacacactcgattaaaaatgttaagctatctgaaaaataaaatgtgcaagtcttcaggatggcacaaaacaaaggttaatgcttcttggggcacatttcttagagggcttgctgagtgtgtaaatataatcgacttttgtttgtgttacatgacttctgtgacttcattgaaaatctgcacaattcagtttcagctctggattacttcagttgacctttgtgaaggtttttatctgtgtagaatgggtgtttgacttgttttagcctattaaatttttattttctttcactctgtattaaaagtaaaacttactaaaagaaaagaggtttgtgttcacattaaatggttttggtttggcttcttttagtcaggctttctgaacattgagatatcctgaacttagagctcttcaatcctaagattttcatgaaaagcctctcacttgaacccaaaccagagtactcttactgcctcttttctaaatgttcaggaaaagcattgccagttcagtcttttcaaaatgagggagaaacatttgcctgccttgtaataacaagactcagtgcttattttttaaactgcattttaaaaattggatagtataataacaataaggagtaagccaccttttataggcaccctgtagttttatagttcttaatctaaacattttatatttccttcttttggaaaaaacctacatgctacaagccaccatatgcacagactatacagtgagttgagttggctctcccacagtctttgaggtgaattacaaaagtccagccattatcatcctcctgagttatttgaaatgattttttttgtacattttggctgcagtattggtggtagaatatactataatatggatcatctctacttctgtatttatttatttattactagacctcaaccacagtcttctttttccccttccacctctctttgcctgtaggatgtactgtatgtagtcatgcactttgtattaatatattagaaatctacagatctgttttgtactttttatactgttggatacttataatcaaaacttttactagggtattgaataaatctagtcttactagaaaataaaa

SEQ ID NO: 343875 - DNA, 1355 bp, Artificial Sequence
  derived and/or modified sequence
ctatctttctagacaaggcagttgaggaggagggagcgcttgagggggactggcctggcgtgcactccgcacctcggggacattattgcgcgtggaacggctgcttttggaaggcacaacttcctgaatggaccatgactcccaccaaagatccctgtctctgattcaccaaacagcttcaaccctgaaaccaggacgagaagttgacaacatctgagtggacagctaattgacctaagacttcagaccaggcctactattgcccagaagaaaagatgtttggttttcacaagccaaagatgtaccgaagtatagagggctgctgtatttgcagagctaagtcctccagttctcgattcactgacagtaaacgctatgaaaaggacttccagagctgttttggattgcatgagactcgttcaggagacatctgcaatgcctgtgtcctgcttgtgaaaagatggaagaagttgccagcaggatcaaaaaaaaactggaatcatgtggtagatgcaagggctggacccagtctaaagactacattgaaaccaaagaaagtgaaaactctatctgggaacaggataaaaagcaaccagatcagtaaactgcagaaggaatttaaacgtcataattctgatgctcacagtaccacctcaagtgcctccccagctcaatctccttgttacagtaaccagtcagatgacggctcagatacagagatggcttctggttctaacagaacaccagttttttcctttttagatctcacttactggaaaagacagaagatatgttgtgggatcatctataaaggccgttttggggaagtcctcattgacacacatctcttcaagccttgctgcagcaataagaaagcagctgctgagaagccagaggagcaggggccagagcctctgcccatctccactcaggagtggtgactgaggtttttatgtagaaggggaacaaaaaaaaaaatatctgaattttgaaaaaccacaaagctacaaactgaccctcttttttttttgagacggagttttgctcttgttacccaggctggagtgcagtggcgtgatcttggctcactgcaacttccgtctcccgggttcaagtgattctcctgcctcagcctcccaagtagctgggtttataggtgcccgccaccagacccggctaattttttagttttagtagagacggggtttcaccacgttggccaggctggtcttaaatgaccctcttatttttaacttggatacctgctattctgccaaaagacaatttctagagtagttttgaatgggttgatttcccccactcccacaaactctgaagccagtgtctagcttact

SEQ ID NO: 343876 - DNA, 1551 bp, Artificial Sequence
  derived and/or modified sequence
gttgttccggcgcaggtgagggaggtggcggcgagcgacgcggttcacctcccgctgccctcgccctcgccccggcgagcggcccccgcaggaactttcctcccgacgcgagatgtcttatttaccaacaaatccaccagggagcattcttgctggctcggcgtctctctcggcagtcaccggagtgcccgagggggaagcacgatttacggaagactattgcccagaagaaaagatgtttggttttcacaagccaaagatgtaccgaagtatagagggctgctgtatttgcagagctaagtcctccagttctcgattcactgacagtaaacgctatgaaaaggacttccagagctgttttggattgcatgagactcgttcaggagacatctgcaatgcctgtgtcctgcttgtgaaaagatggaagaagttgccagcaggatcaaaaaaaaactggaatcatgtggtagatgcaagggctggacccagtctaaagactacattgaaaccaaagaaagtgaaaactctatctgggaacaggataaaaagcaaccagatcagtaaactgcagaaggaatttaaacgtcataattctgatgctcacagtaccacctcaagtgcctccccagctcaatctccttgttacagtaaccagtcagatgacggctcagatacagagatggcttctggttctaacagaacaccagttttttcctttttagatctcacttactggaaaagacagaagatatgttgtgggatcatctataaaggccgttttggggaagtcctcattgacacacatctcttcaagccttgctgcagcaataagaaagcagctgctgagaagccagaggagcaggggccagagcctctgcccatctccactcaggagtggtgactgaggtttttatgtagaaggggaacaaaaaaaaaaatatctgaattttgaaaaaccacaaagctacaaactgaccctcttttttttttgagacggagttttgctcttgttacccaggctggagtgcagtggcgtgatcttggctcactgcaacttccgtctcccgggttcaagtgattctcctgcctcagcctcccaagtagctgggtttataggtgcccgccaccagacccggctaattttttagttttagtagagacggggtttcaccacgttggccaggctggtcttaaatgaccctcttatttttaacttggatacctgctattctgccaaaagacaatttctagagtagttttgaatgggttgatttcccccactcccacaaactctgaagccagtgtctagcttactaaaaaaagagttgtatataatatttaagatgctgagtatttcataggaaagctgaatgctgctgtaaagtgctctttaagtcttttttttttttaatccccttctaatgaatgaaactaggggaatttcaggggacagagatgggatttgttgtatgataaactgtatgtagtttttagtctttctgttttgagaagcagtggttggggcatttttaagatggctggctactcttg

SEQ ID NO: 343877 - DNA, 1555 bp, Artificial Sequence
  derived and/or modified sequence
gttgttccggcgcaggtgagggaggtggcggcgagcgacgcggttcacctcccgctgccctcgccctcgccccggcgagcggcccccgcaggaactttcctcccgacgcgagatgtcttatttaccaacaaatccaccagggagcattcttacttgctggctcggcgtctctctcggcagtcaccggagtgcccgagggggaagcacgatttacggaagactattgcccagaagaaaagatgtttggttttcacaagccaaagatgtaccgaagtatagagggctgctgtatttgcagagctaagtcctccagttctcgattcactgacagtaaacgctatgaaaaggacttccagagctgttttggattgcatgagactcgttcaggagacatctgcaatgcctgtgtcctgcttgtgaaaagatggaagaagttgccagcaggatcaaaaaaaaactggaatcatgtggtagatgcaagggctggacccagtctaaagactacattgaaaccaaagaaagtgaaaactctatctgggaacaggataaaaagcaaccagatcagtaaactgcagaaggaatttaaacgtcataattctgatgctcacagtaccacctcaagtgcctccccagctcaatctccttgttacagtaaccagtcagatgacggctcagatacagagatggcttctggttctaacagaacaccagttttttcctttttagatctcacttactggaaaagacagaagatatgttgtgggatcatctataaaggccgttttggggaagtcctcattgacacacatctcttcaagccttgctgcagcaataagaaagcagctgctgagaagccagaggagcaggggccagagcctctgcccatctccactcaggagtggtgactgaggtttttatgtagaaggggaacaaaaaaaaaaatatctgaattttgaaaaaccacaaagctacaaactgaccctcttttttttttgagacggagttttgctcttgttacccaggctggagtgcagtggcgtgatcttggctcactgcaacttccgtctcccgggttcaagtgattctcctgcctcagcctcccaagtagctgggtttataggtgcccgccaccagacccggctaattttttagttttagtagagacggggtttcaccacgttggccaggctggtcttaaatgaccctcttatttttaacttggatacctgctattctgccaaaagacaatttctagagtagttttgaatgggttgatttcccccactcccacaaactctgaagccagtgtctagcttactaaaaaaagagttgtatataatatttaagatgctgagtatttcataggaaagctgaatgctgctgtaaagtgctctttaagtcttttttttttttaatccccttctaatgaatgaaactaggggaatttcaggggacagagatgggatttgttgtatgataaactgtatgtagtttttagtctttctgttttgagaagcagtggttggggcatttttaagatggctggctactcttg

SEQ ID NO: 343878 - DNA, 459 bp, Artificial Sequence
  derived and/or modified sequence
attcccaagaccaccagttactggaattatttctggactattgcccagaagaaaagatgtttggttttcacaagccaaagatgtaccgaagtatagagggctgctgtatttgcagagctaagtcctccagttctcgattcactgacagtaaacgctatgaaaaggacttccagagctgttttggattgcatgagactcgttcaggagacatctgcaatgcctgtgtcctgcttgtgaaaagatggaagaagttgccagcaggatcaaaaaaaaactggaatcatgtggtagatgcaagggctggacccagtctaaagactacattgaaaccaaagaaagtgaaaactctatctgggaacaggataaaaagcaaccagatcagtaaactgcagaaggaatttaaacgtcataattctgatgctcacagtaccacctcaagtgcctccccagctcaatctc

SEQ ID NO: 343879 - DNA, 669 bp, Artificial Sequence
  derived and/or modified sequence
cgccattcgctcggaaactaagttgccatccgcttccgagctggcggccgagggtctttaaatcggcctttgggggtcagtgctgggctctgccggagcgcacgcggcgtggcgttgtttgctcaactccggagggatgcggatgcgacaatgagagcaacacgcggtcgcttaaaaacagcccgtcttccactcgcctgccctcttcggaccgcgcccaagagcctctggtgtccggggtgctttcggagcccgaagttttgctcccgactattgcccagaagaaaagatgtttggttttcacaagccaaagatgtaccgaagtatagagggctgctgtatttgcagagctaagtcctccagttctcgattcactgacagtaaacgctatgaaaaggacttccagagctgttttggattgcatgagactcgttcaggagacatctgcaatgcctgtgtcctgcttgtgaaaagatggaagaagttgccagcaggatcaaaaaaaaactggaatcatgtggtagatgcaagggctggacccagtctaaagactacattgaaaccaaagaaagtgaaaactctatctgggaacaggataaaaagcaaccagatcagtaaactgcagaaggaatttaaacgtcataattctgatgctcacagtaccacctc

SEQ ID NO: 343880 - DNA, 789 bp, Artificial Sequence
  derived and/or modified sequence
atgagctacctgcccaccaaccccccaggcagcatcctggccggcagcgccagcctgtctgctgtgactggagtgcctgagggggaggcccgcttcacagaggactactgcccagaggagaagatgtttggcttccacaagcccaagatgtaccgcagcattgagggctgctgcatctgccgggccaagagcagcagcagccgcttcacagacagcaagagatatgagaaggacttccagagctgcttcggcctgcacgagaccaggtctggggacatctgcaatgcctgtgtgctgctggtgaagcgctggaagaagctgcctgctggcagcaagaagaactggaaccacgtggtggatgcccgggccggccccagcctgaagaccaccctgaagcccaagaaggtgaagaccctgagcggcaaccgcatcaagagcaaccagatcagcaagctgcagaaggagttcaagaggcacaacagtgatgcccacagcaccaccagcagcgccagccctgcccagagcccctgctacagcaaccagagtgatgatggcagtgacacagagatggccagcggcagcaacagaacacctgtgttctccttcctggacctgacctactggaagaggcagaagatctgctgcggcatcatctacaagggccgctttggagaggtgctgattgacacccacctgttcaagccctgctgcagcaacaagaaggctgctgctgagaagccagaggagcagggccctgagcccctgcccatcagcacccaggagtggtag

SEQ ID NO: 343881 - DNA, 789 bp, Artificial Sequence
  derived and/or modified sequence
atgagctacctgcccaccaacccccccggcagcatcctggccggctcagcctctctgagcgccgttacaggagttccggaaggggaggcaagattcacagaagactattgccctgaggaaaagatgttcggcttccataaacctaagatgtatcgctccattgaggggtgctgtatctgccgagccaaatcttcttcatcccgattcaccgatagtaaacggtatgagaaagacttccaatcatgcttcggcctacatgagaccaggtccggcgacatttgtaatgcctgcgtcctgctcgtgaagaggtggaagaaacttcctgccggaagcaaaaaaaactggaaccacgtggtggacgcccgcgctggaccctccctcaagacaacccttaaaccgaagaaggtgaaaactctctcaggaaacagaataaagtcaaatcagatctctaaacttcagaaagagttcaagagacataacagtgacgcacacagcacgacatcctccgccagccccgctcagtctccctgttactcaaatcagagcgacgatggctccgatactgaaatggcgagtggctcgaacagaactccagtattctcttttctggatttaacatactggaagcggcaaaaaatttgttgcggcatcatttataaagggagattcggtgaagtcctgatcgatacccacctgtttaagccttgttgctctaataagaaagctgctgctgaaaaacccgaggaacaggggcctgaacctctgcctatctcaacacaggaatggtag

SEQ ID NO: 343882 - DNA, 789 bp, Artificial Sequence
  derived and/or modified sequence
atgtcatacctcccgacgaacccaccaggctcaatcctcgccggatcggcctccctgtcagctgtaaccggggttcccgagggcgaggccaggttcaccgaagattattgtccagaagagaagatgttcggcttccataagcccaaaatgtaccgaagcatcgaaggatgttgcatatgccgcgctaagtcttcctcctccaggttcaccgactcaaagcgttatgagaaggattttcagagttgtttcggactgcacgaaaccagatctggtgacatatgcaacgcttgtgtactgttggtgaaaagatggaaaaaactccccgctgggtccaagaaaaattggaatcacgtagtggatgcaagggccggacccagcttaaaaactacacttaaacccaaaaaagtcaaaaccctgtctgggaacaggattaaatcaaatcaaatttctaagctgcaaaaggaatttaagcggcacaattccgatgcccacagcacaacttccagcgcctctcctgcccagtccccctgttatagcaatcagtccgatgacggctctgatacagaaatggctagtgggagcaatcgcacccccgtcttctcctttctggacctaacatattggaaaaggcagaaaatttgttgcgggatcatctataagggccgatttggtgaagtgctgatagatacccatctgtttaaaccatgctgttctaacaagaaggccgctgctgaaaagcccgaggagcagggacccgagcccctgccaatatccacgcaggagtggtag

SEQ ID NO: 343883 - protein, 122 aa, Artificial Sequence
  derived and/or modified sequence
MTGRARARARGRARGQETAQLVGSTASQQPGYIQPRPQPPPAEGELFGRGRQRGTAGGTAKSQGLQISAGFQELSLAERGGRRRDFHDLGVNTRQNLDHVKESKTGSSGIIVRLSTNHFRLT

SEQ ID NO: 343884 - DNA, 369 bp, Artificial Sequence
  derived and/or modified sequence
atgaccggccgtgcaagggctcgcgctagaggaagagcaagagggcaagagaccgcgcagctggtgggcagcacagccagccagcagcctggctatattcaaccgcgtccccaacctcctcccgctgaaggtgaactgttcggcagaggacggcagaggggcactgctgggggcaccgccaagtcccagggcttgcagatttcggctggcttccaggaattatcgctggcagaacgggggggcagacggcgggattttcacgacttgggggtgaatactcgccagaatctggatcacgtgaaagagtctaaaacaggaagtagcggcatcattgtgaggctttcgactaaccattttcggctcacttag

SEQ ID NO: 343885 - DNA, 453 bp, Artificial Sequence
  derived and/or modified sequence
atgacagggagggctcgggccagagcgagaggccgggcacggggccaggagactgctcaactggtgggttcgacagctagccagcaacccggatacattcaaccaaggccacagcctccccccgccgaaggcgagctgtttgggagagggcgccagagaggtaccgctggtggaacagccaagtcacagggattgcagatcagcgccggatttcaggaactgtctctggcagagcgggggggtcggcgccgtgattttcacgatctgggcgtcaacaccaggcagaacctggatcatgtgaaagagtccaaaactgggagttccgggattatcgttcggttgagcacaaatcactttcgattgacttctaggccccagtgggctctttatcagtaccatatcgattacaacccactcatggaggcgcgtagacttaggtctgccctgctttag

SEQ ID NO: 343886 - DNA, 519 bp, Artificial Sequence
  derived and/or modified sequence
atgacaggtcgcgctcgggccagagcgcgcggaagagccagagggcaagaaacagctcagctggtgggtagcaccgcttcgcaacagcctggctacattcaacccaggccccagccgcctccagcagaaggtgagttgtttgggaggggccgacagaggggcactgccggcggcactgctaagagccaagggctgcagatctcagccggctttcaggagttgagtttggcagaacgtggcggccggcgcagagattttcacgatctcggtgtcaatactcgccagaatttagatcatgtgaaggaaagcaaaactggttcatcgggtattatcgttcgactgtctactaaccacttcagactgactagtagaccccagtgggctttataccagtaccatatcgattacaacccactaatggaggcgagaaggctgagatctgccctcctgttccagcatgaagatcttataggtaaatgtcacgccttcgatggcaccattctcttcctgcctaaatag

SEQ ID NO: 343887 - DNA, 498 bp, Artificial Sequence
  derived and/or modified sequence
atgactgggagagctcgagctcgagctcgagggcgcgcacggggccaagagaccgcccagctagtcggcagcactgccagccaacagccaggatatattcaaccaagaccccaacctcctcccgccgagggggaactgtttggaagaggcagacaacgcgggacggcaggggggactgcaaaatcccagggccttcagatttcagccggcttccaggagctaagcctggccgaacgcggaggacgcaggcgggacttccacgacctgggcgtgaacaccaggcaaaacttggatcacgtgaaggagagcaagacagggtcttcaggaattatcgtgcgcctgtcaacgaatcattttaggctgacaagcaggccacagtgggctttgtaccagtatcatatcgattataatcccctgatggaggcccgaagacttcgctccgccttgctctttcaacacgaggatctcatcggaaagtgccacgcatttgacggatag

SEQ ID NO: 343888 - DNA, 369 bp, Artificial Sequence
  derived and/or modified sequence
atgacaggccgggcccgggcccgggcccggggccgggcccggggccaggagacagcccagctggtgggcagcacagccagccagcagcccggctacatccagccccggccccagcccccacctgctgagggggagctgtttggccggggccggcagaggggcacagctgggggcacagccaagagccagggcctgcagatctctgctggcttccaggagctgagcctggccgagcggggcggcagaagaagagacttccatgacctgggcgtgaacacccggcagaacctggaccacgtgaaggagagcaagacaggcagcagcggcatcatcgtgcggctgagcaccaaccacttccggctgacctag

SEQ ID NO: 343889 - DNA, 453 bp, Artificial Sequence
  derived and/or modified sequence
atgacaggccgggcccgggcccgggcccggggccgggcccggggccaggagacagcccagctggtgggcagcacagccagccagcagcccggctacatccagccccggccccagcccccacctgctgagggggagctgtttggccggggccggcagaggggcacagctgggggcacagccaagagccagggcctgcagatctctgctggcttccaggagctgagcctggccgagcggggcggcagaagaagagacttccatgacctgggcgtgaacacccggcagaacctggaccacgtgaaggagagcaagacaggcagcagcggcatcatcgtgcggctgagcaccaaccacttccggctgaccagccggccccagtgggccctgtaccagtaccacatcgactacaaccccctgatggaggcccggcggctgcggagcgccctgctgtag

SEQ ID NO: 343890 - DNA, 519 bp, Artificial Sequence
  derived and/or modified sequence
atgacaggccgggcccgggcccgggcccggggccgggcccggggccaggagacagcccagctggtgggcagcacagccagccagcagcccggctacatccagccccggccccagcccccacctgctgagggggagctgtttggccggggccggcagaggggcacagctgggggcacagccaagagccagggcctgcagatctctgctggcttccaggagctgagcctggccgagcggggcggcagaagaagagacttccatgacctgggcgtgaacacccggcagaacctggaccacgtgaaggagagcaagacaggcagcagcggcatcatcgtgcggctgagcaccaaccacttccggctgaccagccggccccagtgggccctgtaccagtaccacatcgactacaaccccctgatggaggcccggcggctgcggagcgccctgctcttccagcacgaggacctgattggaaaatgtcatgcctttgatggcaccatcctcttcctgcccaagtag

SEQ ID NO: 343891 - DNA, 498 bp, Artificial Sequence
  derived and/or modified sequence
atgacaggccgggcccgggcccgggcccggggccgggcccggggccaggagacagcccagctggtgggcagcacagccagccagcagcccggctacatccagccccggccccagcccccacctgctgagggggagctgtttggccggggccggcagaggggcacagctgggggcacagccaagagccagggcctgcagatctctgctggcttccaggagctgagcctggccgagcggggcggcagaagaagagacttccatgacctgggcgtgaacacccggcagaacctggaccacgtgaaggagagcaagacaggcagcagcggcatcatcgtgcggctgagcaccaaccacttccggctgaccagccggccccagtgggccctgtaccagtaccacatcgactacaaccccctgatggaggcccggcggctgcggagcgccctgctcttccagcacgaggacctgattggaaaatgtcatgcctttgatggatag

SEQ ID NO: 343892 - DNA, 369 bp, Artificial Sequence
  derived and/or modified sequence
atgaccggccgggcccgggcccgggcccggggccgggcccggggccaggagaccgcgcagcttgtcgggagcacagcttcccagcagcccggctacattcagccaagaccccaacctccacctgcggaaggcgagctctttgggagaggcagacaacgcgggactgcaggaggtacagctaagagtcagggtctgcagatctctgcggggtttcaggagctgagcctggccgagagggggggacggcgacgggactttcacgatctgggagtgaacactaggcagaacttagaccacgtaaaggaaagcaaaacgggaagttccggcattatcgttcggttgtccaccaatcacttccgtttgacctag

SEQ ID NO: 343893 - DNA, 453 bp, Artificial Sequence
  derived and/or modified sequence
atgaccggccgggcccgggcccgggcccggggccgggcccggggccaggagacagctcagcttgtcggcagcaccgcatctcagcagcctggctatatccagcccagacctcagcctccaccggcagagggtgagctgtttggtcgtgggaggcagcgggggaccgcaggagggactgccaagagccaggggctccagatttctgctgggtttcaggaattatcgctggcggagcgtggaggccggagacgagactttcacgacctaggggtcaacactcgccagaatttggatcacgtgaaggagagcaagaccggctctagtggaatcatagtccgtctttctacaaatcacttccgtctgactagcaggccacagtgggcactgtatcagtaccatatcgactacaatccacttatggaggctcggcgcttgaggtccgccctcttatag

SEQ ID NO: 343894 - DNA, 519 bp, Artificial Sequence
  derived and/or modified sequence
atgaccggccgggcccgggcccgggcccggggccgggcccggggccaggagactgcccagcttgtcggaagcactgcttctcagcagcctggatatattcagcccagaccccagccaccaccagccgagggcgagttatttggacgggggcgccagcggggaactgctggcggaactgccaaaagccagggccttcagatctctgcgggctttcaggagttgtctttggcggaaagaggagggcggaggcgcgatttccacgacctgggcgtgaataccaggcagaatttggaccatgtgaaggagtcaaagacggggagcagcggcataattgtcaggctatcaacgaaccattttcgcttaaccagccggccccaatgggctctttaccagtatcacatcgattataatcccctgatggaagctcgtaggctccgctcagctctgctttttcaacacgaagatctgatcggcaaatgccacgccttcgacggtactatcctctttctccccaaatag

SEQ ID NO: 343895 - DNA, 498 bp, Artificial Sequence
  derived and/or modified sequence
atgaccggccgggcccgggcccgggcccggggccgggcccggggccaggaaaccgctcagctggtcggaagcactgccagccagcagcccggatatatccagccccgccctcagccccctcctgcagagggcgagctgtttgggcggggccgacagcgcggcactgcgggtgggaccgccaaaagccagggcctgcagatcagcgcaggctttcaggaactgtccctagccgaaagaggtggcaggcgaagagacttccatgacttgggagtgaatactcgccagaacctagatcatgtgaaggaatcaaagacgggtagtagcggcatcatagtgagactttccaccaaccattttagactcacaagtaggcctcagtgggctctgtaccaataccatatcgattacaatccactgatggaggcccgtagactgcgttcagccctgcttttccagcacgaggacttgataggcaagtgccatgccttcgatggatag

SEQ ID NO: 343896 - DNA, 467 bp, Artificial Sequence
  derived and/or modified sequence
agcggtccaaggtgcggggccaggctgaggtgctaggtgtgcgggggccgggatgcgggggcggcggctgggggtccgggatgtggagaaatagaaaacaatgactgggagagcccgagccagagccagaggaagggcccgcggtcaggagacagcgcagctggtgggctccactgccagtcagcaacctggttatattcagcctaggcctcagccgccaccagcagagggggaattatttggccgtggacggcagagaggaacagcaggaggaacagccaagtcacaaggactccagatatctgctggatttcaggagttatcgttagcagagagaggaggtcgtcgtagagattttcatgatcttggtgtgaatacaaggcagaacctagaccatgttaaagaatcaaaaacaggttcttcaggcattatagtaaggttaagcactaaccatttccggctgacat

SEQ ID NO: 343897 - DNA, 545 bp, Artificial Sequence
  derived and/or modified sequence
gtgcacggcgtggtcctgagctcagcgccggagggacgttaggtggaagcgtctttggcagagctggtagcgaatcggagagaaatagaaaacaatgactgggagagcccgagccagagccagaggaagggcccgcggtcaggagacagcgcagctggtgggctccactgccagtcagcaacctggttatattcagcctaggcctcagccgccaccagcagagggggaattatttggccgtggacggcagagaggaacagcaggaggaacagccaagtcacaaggactccagatatctgctggatttcaggagttatcgttagcagagagaggaggtcgtcgtagagattttcatgatcttggtgtgaatacaaggcagaacctagaccatgttaaagaatcaaaaacaggttcttcaggcattatagtaaggttaagcactaaccatttccggctgacatcccgtccccagtgggccttatatcagtatcacattgactataacccactgatggaagccagaagactccgttcagctcttcttt

SEQ ID NO: 343898 - DNA, 879 bp, Artificial Sequence
  derived and/or modified sequence
atctccaaatgggaaagaaagaaccagccaccagcatcctaattctttcagcactttctcctcctaagtctgtttataataaataatccaaatgaaaaactaagtcttatattaaaataggttttcccctttggccctactgcagtgcccagtgcaaggtaagcaactgagtttgttgaatgtaggaatgttacattaaaaaaaactgtcattaaagattagaaggatacataataattgcctggggagcttacttttgaaactcaaagaagtttaaagtaacattgtagaaattatcaaatgcgattgcctccattgagtattgtcttcaagattgtttcctctccagaaatagaaaacaatgactgggagagcccgagccagagccagaggaagggcccgcggtcaggagacagcgcagctggtgggctccactgccagtcagcaacctggttatattcagcctaggcctcagccgccaccagcagagggggaattatttggccgtggacggcagagaggaacagcaggaggaacagccaagtcacaaggactccagatatctgctggatttcaggagttatcgttagcagagagaggaggtcgtcgtagagattttcatgatcttggtgtgaatacaaggcagaacctagaccatgttaaagaatcaaaaacaggttcttcaggcattatagtaaggttaagcactaaccatttccggctgacatcccgtccccagtgggccttatatcagtatcacattgactataacccactgatggaagccagaagactccgttcagctcttctttttcaacacgaagatctaattggaaagtgtcatgcttttgatggaacgatattatttttacctaaaag

SEQ ID NO: 343899 - DNA, 571 bp, Artificial Sequence
  derived and/or modified sequence
gtgcaaggaccaggactagggcgagggcagcggtccaaggtgcggggccaggctgaggtgctagaaatagaaaacaatgactgggagagcccgagccagagccagaggaagggcccgcggtcaggagacagcgcagctggtgggctccactgccagtcagcaacctggttatattcagcctaggcctcagccgccaccagcagagggggaattatttggccgtggacggcagagaggaacagcaggaggaacagccaagtcacaaggactccagatatctgctggatttcaggagttatcgttagcagagagaggaggtcgtcgtagagattttcatgatcttggtgtgaatacaaggcagaacctagaccatgttaaagaatcaaaaacaggttcttcaggcattatagtaaggttaagcactaaccatttccggctgacatcccgtccccagtgggccttatatcagtatcacattgactataacccactgatggaagccagaagactccgttcagctcttctttttcaacacgaagatctaattggaaagtgtcatgcttttgatgga

SEQ ID NO: 343900 - DNA, 369 bp, Artificial Sequence
  derived and/or modified sequence
atgacaggcagggccagagcgcgagcaagaggcagggcaagggggcaggaaacagcccaactcgtaggtagtacagcctcgcaacaaccgggttatattcagcctcgaccacagccacctcctgccgagggcgaactattcgggagagggaggcagagagggacagcaggtggaacggcgaagagtcagggtttgcagatttcagcaggctttcaggagctctccctagccgaacgcggaggacgacgccgagattttcacgacctgggggtgaatacccgccagaatctagaccacgtgaaggagtccaagaccgggtcatcaggaatcatagtaaggctcagcaccaaccacttccgcttgacttag

SEQ ID NO: 343901 - DNA, 453 bp, Artificial Sequence
  derived and/or modified sequence
atgaccggtagggccagggctagagcacgtgggagagcacgaggccaggagaccgcgcagttagtgggctcaaccgcttcccagcagcccggatacattcaacctaggccccaaccccctcctgccgaaggagagctgttcggacgaggcagacagcggggtaccgcagggggaacagccaagtctcagggactgcaaatcagcgccggatttcaggagctttccctcgctgagcgtggtgggagaaggcgcgactttcacgaccttggtgttaatacgcgccagaacctggaccatgttaaggaatctaaaaccgggtcatctggcattatcgtcagactgtcgaccaatcacttcaggcttacttccagaccacagtgggccctgtatcagtaccacattgattacaatccactgatggaagcacggcgactgaggagcgcattgctttag

SEQ ID NO: 343902 - DNA, 519 bp, Artificial Sequence
  derived and/or modified sequence
atgactgggagggcccgagccagggcccgaggcagagcaaggggtcaggaaaccgcacagctcgtgggctccacggctagccagcaacctggctacattcagcctagaccgcagcccccacccgcagagggcgaacttttcgggaggggcagacagaggggtactgctgggggtactgccaagtctcaaggcctgcagatctccgccggtttccaggaactgagccttgctgaaaggggcggtcgccgaagggacttccacgatctaggcgtgaatacccgccaaaatctcgaccacgttaaggagagtaaaaccggaagctctgggataatcgtgcgtctctccactaaccactttaggctgactagtcgacctcagtgggcgttgtatcagtaccatatcgactacaatcctctcatggaggcgagaagattaagaagcgcactgcttttccagcacgaggacttgattggcaaatgtcacgcgttcgacggaacgatactcttccttccaaaatag

SEQ ID NO: 343903 - DNA, 498 bp, Artificial Sequence
  derived and/or modified sequence
atgactggcagggccagggcacgagctagagggagagctcggggtcaggaaacagcccagctggtgggttctactgcgtctcaacagcctggctatatccagcccaggcctcaacctcctccagctgagggtgagctgtttggaagagggagacagagaggaaccgccggtggcactgcgaaatcccagggcctgcagatctcagccggatttcaggagctgtcccttgccgagcgcggagggcgtcggcgtgactttcacgatcttggagtgaacacccgtcagaatctggaccacgttaaggaatctaaaactgggagctcgggaattatcgtgagactttcaaccaaccactttaggctgacctctcgtccacaatgggccttgtaccaataccacattgattacaatcccctcatggaggccaggcggctgaggtcagccttactgtttcaacacgaagacctgattggaaagtgtcacgcatttgacggatag

SEQ ID NO: 343904 - DNA, 369 bp, Artificial Sequence
  derived and/or modified sequence
atgaccggcagagccagagccagagccagaggcagagccagaggccaggagaccgcccagctggtgggcagcaccgccagccagcagcccggctacatccagcccagaccccagcccccccccgccgagggcgagctgttcggcagaggcagacagagaggcaccgccggcggcaccgccaagagccagggcctgcagatcagcgccggcttccaggagctgagcctggccgagagaggcggcagaagaagagacttccacgacctgggcgtgaacaccagacagaacctggaccacgtgaaggagagcaagaccggcagcagcggcatcatcgtgagactgagcaccaaccacttcagactgacctag

SEQ ID NO: 343905 - DNA, 453 bp, Artificial Sequence
  derived and/or modified sequence
atgaccggcagagccagagccagagccagaggcagagccagaggccaggagaccgcccagctggtgggcagcaccgccagccagcagcccggctacatccagcccagaccccagcccccccccgccgagggcgagctgttcggcagaggcagacagagaggcaccgccggcggcaccgccaagagccagggcctgcagatcagcgccggcttccaggagctgagcctggccgagagaggcggcagaagaagagacttccacgacctgggcgtgaacaccagacagaacctggaccacgtgaaggagagcaagaccggcagcagcggcatcatcgtgagactgagcaccaaccacttcagactgaccagcagaccccagtgggccctgtaccagtaccacatcgactacaaccccctgatggaggccagaagactgagaagcgccctgctgtag

SEQ ID NO: 343906 - DNA, 519 bp, Artificial Sequence
  derived and/or modified sequence
atgaccggcagagccagagccagagccagaggcagagccagaggccaggagaccgcccagctggtgggcagcaccgccagccagcagcccggctacatccagcccagaccccagcccccccccgccgagggcgagctgttcggcagaggcagacagagaggcaccgccggcggcaccgccaagagccagggcctgcagatcagcgccggcttccaggagctgagcctggccgagagaggcggcagaagaagagacttccacgacctgggcgtgaacaccagacagaacctggaccacgtgaaggagagcaagaccggcagcagcggcatcatcgtgagactgagcaccaaccacttcagactgaccagcagaccccagtgggccctgtaccagtaccacatcgactacaaccccctgatggaggccagaagactgagaagcgccctgctgttccagcacgaggacctgatcggcaagtgccacgccttcgacggcaccatcctgttcctgcccaagtag

SEQ ID NO: 343907 - DNA, 498 bp, Artificial Sequence
  derived and/or modified sequence
atgaccggcagagccagagccagagccagaggcagagccagaggccaggagaccgcccagctggtgggcagcaccgccagccagcagcccggctacatccagcccagaccccagcccccccccgccgagggcgagctgttcggcagaggcagacagagaggcaccgccggcggcaccgccaagagccagggcctgcagatcagcgccggcttccaggagctgagcctggccgagagaggcggcagaagaagagacttccacgacctgggcgtgaacaccagacagaacctggaccacgtgaaggagagcaagaccggcagcagcggcatcatcgtgagactgagcaccaaccacttcagactgaccagcagaccccagtgggccctgtaccagtaccacatcgactacaaccccctgatggaggccagaagactgagaagcgccctgctgttccagcacgaggacctgatcggcaagtgccacgccttcgacggctag

SEQ ID NO: 343908 - protein, 76 aa, Artificial Sequence
  derived and/or modified sequence
LPVNSPMNKGDTEVMKCIVEVISDTLSKPSPMPVSKECFETLRGDERILSILRHQNLLKELQDLALQGAKERTHQQ

SEQ ID NO: 343909 - protein, 30 aa, Artificial Sequence
  derived and/or modified sequence
TLRGDERILSILRHQNLLKELQDLALQGAK

SEQ ID NO: 343910 - protein, 14 aa, Artificial Sequence
  derived and/or modified sequence
RILSILRHQNLLKE

SEQ ID NO: 343911 - protein, 22 aa, Artificial Sequence
  derived and/or modified sequence
YPGPQAKEDSEGPSQGPASREK

SEQ ID NO: 343912 - protein, 457 aa, Artificial Sequence
  derived and/or modified sequence
MRSAAVLALLLCAGQVTALPVNSPMNKGDTEVMKCIVEVISDTLSKPSPMPVSQECFETLRGDERILSILRHQNLLKELQDLALQGAKERAHQQKKHSGFEDELSEVLENQSSQAELKEAVEEPSSKDVMEKREDSKEAEKSGEATDGARPQALPEPMQESKAEGNNQAPGEEEEEEEEATNTHPPASLPSQKYPGPQAEGDSEGLSQGLVDREKGLSAEPGWQAKREEEEEEEEEAEAGEEAVPEEEGPTVVLNPHPSLGYKEIRKGESRSEALAVDGAGKPGAEEAQDPEGKGEQEHSQQKEEEEEMAVVPQGLFRGGKSGELEQEEERLSKEWEDSKRWSKMDQLAKELTAEKRLEGQEEEEDNRDSSMKLSFRARAYGFRGPGPQLRRGWRPSSREDSLEAGLPLQVRGYPEEKKEEEGSANRRPEDQELESLSAIEAELEKVAHQLQALRRG

SEQ ID NO: 343913 - DNA, 303 bp, Artificial Sequence
  derived and/or modified sequence
atgggcaccagcagcatcttcctgtgtgtgctcttcctgtgtggggccctgggcctgaccatgagccctgcccggggccgcctgcgctgctacatctgtggcttcaccaagccctgccaccctgtgcccacagaatgtagagatgatgaggcctgtggcatcagcatcggcaccagcggccgcaccctggtgcagtggcccttcagccggcggctgcccaccagcatccacccagccttccctgtggccccagccagcgcctgcctcttccaccccacagaccagagcgagatcacagaatag

SEQ ID NO: 343914 - DNA, 201 bp, Artificial Sequence
  derived and/or modified sequence
atgggcaccagcagcatcttcctgtgtgtgctcttcctgtgtggggccctgggcctgaccatgagccctgcccggggccgcctgcgctgctacatctgtggcttcaccaagccctgccaccctgtgcccacagaatgtagagatgatgaggcctgtggcatcagcatcggcaccagtgaccagagcgagatcacagaatag

SEQ ID NO: 343915 - DNA, 1374 bp, Artificial Sequence
  derived and/or modified sequence
atgcggtcagccgccgttctggccctgcttctctgtgctgggcaagtcacagccctgcccgtgaactcacctatgaataagggcgacacggaagttatgaagtgcatcgtggaggtaatcagtgataccttatccaaaccttctcctatgcccgtgagccaggaatgcttcgagaccctccgcggcgacgagaggatcctcagtatcctgcggcaccagaatctcttaaaggagctccaggacctggccctgcaaggcgccaaggaaagggcgcaccagcagaaaaagcactctggtttcgaagacgaactctctgaagtactggagaaccaatcctcgcaggctgagctgaaagaagccgtcgaggagcctagtagtaaggacgttatggaaaagagggaggacagcaaagaagcagagaagtccggagaagctacagatggggccaggccccaggctttgcccgagcctatgcaggaatcaaaggcagaaggcaacaaccaagctcccggagaggaagaggaggaggaagaggaggctacaaacacacacccacctgctagccttccaagccagaagtatcccggaccacaagccgaaggagacagcgagggtctctcacagggactcgtagaccgcgaaaagggattgtctgccgagccgggctggcaggctaagcgggaggaggaagaagaggaggaagaggaagctgaggctggagaggaggccgtgccagaagaagagggccctactgtggtattaaacccacacccatccctggggtataaagaaatccgcaagggggaatctcgatctgaggcactagccgtggatggcgccgggaagcctggggctgaggaggctcaggacccagagggcaagggcgagcaagaacacagtcagcagaaagaggaggaagaggagatggccgtcgtgcctcaaggcctgtttcggggaggcaagagcggcgagcttgaacaagaagaggagcgtctatcgaaggagtgggaggatagcaaaaggtggtctaaaatggaccagctggccaaagagttgaccgctgagaaacgacttgaggggcaggaggaagaggaagacaaccgagactccagcatgaagctgtcattccgagcccgcgcttatggatttagagggccaggacctcaactgcgccgcgggtggaggcccagcagccgggaggacagtctcgaggctgggttgcctcttcaggtgaggggatacccggaagagaagaaagaggaggaaggttctgcaaacaggagacctgaagatcaggagttggagagcctaagtgcgatagaggccgaattggagaaagtcgcacatcagctgcaagccttacgtagaggctag

SEQ ID NO: 343916 - DNA, 1374 bp, Artificial Sequence
  derived and/or modified sequence
atgaggtctgctgctgtgctggccctgctgctgtgtgccggccaggtgacagccctgcctgtgaacagccccatgaacaagggggacacagaggtgatgaagtgcatcgtggaggtgatcagtgacaccctgagcaagcccagccccatgcctgtgtcccaggagtgctttgagaccctgcggggagatgagcgcatcctgagcatcctgcggcaccagaacctgctgaaggagctgcaggacctggccctgcagggcgccaaggagcgggcccaccagcagaagaagcacagcggctttgaagatgagctgtctgaggtgctggagaaccagagcagccaggccgagctgaaggaggccgtggaggagcccagcagcaaggatgtgatggagaagcgggaggacagcaaggaggccgagaagagcggggaggccacagatggagcccggccccaggccctgcctgagcccatgcaggagagcaaggccgagggcaacaaccaggcccctggagaggaggaggaggaggaggaggaggccaccaacacccaccccccagccagcctgcccagccagaagtacccaggcccccaggccgagggggacagcgagggcctgagccagggcctggtggaccgggagaagggcctgtctgctgagcccggctggcaggccaagcgggaggaggaggaggaggaggaggaggaggccgaggccggggaggaggccgtgcctgaggaggagggccccaccgtggtgctgaacccccaccccagcctgggctacaaggagatcagaaaaggagagagccgctctgaggccctggccgtggatggagctgggaagccaggagctgaggaggcccaggaccctgagggcaagggggagcaggagcacagccagcagaaggaggaggaggaggagatggctgtggtgccccagggcctcttccggggcggcaagagcggggagctggagcaggaggaggagcggctgagcaaggagtgggaggacagcaagcgctggagcaagatggaccagctggccaaggagctgacagctgagaagaggctggagggccaggaggaggaggaggacaacagagacagctccatgaagctgtccttccgggcccgggcctacggcttccggggccctggcccccagctgcggcggggctggaggcccagcagccgggaggacagcctggaggccggcctgcccctgcaggtgcggggctacccagaggagaagaaggaggaggagggcagcgccaacagaagacctgaggaccaggagctggagagcctgagcgccatcgaggccgagctggagaaggtggcccaccagctgcaggccctgcggcggggctag

SEQ ID NO: 343917 - DNA, 1374 bp, Artificial Sequence
  derived and/or modified sequence
atgcggagcgccgccgtgctggccctgctgctgtgcgccggccaggtcacagctcttcctgtaaatagtccaatgaataagggcgacactgaggtcatgaagtgcatagtcgaggtaatttctgacactctcagcaagccttcccccatgccagtctctcaggaatgtttcgagacactgcggggcgacgagcggatcctgtccattctgaggcaccaaaacttgctgaaggagttacaggacctggccctgcagggtgctaaagagcgggctcaccagcaaaagaaacactctggcttcgaagacgaacttagtgaggtactggaaaaccagtcctcacaagccgagctcaaagaggcagtcgaagagccgtcttctaaagacgtgatggagaagcgggaggacagcaaagaggctgagaagtcaggcgaggcgactgatggcgcccgcccgcaggcactcccagagccaatgcaagaaagcaaggccgaagggaataaccaggcccccggtgaggaagaggaggaagaggaggaagccactaatactcatcctccagcttcactgcccagccagaaatatcccggcccccaggccgagggggattccgagggcctgtcgcaggggctggtggaccgagaaaaaggcctatcagcagagcccggctggcaggccaagcgcgaggaggaagaggaagaggaggaggaggccgaggctggggaagaggcggtgcccgaggaagagggtcctaccgtagtcctgaatccccacccctctctcgggtataaggagattcgaaaaggagaatcaaggtccgaagccctcgctgtggatggcgcaggtaaacccggtgcggaggaagctcaggatcccgaagggaagggcgagcaggaacacagtcagcaaaaagaggaagaggaggagatggccgtggtaccccaaggattgttccgcgggggcaaatccggagaactagaacaagaggaggagcgcttatccaaagagtgggaggactctaaaagatggtccaagatggatcagctagcaaaagaactgactgccgagaaacggctagagggacaggaggaagaggaggataacagagacagctcaatgaagctgtcatttagggcgcgtgcctacggattcagggggccaggaccacagctacggcggggctggagaccaagttctcgagaggactcgttagaagcaggccttccattacaagtgcgcgggtatccagaagagaaaaaggaggaagagggaagcgcgaacaggagaccagaggatcaggaacttgaatccttgtccgccatagaggctgagctcgaaaaagttgcccatcagctccaggcactcaggcggggatag

SEQ ID NO: 343918 - DNA, 1374 bp, Artificial Sequence
  derived and/or modified sequence
atgcgatcagccgctgttctggccctgcttctttgtgcaggtcaggttaccgcccttccagtaaattcccctatgaacaaaggcgacactgaggtcatgaaatgcattgtggaagtcatcagcgacaccctcagcaaaccaagcccgatgcctgttagccaggaatgtttcgaaactctgcggggagacgagcgcatcctgagcattctgcggcaccagaacctgttaaaggagcttcaggatctggctttacagggggcaaaagagcgcgctcaccaacaaaaaaagcacagcggctttgaggatgagctcagcgaagttctcgaaaaccagagctcacaggccgagctcaaagaagccgtggaggagccgagtagtaaggatgtgatggaaaaaagagaagactctaaggaggcggaaaagtctggcgaggctacggacggtgccaggcctcaggccctgcccgagccaatgcaggaatctaaagcagagggtaataaccaggctcctggcgaagaagaggaagaggaagaggaggccaccaacacgcatccccctgccagcctcccaagccagaagtaccctggccctcaggccgaaggcgattcagagggcctttcccagggcctcgtagaccgagagaaagggttgagcgcagagcccggatggcaagccaagagggaagaggaagaggaggaggaagaagaggcggaagctggcgaggaggcagtgcctgaagaggaggggcctacggtcgtcctgaatccacacccctcactcggctacaaggagattcgaaagggagaatcaaggagcgaagccctggcagtggatggagcgggtaaacctggtgccgaagaggctcaggatccagaggggaagggagaacaggaacacagtcagcagaaggaagaggaagaggagatggccgtcgtgccccagggcctgtttcgaggagggaagtctggcgagttggaacaggaggaggagcgactttctaaagagtgggaagactccaagagatggagcaaaatggatcagctagccaaggagcttaccgccgaaaaacggctggaaggtcaggaagaagaagaggacaacagagattccagcatgaagctatctttcagggccagagcatatggatttcggggtcctgggcctcagctcagacggggatggagaccctccagcagggaagacagcctggaggcgggactgcccctccaggttagaggctaccccgaagagaaaaaggaagaggaaggcagtgctaaccgtcggcctgaggaccaggagttggagagtctgagtgccatcgaggcagaattggaaaaggtggcccaccagctccaggctttaagaaggggatag

SEQ ID NO: 343919 - DNA, 2063 bp, Artificial Sequence
  derived and/or modified sequence
aagggggcggcaccgctgacgtcatttccggggtcggggtatataagcggggcgcgagggcgctgctgctgccaccgctcctgccactgcagtgctcgagccccgtgcaggggagcttgcgggaggatcgaccgacagacggacgcacgccgaggcactgcgcccccagccccgcgccggtgccaccgcagcccgaccccggccgccagtccagccgcccctcgcccggtgcctaggtgcccggccccacaccgccagctgctcggcgcccgggtccgccatgcgctccgccgctgtcctggctcttctgctctgcgccgggcaagtcactgcgctccctgtgaacagccctatgaataaaggggataccgaggtgatgaaatgcatcgttgaggtcatctccgacacactttccaagcccagccccatgcctgtcagccaggaatgttttgagacactccgaggagatgaacggatcctttccattctgagacatcagaatttactgaaggagctccaagacctcgctctccaaggcgccaaggagagggcacatcagcagaagaaacacagcggttttgaagatgaactctcagaggttcttgagaaccagagcagccaggccgagctgaaagaggcggtggaagagccatcatccaaggatgttatggagaaaagagaggattccaaggaggcagagaaaagtggtgaagccacagacggagccaggccccaggccctcccggagcccatgcaggagtccaaggctgaggggaacaatcaggcccctggggaggaagaggaggaggaggaggaggccaccaacacccaccctccagccagcctccccagccagaaatacccaggcccacaggccgagggggacagtgagggcctctctcagggtctggtggacagagagaagggcctgagtgcagagccagggtggcaggcaaagagagaagaggaggaggaggaggaggaggaggctgaggctggagaggaggctgtccccgaggaagaaggccccactgtagtgctgaacccccacccgagccttggctacaaggagatccggaaaggcgagagtcggtcggaggctctggctgtggatggagctgggaagcctggggctgaggaggctcaggaccccgaagggaagggagaacaggagcactcccagcagaaagaggaggaggaggagatggcagtggtcccgcaaggcctcttccggggtgggaagagcggagagctggagcaggaggaggagcggctctccaaggagtgggaggactccaaacgctggagcaagatggaccagctggccaaggagctgacggctgagaagcggctggaggggcaggaggaggaggaggacaaccgggacagttccatgaagctctccttccgggcccgggcctacggcttcaggggccctgggccgcagctgcgacgaggctggaggccatcctcccgggaggacagccttgaggcgggcctgcccctccaggtccgaggctaccccgaggagaagaaagaggaggagggcagcgcaaaccgcagaccagaggaccaggagctggagagcctgtcggccattgaagcagagctggagaaagtggcccaccagctgcaggcactacggcggggctgagacaccggctggcagggctggccccagggcaccctgtggccctggctctgctgtccccttggcaggtcctggccagatggcccggatgctgcttccggtagggaggcagcctccagcctgcccaagcccaggccaccctatcgccccctacgcgccttgtctcctactcctgactcctacctgccctggaacatcctttgcagggcagccccacaactttaaacattgacgattccttctctgaacacaggcagctttctagaagtttcccttcctccatcctatccactgggcacaactgcaataacttctgaccttttggtgaaagctgagaactcctgactgtaacatattctgtatgaactttatctaaagaaaaataaatctgttctgggctctttcctctgaa

SEQ ID NO: 343920 - DNA, 1374 bp, Artificial Sequence
  derived and/or modified sequence
atgagaagcgccgccgtgctggccctgctgctgtgcgccggccaggtgaccgccctgcccgtgaacagccccatgaacaagggcgacaccgaggtgatgaagtgcatcgtggaggtgatcagcgacaccctgagcaagcccagccccatgcccgtgagccaggagtgcttcgagaccctgagaggcgacgagagaatcctgagcatcctgagacaccagaacctgctgaaggagctgcaggacctggccctgcagggcgccaaggagagagcccaccagcagaagaagcacagcggcttcgaggacgagctgagcgaggtgctggagaaccagagcagccaggccgagctgaaggaggccgtggaggagcccagcagcaaggacgtgatggagaagagagaggacagcaaggaggccgagaagagcggcgaggccaccgacggcgccagaccccaggccctgcccgagcccatgcaggagagcaaggccgagggcaacaaccaggcccccggcgaggaggaggaggaggaggaggaggccaccaacacccacccccccgccagcctgcccagccagaagtaccccggcccccaggccgagggcgacagcgagggcctgagccagggcctggtggacagagagaagggcctgagcgccgagcccggctggcaggccaagagagaggaggaggaggaggaggaggaggaggccgaggccggcgaggaggccgtgcccgaggaggagggccccaccgtggtgctgaacccccaccccagcctgggctacaaggagatcagaaagggcgagagcagaagcgaggccctggccgtggacggcgccggcaagcccggcgccgaggaggcccaggaccccgagggcaagggcgagcaggagcacagccagcagaaggaggaggaggaggagatggccgtggtgccccagggcctgttcagaggcggcaagagcggcgagctggagcaggaggaggagagactgagcaaggagtgggaggacagcaagagatggagcaagatggaccagctggccaaggagctgaccgccgagaagagactggagggccaggaggaggaggaggacaacagagacagcagcatgaagctgagcttcagagccagagcctacggcttcagaggccccggcccccagctgagaagaggctggagacccagcagcagagaggacagcctggaggccggcctgcccctgcaggtgagaggctaccccgaggagaagaaggaggaggagggcagcgccaacagaagacccgaggaccaggagctggagagcctgagcgccatcgaggccgagctggagaaggtggcccaccagctgcaggccctgagaagaggctag

SEQ ID NO: 343921 - protein, 124 aa, Artificial Sequence
  derived and/or modified sequence
MLLRDLVLRRGCCWSSLLLHCALHPLWGFVQVTHGEPQKSCSKVTDSCRHVCQCRPPPPLPPPPPPPPPPRLLSAPAPNSTSCPTEESWWSGLVIIIAVCCASLVFLTVLVIICYKAIKRNHAI

SEQ ID NO: 343922 - protein, 153 aa, Artificial Sequence
  derived and/or modified sequence
MLLRDLVLRRGCCWSSLLLHCALHPLWGFVQVTHGEPQKSCSKVTDSCRHVCQCRPPPPLPPPPPPPPPPRLLSAPAPNSTSCPTEESWWSGLVIIIAVCCASLVFLTVLVIICYKAIKRKPLRKDENGTSVAEYPMSASQSNKGVDVNNAVV

SEQ ID NO: 343923 - DNA, 375 bp, Artificial Sequence
  derived and/or modified sequence
atgcttctgcgcgacctggttctccgccgaggttgctgttggagtagtctattgttgcactgtgccctgcaccctctgtgggggtttgtgcaggttactcatggagaaccccagaaaagttgtagcaaggtcactgactcctgcagacacgtttgtcagtgccggccccctcctcctctgcctcctcccccaccaccccccccacccccacgcttactgtccgctccggcacccaatagcacctcttgcccgaccgaggagagctggtggtcaggactggtgataatcatcgccgtgtgctgcgcttccctggtgttcctcacagtgctggttataatatgctacaaagcaatcaaacggaatcatgcgatctag

SEQ ID NO: 343924 - DNA, 462 bp, Artificial Sequence
  derived and/or modified sequence
atgctactgagagatctcgtcctaagacgcgggtgctgttggtcctctctccttctgcattgcgcgttgcaccccctgtggggatttgtgcaggtgacccatggggagccacaaaaatcttgctccaaagtaactgactcttgccggcatgtgtgccagtgcaggccgccgcctccgctgcctcctccccctccaccacctcctccacctagactgctcagcgctccagctccgaattccacctcttgccccaccgaggaatcgtggtggagcggcctggtgattattattgctgtgtgctgcgcaagcttggtatttctgacagtcttagtgattatttgctataaggcaattaaacgcaaacctttgcgcaaggatgagaatggcacctctgttgccgaataccccatgagcgcatcacagagcaataaaggcgtagatgtcaataatgcagtggtgtag

SEQ ID NO: 343925 - DNA, 462 bp, Artificial Sequence
  derived and/or modified sequence
atgctgctccgcgatctcgtgctgagacgcgggtgctgctggtcttctctgctgctgcactgtgcgcttcaccctctctgggggttcgtgcaggtcacccatggtgaacctcagaaatcatgctccaaagtgacagactcgtgccggcacgtgtgccagtgccgacccccccccccgctcccaccaccacctcctcccccccctcctccgcgtctcctatctgcccccgcccctaacagcacttcatgccccaccgaggagtcctggtggtctgggctcgttataattatcgccgtctgctgtgcctcccttgtttttctgacagtcttggtcatcatttgttataaggctatcaagcgcaagcccctcaggaaagacgagaacggaacctctgtcgccgagtacccaatgtccgctagccagagtaataaaggggtggatgtcaataacgccgtggtgtag

SEQ ID NO: 343926 - DNA, 375 bp, Artificial Sequence
  derived and/or modified sequence
atgctgctgcgggacctggtgctgcggcggggctgctgctggagcagcctgctgctgcactgtgccctgcaccccctgtggggctttgtgcaggtgacccacggggagccccagaagagctgcagcaaggtgacagacagctgccgccacgtgtgccagtgccggcccccaccacccctgcccccacctcctcctcctcctcctccaccccggctgctgagcgccccagcccccaacagcaccagctgccccacagaggagagctggtggagcggcctggtgatcatcatcgctgtgtgctgtgccagcctggtgttcctgactgtgctggtgatcatctgctacaaggccatcaagaggaaccacgccatctag

SEQ ID NO: 343927 - DNA, 462 bp, Artificial Sequence
  derived and/or modified sequence
atgctgctgcgggacctggtgctgcggcggggctgctgctggagcagcctgctgctgcactgtgccctgcaccccctgtggggctttgtgcaggtgacccacggggagccccagaagagctgcagcaaggtgacagacagctgccgccacgtgtgccagtgccggcccccaccacccctgcccccacctcctcctcctcctcctccaccccggctgctgagcgccccagcccccaacagcaccagctgccccacagaggagagctggtggagcggcctggtgatcatcatcgctgtgtgctgtgccagcctggtgttcctgactgtgctggtgatcatctgctacaaggccatcaagaggaagcccctgaggaaggatgaaaatggcacctctgtggccgagtaccccatgtctgccagccagagcaacaagggcgtggatgtgaacaatgctgtggtgtag

SEQ ID NO: 343928 - DNA, 375 bp, Artificial Sequence
  derived and/or modified sequence
atgctgctgcgggacctggtgctgcggcggggctgctgctggagctcactgctcctgcactgcgcactccaccccctttggggatttgtgcaggtcacccacggagaaccacaaaagtcgtgctccaaggtcaccgatagttgtaggcacgtctgtcagtgcagacctcccccaccactgcctcctccccctcctcctccaccacctcctaggcttctgtctgcccccgcgccaaacagtaccagttgtccaaccgaggaaagctggtggtcaggactcgtgataatcattgcagtgtgttgtgcctctctcgtcttcctaacggttctggtgattatttgttataaggccatcaaaagaaatcacgccatatag

SEQ ID NO: 343929 - DNA, 462 bp, Artificial Sequence
  derived and/or modified sequence
atgctgctgcgggacctggtgctgcggcggggctgctgctggagctcacttctactgcactgtgctcttcaccccctttgggggttcgtgcaggtgacacacggagaacctcagaaatcttgctcgaaggtcaccgatagctgtaggcacgtgtgtcagtgtaggccgccaccacctttacctcctcctccacccccacccccaccccctcgcctgctgtccgccccagctccgaattctacttcgtgtccgaccgaagagtcctggtggtcaggcctggttatcattatcgctgtctgctgtgcctctctggtgtttctgacagtgctggtgatcatttgttacaaggcaattaaacggaaacctctgcggaaagatgagaatgggacttccgtcgcggagtatccaatgtccgcctcccagagcaacaagggagtggatgtgaataacgccgtcgtttag

SEQ ID NO: 343930 - DNA, 462 bp, Artificial Sequence
  derived and/or modified sequence
atgctgctgcgggacctggtgctgcggcggggctgctgctggagcagcctgctactgcactgtgcgctgcatcctctgtggggctttgtgcaagtcacccacggcgagccacaaaagtcttgttccaaggtcaccgattcttgccgacacgtgtgtcaatgtcggcctccccccccattgcctcctccaccgccccctccaccgccacccaggctcctttccgctcctgcccctaattctacaagctgccctacagaagagtcctggtggagcggcctagtaattatcatcgcagtctgttgcgcctctctggtgtttctgacagtgctggtgatcatttgctacaaggccattaaacggaaaccccttcgcaaagacgaaaatggtacctccgtggccgagtaccctatgtccgcatctcagtccaacaagggcgtggatgttaataacgccgtagtgtag

SEQ ID NO: 343931 - DNA, 375 bp, Artificial Sequence
  derived and/or modified sequence
atgctccttagagatttagtgctgcggcgaggatgctgctggagcagccttctgttacactgcgccctgcacccactgtggggttttgtgcaggtgactcatggagaaccacagaagagttgctctaaagtgactgacagctgccggcatgtctgtcagtgccggcctcccccaccgctgccaccccctcctccacctccacctcctccccgactactctcagctccagcccctaactccacctcttgccccaccgaggagtcttggtggagcggtttggtcatcattattgccgtgtgttgtgccagcttggttttccttacggttctggtgattatatgctacaaggccataaagcggaatcatgcaatctag

SEQ ID NO: 343932 - DNA, 462 bp, Artificial Sequence
  derived and/or modified sequence
atgcttctcagagaccttgtgttgcgcaggggatgttgctggtcttccttactattacattgtgctctccatccactctggggatttgtgcaggtgactcacggtgagcctcaaaagagttgctctaaggtgacagactcctgtcgccacgtgtgtcagtgccggccaccgcctccgctaccgccacctccaccacccccacctccacctcgcctgctgtctgccccagcccctaattccactagctgtcccacagaggagtcctggtggtcaggccttgtgataatcattgccgtttgttgcgccagtctggtgtttcttactgttctggtgatcatatgttacaaggcaatcaaaaggaaaccgctcagaaaggatgaaaacggaacctctgtggcagagtatccaatgagcgccagtcaaagcaataaaggcgtggatgtgaacaatgccgtcgtatag

SEQ ID NO: 343933 - DNA, 462 bp, Artificial Sequence
  derived and/or modified sequence
atgctgctgagggatctggtactgcgacggggatgttgctggtcaagcctgttgctgcattgcgccctccaccccctgtggggattcgtgcaggtgacacacggggagccgcaaaaatcctgttcaaaagtgaccgactcctgccggcatgtttgccagtgccgaccgccacctccgctgccacctccacctccgcctccaccaccccctcgcctcttaagcgcccctgctccaaacagcacctcctgtcctacagaggagtcctggtggagcggccttgtgatcatcatagcggtgtgttgcgccagtctggtctttctgaccgtgcttgtaatcatctgttataaagctataaagaggaagccgcttaggaaggatgagaatgggaccagcgtcgcagagtatcccatgtctgcaagccaaagcaataagggggttgatgtcaacaatgccgtggtgtag

SEQ ID NO: 343934 - DNA, 1080 bp, Artificial Sequence
  derived and/or modified sequence
ctcctgacagttcgccccaggagcgggcgccgctggccgagatgctcctccgggacttggtgctgcgccgtggctgctgctggtcctcgctgctgctgcactgcgcgctccacccgctctggggcttcgtgcaggtgacgcatggtgagccccagaagtcctgctccaaagtgactgacagctgccgacacgtctgccagtgccggccccctcccccgctgcccccgccgcccccacccccgccacctcccagactcctctccgccccagctcccaactctacctcttgccccactgaggaaagctggtggtcggggctggtgatcatcattgccgtatgctgtgcctccctggtgtttctgactgtgcttgtcatcatttgctacaaagccataaaaaggaaccatgccatctagggagccctctgtggccatctctgcctggaccagggtggaaatgcctcttcttggtttaatgagaccagcctcagctgactcacagagctgcagagccaggctgggtcctaacaactctctctagcatttccggagccccacggggcacgcgttaggaaaccactgagaaaagacgaaaatggcaccagcgttgctgagtatcccatgagtgcttcgcagagcaacaaaggagtagacgtgaacaacgcagtggtgtgagtctgcaggccctggacccgctggccagagggacaccttggtggcactggtggacatgggaaagcaggtggacatgagctaaccctgagcttgtccaggacttcattgcctcacaggccctgagcctcccgaaggagaaaccattgtcttcccaggcttgcccctggtcagcctgcgggcccaggcagctcggacaccaggctgagcccggcgcagcacctgggcagtgtccccaccccaggccctccacatcctcctccctgtctggtgtctggtctgtcgactgcccccagctgctgtctaaagcatgcgcactggcgaagccagagggatctgtctttctactgtggcagggaggcttccccctttagccaaaagaaagatggtccggagcccactccctgcc

SEQ ID NO: 343935 - DNA, 3711 bp, Artificial Sequence
  derived and/or modified sequence
agagctgccgcggggggaacgcggacctcttttccccgagcccagggtcggctggggccgccgccaggcaagttcgccccaggagcgggcgccgctggccgagatgctcctccgggacttggtgctgcgccgtggctgctgctggtcctcgctgctgctgcactgcgcgctccacccgctctggggcttcgtgcaggtgacgcatggtgagccccagaagtcctgctccaaagtgactgacagctgccgacacgtctgccagtgccggccccctcccccgctgcccccgccgcccccacccccgccacctcccagactcctctccgccccagctcccaactctacctcttgccccactgaggaaagctggtggtcggggctggtgatcatcattgccgtatgctgtgcctccctggtgtttctgactgtgcttgtcatcatttgctacaaagccataaaaaggaaaccactgagaaaagacgaaaatggcaccagcgttgctgagtatcccatgagtgcttcgcagagcaacaaaggagtagacgtgaacaacgcagtggtgtgagtctgcaggccctggacccgctggccagagggacaccttggtggcactggtggacatgggaaagcaggtggacatgagctaaccctgagcttgtccaggacttcattgcctcacaggccctgagcctcccgaaggagaaaccattgtcttcccaggcttgcccctggtcagcctgcgggcccaggcagctcggacaccaggctgagcccggcgcagcacctgggcagtgtccccaccccaggccctccacatcctcctccctgtctggtgtctggtctgtcgactgcccccagctgctgtctaaagcatgcgcactggcgaagccagagggatctgtctttctactgtggcagggaggcttccccctttagccaaaagaaagatggtccggagcccactccctgccggaaaacctctcctcctcccaggaagcctgcctgctccactgttcacattctcaacagaagccatcggcacagccagcagacagacgtcccctttcaaaggtgcttcccacacatctgttcatcgccccatctgcagttgttgtcaatcttcagggcctgccttctccctcctatccccactgacaccctacaccctaggctcctgactgcctgccatggagggctgtgagtccagcctgcagaatcccctcctgagcagacacaggagtgcgtttacactcgggggcagtgtctggccttccgggggcaaaacgactcactgaacccgcagcccagggccactgggcaagggcagaggccactgcacctgtcctcagactcatccccacacttgaccccataggaactgatgcatctgtgtgagccaggccctgccttagtcagcagaggccactacttgtgccaaatccactgtgggcctgctgtaccaggctgatgctggccaggcgctggatgtcccccacagtcccctgaggcctgactgttgtactcaggccctctcccagagtcctccatcatctccccattttaccctaccccgagccccagtcgccaagaaggaggtgttgttcttccagggtcttcctttcaatgtctgtttccacagtctcatgctatagaagcgctgagccctccagcgtggttggaggatcaagggatgaaatgggacaggaggagaggggtcctccaggctggtgacccctgccctgttggcctgtctcccaagtggcagccttccctgtgggccacatcaggaaacccacggagacagggtgattttgcatctcctggaaaatgagtgggacactcctggccccctggctctccccaccacccctacatatgtgctcagaaggagcccaatgcattgaatggttccactgtcgagccctctaagacctggtttgcctcctaaacctccagtgtgctcctctgataggtgtttaagctacaggtgagactttgaagtccagagaagacagacacacctgaaaaccggtccccatttgggccgaaccttaaaaagcccattgtcccagagtcctagtgcccacggagctgtctgtgtgtcattgtcctgcccaggtcatcaggtgtgggctgaggacaggcccagggcataccctcccataaaggggttttcttctttcctcatttccttctatttgaggacttgtttggggtttagatttgaattttgcttcccctggacacctgggcatcagcatagtgccaccccctgctcctgacctggccagtacttcacagtgctcttgaggtgcggagccagctgacaaataggccagagggtgtgggccagcagcaggttaaagggggaaacccagcagaccccaccccagggcactctcccctactgccttcagccttctggtgcctgttgaacccccaagctgtgccctaagcagacccctgggcaggaccctagccctaagcacacaccaccctgtgctgcaaccatgagaaagtgcccatgccttgggctgtccagaagctcaggagtgatcagagggcaccttctctaagaggggaggttcctggctaagggaccatggagtggtgggcagcctgaaggggctgggcacagcccagctttgcgcacactcgcctggtcccatcattccctaccttggcttaaacctaggaggcctggattttgcagttagcctaatcttccagccccaggcgaggctccctggtgaggaatcagctgagccatcaccacgttttggggcctgtatcctcttccctgagccgctgacgcatccagggctctagtctgcacataaattccctctcagctgggcttgtaaaatcccttctcaccccagttagcaaaaatcaagggaagagcctagtttttttaaaagattcacttaatatccaccccccacctcaagcccaagaccgcccattcaaaaaacaagtatacggcacagcaagggagacccactagattttgagcttacagagacataagggtacttaaaaccctgccggcctagtatttgagcttagaacttttatttaaaatgagccggcagtctctagacacacaccgatcctcaggctagtccgagccctgaggtcaagaatgaaatgcacttcccttctcattttctcaaatagatcttttccagccgtctcacagttgaccccaactttggaactcagatcataggatctcccagaggtttcaggtgttcctaagaagcttctaaaggaagttttggaagaaagactaataggtgtaaacatataaacatatatattatatatagctatatatatttaaagagatctctacatatatatatatatataaatacaactactgtactctctgcatctgtacaaagtatgagttaaactgcccaggtagtgtgagatacgtaatgcatgaatgtgaatatcctgaaatctgccttcttagcaacgtgccgcgtgtactggagagaggacagttgctcctgggagttctctcaatgggcaaatgtacaagttgatgccgtcttatccaccaacaagccattaaggttggtttcctgctgagacttttgtaccggaagcgagaccggcagcactgggggtgtccatatgccacttatgaggaagaaagcaccatgacttttttattttcaataaaaatatagagatgtc

SEQ ID NO: 343936 - DNA, 3649 bp, Artificial Sequence
  derived and/or modified sequence
ctcctgacagttcgccccaggagcgggcgccgctggccgagatgctcctccgggacttggtgctgcgccgtggctgctgctggtcctcgctgctgctgcactgcgcgctccacccgctctggggcttcgtgcaggtgacgcatggtgagccccagaagtcctgctccaaagtgactgacagctgccgacacgtctgccagtgccggccccctcccccgctgcccccgccgcccccacccccgccacctcccagactcctctccgccccagctcccaactctacctcttgccccactgaggaaagctggtggtcggggctggtgatcatcattgccgtatgctgtgcctccctggtgtttctgactgtgcttgtcatcatttgctacaaagccataaaaaggaaaccactgagaaaagacgaaaatggcaccagcgttgctgagtatcccatgagtgcttcgcagagcaacaaaggagtagacgtgaacaacgcagtggtgtgagtctgcaggccctggacccgctggccagagggacaccttggtggcactggtggacatgggaaagcaggtggacatgagctaaccctgagcttgtccaggacttcattgcctcacaggccctgagcctcccgaaggagaaaccattgtcttcccaggcttgcccctggtcagcctgcgggcccaggcagctcggacaccaggctgagcccggcgcagcacctgggcagtgtccccaccccaggccctccacatcctcctccctgtctggtgtctggtctgtcgactgcccccagctgctgtctaaagcatgcgcactggcgaagccagagggatctgtctttctactgtggcagggaggcttccccctttagccaaaagaaagatggtccggagcccactccctgccggaaaacctctcctcctcccaggaagcctgcctgctccactgttcacattctcaacagaagccatcggcacagccagcagacagacgtcccctttcaaaggtgcttcccacacatctgttcatcgccccatctgcagttgttgtcaatcttcagggcctgccttctccctcctatccccactgacaccctacaccctaggctcctgactgcctgccatggagggctgtgagtccagcctgcagaatcccctcctgagcagacacaggagtgcgtttacactcgggggcagtgtctggccttccgggggcaaaacgactcactgaacccgcagcccagggccactgggcaagggcagaggccactgcacctgtcctcagactcatccccacacttgaccccataggaactgatgcatctgtgtgagccaggccctgccttagtcagcagaggccactacttgtgccaaatccactgtgggcctgctgtaccaggctgatgctggccaggcgctggatgtcccccacagtcccctgaggcctgactgttgtactcaggccctctcccagagtcctccatcatctccccattttaccctaccccgagccccagtcgccaagaaggaggtgttgttcttccagggtcttcctttcaatgtctgtttccacagtctcatgctatagaagcgctgagccctccagcgtggttggaggatcaagggatgaaatgggacaggaggagaggggtcctccaggctggtgacccctgccctgttggcctgtctcccaagtggcagccttccctgtgggccacatcaggaaacccacggagacagggtgattttgcatctcctggaaaatgagtgggacactcctggccccctggctctccccaccacccctacatatgtgctcagaaggagcccaatgcattgaatggttccactgtcgagccctctaagacctggtttgcctcctaaacctccagtgtgctcctctgataggtgtttaagctacaggtgagactttgaagtccagagaagacagacacacctgaaaaccggtccccatttgggccgaaccttaaaaagcccattgtcccagagtcctagtgcccacggagctgtctgtgtgtcattgtcctgcccaggtcatcaggtgtgggctgaggacaggcccagggcataccctcccataaaggggttttcttctttcctcatttccttctatttgaggacttgtttggggtttagatttgaattttgcttcccctggacacctgggcatcagcatagtgccaccccctgctcctgacctggccagtacttcacagtgctcttgaggtgcggagccagctgacaaataggccagagggtgtgggccagcagcaggttaaagggggaaacccagcagaccccaccccagggcactctcccctactgccttcagccttctggtgcctgttgaacccccaagctgtgccctaagcagacccctgggcaggaccctagccctaagcacacaccaccctgtgctgcaaccatgagaaagtgcccatgccttgggctgtccagaagctcaggagtgatcagagggcaccttctctaagaggggaggttcctggctaagggaccatggagtggtgggcagcctgaaggggctgggcacagcccagctttgcgcacactcgcctggtcccatcattccctaccttggcttaaacctaggaggcctggattttgcagttagcctaatcttccagccccaggcgaggctccctggtgaggaatcagctgagccatcaccacgttttggggcctgtatcctcttccctgagccgctgacgcatccagggctctagtctgcacataaattccctctcagctgggcttgtaaaatcccttctcaccccagttagcaaaaatcaagggaagagcctagtttttttaaaagattcacttaatatccaccccccacctcaagcccaagaccgcccattcaaaaaacaagtatacggcacagcaagggagacccactagattttgagcttacagagacataagggtacttaaaaccctgccggcctagtatttgagcttagaacttttatttaaaatgagccggcagtctctagacacacaccgatcctcaggctagtccgagccctgaggtcaagaatgaaatgcacttcccttctcattttctcaaatagatcttttccagccgtctcacagttgaccccaactttggaactcagatcataggatctcccagaggtttcaggtgttcctaagaagcttctaaaggaagttttggaagaaagactaataggtgtaaacatataaacatatatattatatatagctatatatatttaaagagatctctacatatatatatatatataaatacaactactgtactctctgcatctgtacaaagtatgagttaaactgcccaggtagtgtgagatacgtaatgcatgaatgtgaatatcctgaaatctgccttcttagcaacgtgccgcgtgtactggagagaggacagttgctcctgggagttctctcaatgggcaaatgtacaagttgatgccgtcttatccaccaacaagccattaaggttggtttcctgctgagacttttgtaccggaagcgagaccggcagcactgggggtgtccatatgccacttatgaggaagaaagcaccatgacttttttattttcaataaaaatatagagatgtc

SEQ ID NO: 343937 - DNA, 375 bp, Artificial Sequence
  derived and/or modified sequence
atgctgctgagagacctggtgctgagaagaggctgctgctggagcagcctgctgctgcactgcgccctgcaccccctgtggggcttcgtgcaggtgacccacggcgagccccagaagagctgcagcaaggtgaccgacagctgcagacacgtgtgccagtgcagaccccccccccccctgccccccccccccccccccccccccccccccagactgctgagcgcccccgcccccaacagcaccagctgccccaccgaggagagctggtggagcggcctggtgatcatcatcgccgtgtgctgcgccagcctggtgttcctgaccgtgctggtgatcatctgctacaaggccatcaagagaaaccacgccatctag

SEQ ID NO: 343938 - DNA, 462 bp, Artificial Sequence
  derived and/or modified sequence
atgctgctgagagacctggtgctgagaagaggctgctgctggagcagcctgctgctgcactgcgccctgcaccccctgtggggcttcgtgcaggtgacccacggcgagccccagaagagctgcagcaaggtgaccgacagctgcagacacgtgtgccagtgcagaccccccccccccctgccccccccccccccccccccccccccccccagactgctgagcgcccccgcccccaacagcaccagctgccccaccgaggagagctggtggagcggcctggtgatcatcatcgccgtgtgctgcgccagcctggtgttcctgaccgtgctggtgatcatctgctacaaggccatcaagagaaagcccctgagaaaggacgagaacggcaccagcgtggccgagtaccccatgagcgccagccagagcaacaagggcgtggacgtgaacaacgccgtggtgtag

SEQ ID NO: 343939 - DNA, 1470 bp, Artificial Sequence
  derived and/or modified sequence
atgcggccagccgacccactcattaaagcgattaaggacggggatgaggaagctctgaagacaatgattaaggaggggaagaatcttgcggagcctaacaaggaggggtggcttccgctacacgaggccgcttattacgggcaggtgggctgcctgaaggttttgcagcgcgcgtaccctggcacaatcgaccaaagaaccctgcaagaggagaccgcagtatatttggcaacttgtcgcggtcacctggactgtctactgagcttgctgcaggcaggcgccgaaccggacatctccaataagtctcgggagactcccctttataaagcctgtgaaaggaagaatgccgaggcagtgaaaattctggtgcaacacaatgccgatactaaccatcgctgtaaccgggggtggacagccttgcatgagtctgtctctcggaatgacctcgaagtgatgcaaattttagtatccggaggagccaaagtcgagtctaagaatgcttatggtatcacgcccctcttcgtggcagctcagtcaggccagctggaagctctacgcttcctagcaaaatatggagcagacataaatacacaggcttcagataatgcttccgccctttatgaagcttgcaaaaatgagcacgaggaggtggtcgaatttctgttgtcccagggagctgacgcaaataaaactaacaaggacgggctgttgccactgcatatcgccagcaaaaagggaaattatcgcatcgtccagatgctcttgcctgtgacttcacgcaccaggatccggcgctctggagtctctcctctacatttggctgccgagcggaatcatgacgaggtcctggaagccctgcttagtgcgcgctttgacgtgaatacaccgctggcccctgagcgagccagactgtatgaggatagacgctcgtctgccctgtatttcgctgtggtaaacaataacgtttatgctactgagctgttgctgcagcacggcgcagaccccaaccgggacgtcataagcccactgttggtcgccatcagacacggatgcctaagaaccatgcaactgctgctggaccatggcgcaaacattgacgcctatatcgcaacacatcccacggcattccctgccaccattatgttcgccatgaaatgtctgtccctcttaaaatttctaatggatctcggttgtgacggcgagccctgcttctcttgtctgtatgggaatggcccccaccctccagctccgcagccttcttcaagatttaatgacgctcctgctgccgataaggaaccttctgtcgttcagttctgtgaatttgtgtcagctcctgaggtgagcaggtgggcaggcccaataatcgacgtactccttgactatgtcggcaacgtgcagttatgttctcgccttaaagagcatattgactcctttgaggactgggttctggagggtttcgtcaagtattag

SEQ ID NO: 343940 - DNA, 1470 bp, Artificial Sequence
  derived and/or modified sequence
atgaggcctgctgaccccctcatcaaggccatcaaggatggagatgaggaggccctgaagaccatgatcaaggagggcaagaacctggccgagcccaacaaggagggctggctgcccctgcatgaagctgcctactacggccaggtgggctgcctgaaggtgctgcagagggcctacccaggcaccatcgaccagaggaccctgcaggaggagacagctgtgtacctggccacctgccggggccacctggactgcctgctgagcctgctgcaggccggggctgagccagacatcagcaacaagagccgggagacccccctgtacaaggcctgtgagaggaagaatgctgaggccgtgaagatcctggtgcagcacaatgctgacaccaaccaccgctgcaacagaggctggacagccctgcatgaatctgtgtccagaaatgacctggaggtgatgcagatcctggtgtctggaggagccaaggtggagagcaagaatgcctacggcatcacccccctgtttgtggccgcccagagcggccagctggaggccctgcgcttcctggccaagtatggagctgacatcaacacccaggccagtgacaatgccagcgccctgtatgaggcctgcaagaatgagcacgaggaggtggtggagttcctgctgagccagggcgcagatgccaacaagaccaacaaggatggcctgctgcccctgcacatcgccagcaagaagggcaactaccgcatcgtgcagatgctgctgcctgtgaccagcaggacccgcatccgccgcagcggcgtgagccccctgcacctggccgctgagagaaatcatgatgaggtgctggaggccctgctgagcgccaggtttgatgtgaacacccccctggcccctgagcgggcccggctgtatgaggaccggcgcagcagcgccctgtactttgctgtggtgaacaacaacgtgtatgccacagagctgctgctgcagcacggggctgaccccaacagagatgtgatcagccccctgctggtggccatcagacatggctgcctgcggaccatgcagctgctgctggaccatggagccaacattgatgcctacatcgccacccaccccacagccttccctgccaccatcatgtttgccatgaagtgcctgagcctgctgaagttcctgatggacctgggctgtgatggagagccctgcttcagctgcctgtatggaaatggcccccaccccccagccccccagcccagcagccgcttcaatgatgccccagctgctgacaaggagcccagcgtggtgcagttctgtgaatttgtgtctgcccctgaggtgagccgctgggccggccccatcattgatgtgctgctggactatgtgggcaatgtgcagctgtgcagccggctgaaggagcacatcgacagctttgaggactgggtgctggagggctttgtgaagtactag

SEQ ID NO: 343941 - DNA, 1470 bp, Artificial Sequence
  derived and/or modified sequence
atgcggcccgccgaccccctgatcaaggccatcaaggacggcgacgaggaggctctcaagaccatgattaaggaggggaagaacctggctgagcccaacaaggaaggctggctgccacttcacgaggccgcctactacgggcaggtgggctgtcttaaagtgctccaacgtgcttaccctgggaccatcgaccaacggactttacaagaggaaaccgcagtttacttggccacgtgtcgtgggcacctggattgtcttctatccctactgcaggctggcgctgaacccgacatatctaataaatcaagggagacccccctatacaaggcttgcgaacgtaaaaatgccgaggctgttaaaatcctggtccagcacaatgccgataccaatcacaggtgtaacagggggtggacagctttacatgaaagtgtgagtcggaacgacctggaggttatgcaaatactcgtctccgggggcgcaaaggtggagtcaaagaacgcgtacggaataaccccgctgtttgtggccgcccagtccggacagcttgaagcgctgcgctttctggctaaatatggcgctgacatcaatactcaggccagtgataacgccagcgcactatacgaggcctgtaagaacgaacacgaagaagtcgtagagtttctactgtcccaaggtgccgacgccaacaaaacaaataaagacgggctgctgcctctgcacattgccagcaagaagggcaactaccgaatagtgcagatgctgctgccagtcacttcccgaacccggattcgaaggtccggagtgtcccccctgcacctggcggcggaaaggaaccatgacgaagtcctcgaagcactcctctctgcacgcttcgacgttaacacaccactcgctccggagagggcaaggctgtacgaagacaggagatcctccgccttgtatttcgcagttgttaataataacgtttatgccactgaactgctgcttcaacatggcgcagatcccaacagggacgtcataagcccactgctggtggctatacggcacggatgcctccgaacaatgcagctgctgctggaccatggtgcgaacatcgacgcctatatcgccacacaccccacggcctttcctgctacaataatgttcgccatgaaatgcctctccctgctgaagttcctaatggatcttggttgtgacggtgagccttgcttctcctgtctatacgggaacgggccccaccctccagccccacagcctagttcacgcttcaacgacgcccccgccgccgacaaagaaccttccgtggtgcagttttgtgagtttgtatccgctcccgaagtgtctcggtgggcaggcccaataatcgacgttctcctcgactacgtgggcaacgtgcagctctgttctcgcttgaaggaacacatcgactcttttgaagactgggtgctcgaaggattcgtcaaatactag

SEQ ID NO: 343942 - DNA, 1959 bp, Artificial Sequence
  derived and/or modified sequence
agctggggtccctttggagacactccaggaaaaggggggcacatacccccactgggcttttcctgatgctgacaggggctgctctggctgttcctaagtggaactcgtcaaggtggcagtgacggtgctgatggggacctcaggacttatctgatcagtttcccatcgtccttgctgggtctgttgcttcaccggcatctgtgctctgacaccattaataaccacagagtctgagagtcaggaggaagtgctgctcacgctggaggaagtggctgggagagtgcaggggctggtggcagagaccgcccagagcccatcctagcccaacatggcgtgggtgtcctgggaatgaggcctgcctccagcctcaccttctccatctgggaaatgggactattgatgcagaagcctccccaaaagtggatctgagaggcatagacatcgtggttctcacggactctccaaggatgaggcctgcggaccccttgataaaggccatcaaggatggcgatgaagaggccttgaagaccatgatcaaggaagggaagaatctcgcagagcccaacaaggagggctggctgccgctgcacgaggccgcatactatggccaggtgggctgcctgaaagtcctgcagcgagcgtacccagggaccatcgaccagcgcaccctgcaggaggaaacagccgtttacttggcaacgtgcaggggccacctggactgtctcctgtcactgctccaagcaggggcagagccggacatctccaacaaatcccgagagacaccgctctacaaagcctgcgagcgcaagaacgcggaggccgtgaagattctggtgcagcacaatgcagacaccaaccaccgctgcaaccgcggctggaccgctctgcacgagtctgtgtctcgcaatgacctggaggtcatgcagatcctggtgagcggaggagccaaggtggaatccaagaacgcctacggcatcacccccttgttcgtggccgcccagagtggacagttggaggccttgaggttcttagccaagtacggtgctgacatcaacacgcaggccagcgacaacgcgtctgccctctacgaggcctgcaagaatgagcatgaggaggtggtggagtttctgctgtcacagggtgccgacgccaacaagaccaacaaggacggcttgctcccgctgcacatcgcctccaagaagggcaactacaggatcgtgcagatgctgctgccggtgaccagccgcacgcgcatacgccgtagcggcgtcagtccgctgcacctggcggccgagcgcaaccacgacgaggtgctggaggcgctgctgagcgcgcgcttcgacgtgaacacgccgctggcccccgagcgcgcgcgcctctacgaagaccggcgcagctccgcgctgtacttcgcggtggtcaacaacaacgtgtacgccaccgagctgctgctgcaacacggcgccgaccccaaccgcgacgtcatcagccccttgctcgtggccatccgccacggctgcctgcgcacaatgcagctgctgctggaccacggcgcgaacatcgacgcctatatcgccacgcaccccaccgccttccccgccaccatcatgttcgccatgaagtgcctgtcgctgctcaagttcctcatggacctgggctgcgacggcgagccctgcttctcatgcctctacggcaacggcccgcacccgccggccccgcagccctccagcaggttcaacgacgcgcccgcggccgacaaggagcccagcgtggtgcagttctgtgagttcgtatctgccccagaggtgagccgctgggcggggcccatcatcgatgtcctcctggactacgtgggcaacgtgcagctctgctcgcggctgaaggaacacatcgacagctttgaggactgggtcttggagggctttgttaagtattaatataataaatgttacacatgtg

SEQ ID NO: 343943 - DNA, 1470 bp, Artificial Sequence
  derived and/or modified sequence
atgcgcccagccgaccccctgattaaagccattaaagacggtgacgaagaggcattgaaaacaatgatcaaggaaggtaagaacctggctgaacctaataaagaaggctggctacctctgcacgaggccgcttactatgggcaagtggggtgtctaaaagtgctgcagagagcttatccgggtacaatcgaccagcggactctccaggaggaaacggccgtgtacttagctacttgccgcggtcatttagattgtttgctcagcttgctgcaggctggggctgagcctgatatctcaaacaagtcccgtgagacccctctgtataaagcctgtgaaagaaagaatgctgaagccgttaagatcctggtgcaacacaacgccgatacgaaccacagatgtaatcgcggttggaccgcgctgcatgaatccgtgtcccggaacgatctggaggtgatgcagatcctggtctctggcggtgccaaggtcgagagtaaaaacgcatacggaattactcccttgtttgtggccgctcaatctggacagctcgaggcactgagatttcttgcaaagtacggcgctgacatcaacactcaggcctctgacaatgccagcgcgctgtacgaagcctgtaaaaatgagcacgaggaggtcgtggaattcctgctctcccaaggggcagatgcgaacaagactaacaaagatggcctgctgcccttacacatcgcctccaaaaaaggcaattatcggattgtgcagatgttgctgcccgtgacttctcggacgcgaattaggaggtccggggtgtctcctttgcaccttgctgccgaaagaaatcacgacgaggtcctcgaggctcttctgagcgctagatttgatgttaataccccattggcacctgaaagagccaggctgtatgaagatcggaggtccagcgcgttgtactttgccgtggtcaataacaatgtctatgctacagaactcctgctgcaacatggcgcagaccctaatcgggatgtgatcagtccgcttttggttgcgatcaggcacggctgtctccgcactatgcagctgctgctggaccacggtgccaacattgacgcttatatcgccacacaccccactgctttcccagccactattatgttcgccatgaagtgtttgtcactcctgaaattcctcatggatttggggtgcgatggcgaaccatgctttagctgcctgtacggcaacgggcctcaccctcccgctccgcagccgtccagccgctttaatgacgcccctgccgctgacaaggagccttcagttgtgcagttctgtgaatttgtctctgcacctgaggttagcagatgggcaggacccatcatcgacgtattgctggactatgtggggaatgttcagctctgtagtagattaaaagaacacatcgattccttcgaggattgggttcttgaggggttcgtgaagtactag

SEQ ID NO: 343944 - DNA, 1470 bp, Artificial Sequence
  derived and/or modified sequence
atgagacccgccgaccccctgatcaaggccatcaaggacggcgacgaggaggccctgaagaccatgatcaaggagggcaagaacctggccgagcccaacaaggagggctggctgcccctgcacgaggccgcctactacggccaggtgggctgcctgaaggtgctgcagagagcctaccccggcaccatcgaccagagaaccctgcaggaggagaccgccgtgtacctggccacctgcagaggccacctggactgcctgctgagcctgctgcaggccggcgccgagcccgacatcagcaacaagagcagagagacccccctgtacaaggcctgcgagagaaagaacgccgaggccgtgaagatcctggtgcagcacaacgccgacaccaaccacagatgcaacagaggctggaccgccctgcacgagagcgtgagcagaaacgacctggaggtgatgcagatcctggtgagcggcggcgccaaggtggagagcaagaacgcctacggcatcacccccctgttcgtggccgcccagagcggccagctggaggccctgagattcctggccaagtacggcgccgacatcaacacccaggccagcgacaacgccagcgccctgtacgaggcctgcaagaacgagcacgaggaggtggtggagttcctgctgagccagggcgccgacgccaacaagaccaacaaggacggcctgctgcccctgcacatcgccagcaagaagggcaactacagaatcgtgcagatgctgctgcccgtgaccagcagaaccagaatcagaagaagcggcgtgagccccctgcacctggccgccgagagaaaccacgacgaggtgctggaggccctgctgagcgccagattcgacgtgaacacccccctggcccccgagagagccagactgtacgaggacagaagaagcagcgccctgtacttcgccgtggtgaacaacaacgtgtacgccaccgagctgctgctgcagcacggcgccgaccccaacagagacgtgatcagccccctgctggtggccatcagacacggctgcctgagaaccatgcagctgctgctggaccacggcgccaacatcgacgcctacatcgccacccaccccaccgccttccccgccaccatcatgttcgccatgaagtgcctgagcctgctgaagttcctgatggacctgggctgcgacggcgagccctgcttcagctgcctgtacggcaacggcccccacccccccgccccccagcccagcagcagattcaacgacgcccccgccgccgacaaggagcccagcgtggtgcagttctgcgagttcgtgagcgcccccgaggtgagcagatgggccggccccatcatcgacgtgctgctggactacgtgggcaacgtgcagctgtgcagcagactgaaggagcacatcgacagcttcgaggactgggtgctggagggcttcgtgaagtactag

SEQ ID NO: 343945 - protein, 2635 aa, Artificial Sequence
  derived and/or modified sequence
MSTKAEQFASKIRYLQEYHNRVLHNIYPVPSGTDIANTLKYFSQTLLSILSRTGKKENQDASNLTVPMTMCLFPVPFPLTPSLRPQVSSINPTVTRSLLYSVLRDAPSERGPQSRDAQLSDYPSLDYQGLYVTLVTLLDLVPLLQHGQHDLGQSIFYTTTCLLPFLNDDILSTLPYTMISTLATFPPFLHKDIIEYLSTSFLPMAILGSSRREGVPAHVNLSASSMLMIAMQYTSNPVYHCQLLECLMKYKQEVWKDLLYVIAYGPSQVKPPAVQMLFHYWPNLKPPGAISEYRGLQYTAWNPIHCQHIECHNAINKPAVKMCIDPSLSVALGDKPPPLYLCEECSERIAGDHSEWLIDVLLPQAEISAICQKKNCSSHVRRAVVTCFSAGCCGRHGNRPVRYCKRCHSNHHSNEVGAAAETHLYQTSPPPINTRECGAEELVCAVEAVISLLKEAEFHAEQREHELNRRRQLGLSSSHHSLDNADFDNKDDDKHDQRLLSQFGIWFLVSLCTPSENTPTESLARLVAMVFQWFHSTAYMMDDEVGSLVEKLKPQFVTKWLKTVCDVRFDVMVMCLLPKPMEFARVGGYWDKSCSTVTQLKEGLNRILCLIPYNVINQSVWECIMPEWLEAIRTEVPDNQLKEFREVLSKMFDIELCPLPFSMEEMFGFISCRFTGYPSSVQEQALLWLHVLSELDIMVPLQLLISMFSDGVNSVKELANQRKSRVSELAGNLASRRVSVASDPGRRVQHNMLSPFHSPFQSPFRSPLRSPFRSPFKNFGHPGGRTIDFDCEDDEMNLNCFILMFDLLLKQMELQDDGITMGLEHSLSKDIISIINNVFQAPWGGSHTCQKDEKAIECNLCQSSILCYQLACELLERLAPKEESRLVEPTDSLEDSLLSSRPEFIIGPEGEEEENPASKHGENPGNCTEPVEHAAVKNDTERKFCYQQLPVTLRLIYTIFQEMAKFEEPDILFNMLNCLKILCLHGECLYIARKDHPQFLAYIQDHMLIASLWRVVKSEFSQLSSLAVPLLLHALSLPHGADIFWTIINGNFNSKDWKMRFEAVEKVAVICRFLDIHSVTKNHLLKYSLAHAFCCFLTAVEDVNPAVATRAGLLLDTIKRPALQGLCLCLDFQFDTVVKDRPTILSKLLLLHFLKQDIPALSWEFFVNRFETLSLEAQLHLDCNKEFPFPTTITAVRTNVANLSDAALWKIKRARFARNRQKSVRSLRDSVKGPVESKRALSLPETLTSKIRQQSPENDNTIKDLLPEDAGIDHQTVHQLITVLMKFMAKDESSAESDISSAKAFNTVKRHLYVLLGYDQQEGCFMIAPQKMRLSTCFNAFIAGIAQVMDYNINLGKHLLPLVVQVLKYCSCPQLRHYFQQPPRCSLWSLKPHIRQMWLKALLVILYKYPYRDCDISKILLHLIHITVNTLNAQYHSCKPHATAGPLYSDNSNISRYSEKEKGEIELAEYRETGALQDSLLHCVREESIPKKKLRSFKQKSLDIGNADSLLFTLDEHRRKSCIDRCDIEKPPTQAAYIAQRPNDPGRSRQNSATRPDNSEIPENPAMEGFPDARRPVIPEVRLNCMETFEVKVDSPVKPAPKEDLDLIDLSSDSTSGPEKHSILSTSDSDSLVFEPLPPLRIVESDEEEETMNQGDDGPSGKNAASSPSVPSHPSVLSLSTAPLVQVSVEDCSKDFSSKDSGNNQSAGNTDSALITLEDPMDAEGSSKPEELPEFSCGSPLTLKQKRDLLQKSFALPEMSLDDHPDPGTEGEKPGELMPSSGAKTVLLKVPEDAENPTESEKPDTSAESDTEQNPERKVEEDGAEESEFKIQIVPRQRKQRKIAVSAIQREYLDISFNILDKLGEQKDPDPSTKGLSTLEMPRESSSAPTLDAGVPETSSHSSISTQYRQMKRGSLGVLTMSQLMKRQLEHQSSAPHNISNWDTEQIQPGKRQCNVPTCLNPDLEGQPLRMRGATKSSLLSAPSIVSMFVPAPEEFTDEQPTVMTDKCHDCGAILEEYDEETLGLAIVVLSTFIHLSPDLAAPLLLDIMQSVGRLASSTTFSNQAESMMVPGNAAGVAKQFLRCIFHQLAPNGIFPQLFQSTIKDGTFLRTLASSLMDFNELSSIAALSQLLEGLNNKKNLPAGGAMIRCLENIATFMEALPMDSPSSLWTTISNQFQTFFAKLPCVLPLKCSLDSSLRIMICLLKIPSTNATRSLLEPFSKLLSFVIQNAVFTLAYLVELCGLCYRAFTKERDKFYLSRSVVLELLQALKLKSPLPDTNLLLLVQFICADAGTKLAESTILSKQMIASVPGCGTAAMECVRQYINEVLDFMADMHTLTKLKSHMKTCSQPLHEDTFGGHLKVGLAQIAAMDISRGNHRDNKAVIRYLPWLYHPPSAMQQGPKEFIECVSHIRLLSWLLLGSLTHNAVCPNASSPCLPIPLDAGSHVADHLIVILIGFPEQSKTSVLHMCSLFHAFIFAQLWTVYCEQSAVATNLQNQNEFSFTAILTALEFWSRVTPSILQLMAHNKVMVEMVCLHVISLMEALQECNSTIFVKLIPMWLPMIQSNIKHLSAGLQLRLQAIQNHVNHHSLRTLPGSGQSSAGLAALRKWLQCTQFKMAQVEIQSSEAASQFYPL

SEQ ID NO: 343946 - DNA, 7908 bp, Artificial Sequence
  derived and/or modified sequence
atgagcaccaaggccgagcagttcgccagcaagatcagatacctgcaggagtaccacaacagagtgctgcacaacatctaccccgtgcccagcggcaccgacatcgccaacaccctgaagtacttcagccagaccctgctgagcatcctgagcagaaccggcaagaaggagaaccaggacgccagcaacctgaccgtgcccatgaccatgtgcctgttccccgtgcccttccccctgacccccagcctgagaccccaggtgagcagcatcaaccccaccgtgaccagaagcctgctgtacagcgtgctgagagacgcccccagcgagagaggcccccagagcagagacgcccagctgagcgactaccccagcctggactaccagggcctgtacgtgaccctggtgaccctgctggacctggtgcccctgctgcagcacggccagcacgacctgggccagagcatcttctacaccaccacctgcctgctgcccttcctgaacgacgacatcctgagcaccctgccctacaccatgatcagcaccctggccaccttcccccccttcctgcacaaggacatcatcgagtacctgagcaccagcttcctgcccatggccatcctgggcagcagcagaagagagggcgtgcccgcccacgtgaacctgagcgccagcagcatgctgatgatcgccatgcagtacaccagcaaccccgtgtaccactgccagctgctggagtgcctgatgaagtacaagcaggaggtgtggaaggacctgctgtacgtgatcgcctacggccccagccaggtgaagccccccgccgtgcagatgctgttccactactggcccaacctgaagccccccggcgccatcagcgagtacagaggcctgcagtacaccgcctggaaccccatccactgccagcacatcgagtgccacaacgccatcaacaagcccgccgtgaagatgtgcatcgaccccagcctgagcgtggccctgggcgacaagcccccccccctgtacctgtgcgaggagtgcagcgagagaatcgccggcgaccacagcgagtggctgatcgacgtgctgctgccccaggccgagatcagcgccatctgccagaagaagaactgcagcagccacgtgagaagagccgtggtgacctgcttcagcgccggctgctgcggcagacacggcaacagacccgtgagatactgcaagagatgccacagcaaccaccacagcaacgaggtgggcgccgccgccgagacccacctgtaccagaccagccccccccccatcaacaccagagagtgcggcgccgaggagctggtgtgcgccgtggaggccgtgatcagcctgctgaaggaggccgagttccacgccgagcagagagagcacgagctgaacagaagaagacagctgggcctgagcagcagccaccacagcctggacaacgccgacttcgacaacaaggacgacgacaagcacgaccagagactgctgagccagttcggcatctggttcctggtgagcctgtgcacccccagcgagaacacccccaccgagagcctggccagactggtggccatggtgttccagtggttccacagcaccgcctacatgatggacgacgaggtgggcagcctggtggagaagctgaagccccagttcgtgaccaagtggctgaagaccgtgtgcgacgtgagattcgacgtgatggtgatgtgcctgctgcccaagcccatggagttcgccagagtgggcggctactgggacaagagctgcagcaccgtgacccagctgaaggagggcctgaacagaatcctgtgcctgatcccctacaacgtgatcaaccagagcgtgtgggagtgcatcatgcccgagtggctggaggccatcagaaccgaggtgcccgacaaccagctgaaggagttcagagaggtgctgagcaagatgttcgacatcgagctgtgccccctgcccttcagcatggaggagatgttcggcttcatcagctgcagattcaccggctaccccagcagcgtgcaggagcaggccctgctgtggctgcacgtgctgagcgagctggacatcatggtgcccctgcagctgctgatcagcatgttcagcgacggcgtgaacagcgtgaaggagctggccaaccagagaaagagcagagtgagcgagctggccggcaacctggccagcagaagagtgagcgtggccagcgaccccggcagaagagtgcagcacaacatgctgagccccttccacagccccttccagagccccttcagaagccccctgagaagccccttcagaagccccttcaagaacttcggccaccccggcggcagaaccatcgacttcgactgcgaggacgacgagatgaacctgaactgcttcatcctgatgttcgacctgctgctgaagcagatggagctgcaggacgacggcatcaccatgggcctggagcacagcctgagcaaggacatcatcagcatcatcaacaacgtgttccaggccccctggggcggcagccacacctgccagaaggacgagaaggccatcgagtgcaacctgtgccagagcagcatcctgtgctaccagctggcctgcgagctgctggagagactggcccccaaggaggagagcagactggtggagcccaccgacagcctggaggacagcctgctgagcagcagacccgagttcatcatcggccccgagggcgaggaggaggagaaccccgccagcaagcacggcgagaaccccggcaactgcaccgagcccgtggagcacgccgccgtgaagaacgacaccgagagaaagttctgctaccagcagctgcccgtgaccctgagactgatctacaccatcttccaggagatggccaagttcgaggagcccgacatcctgttcaacatgctgaactgcctgaagatcctgtgcctgcacggcgagtgcctgtacatcgccagaaaggaccacccccagttcctggcctacatccaggaccacatgctgatcgccagcctgtggagagtggtgaagagcgagttcagccagctgagcagcctggccgtgcccctgctgctgcacgccctgagcctgccccacggcgccgacatcttctggaccatcatcaacggcaacttcaacagcaaggactggaagatgagattcgaggccgtggagaaggtggccgtgatctgcagattcctggacatccacagcgtgaccaagaaccacctgctgaagtacagcctggcccacgccttctgctgcttcctgaccgccgtggaggacgtgaaccccgccgtggccaccagagccggcctgctgctggacaccatcaagagacccgccctgcagggcctgtgcctgtgcctggacttccagttcgacaccgtggtgaaggacagacccaccatcctgagcaagctgctgctgctgcacttcctgaagcaggacatccccgccctgagctgggagttcttcgtgaacagattcgagaccctgagcctggaggcccagctgcacctggactgcaacaaggagttccccttccccaccaccatcaccgccgtgagaaccaacgtggccaacctgagcgacgccgccctgtggaagatcaagagagccagattcgccagaaacagacagaagagcgtgagaagcctgagagacagcgtgaagggccccgtggagagcaagagagccctgagcctgcccgagaccctgaccagcaagatcagacagcagagccccgagaacgacaacaccatcaaggacctgctgcccgaggacgccggcatcgaccaccagaccgtgcaccagctgatcaccgtgctgatgaagttcatggccaaggacgagagcagcgccgagagcgacatcagcagcgccaaggccttcaacaccgtgaagagacacctgtacgtgctgctgggctacgaccagcaggagggctgcttcatgatcgccccccagaagatgagactgagcacctgcttcaacgccttcatcgccggcatcgcccaggtgatggactacaacatcaacctgggcaagcacctgctgcccctggtggtgcaggtgctgaagtactgcagctgcccccagctgagacactacttccagcagccccccagatgcagcctgtggagcctgaagccccacatcagacagatgtggctgaaggccctgctggtgatcctgtacaagtacccctacagagactgcgacatcagcaagatcctgctgcacctgatccacatcaccgtgaacaccctgaacgcccagtaccacagctgcaagccccacgccaccgccggccccctgtacagcgacaacagcaacatcagcagatacagcgagaaggagaagggcgagatcgagctggccgagtacagagagaccggcgccctgcaggacagcctgctgcactgcgtgagagaggagagcatccccaagaagaagctgagaagcttcaagcagaagagcctggacatcggcaacgccgacagcctgctgttcaccctggacgagcacagaagaaagagctgcatcgacagatgcgacatcgagaagccccccacccaggccgcctacatcgcccagagacccaacgaccccggcagaagcagacagaacagcgccaccagacccgacaacagcgagatccccgagaaccccgccatggagggcttccccgacgccagaagacccgtgatccccgaggtgagactgaactgcatggagaccttcgaggtgaaggtggacagccccgtgaagcccgcccccaaggaggacctggacctgatcgacctgagcagcgacagcaccagcggccccgagaagcacagcatcctgagcaccagcgacagcgacagcctggtgttcgagcccctgccccccctgagaatcgtggagagcgacgaggaggaggagaccatgaaccagggcgacgacggccccagcggcaagaacgccgccagcagccccagcgtgcccagccaccccagcgtgctgagcctgagcaccgcccccctggtgcaggtgagcgtggaggactgcagcaaggacttcagcagcaaggacagcggcaacaaccagagcgccggcaacaccgacagcgccctgatcaccctggaggaccccatggacgccgagggcagcagcaagcccgaggagctgcccgagttcagctgcggcagccccctgaccctgaagcagaagagagacctgctgcagaagagcttcgccctgcccgagatgagcctggacgaccaccccgaccccggcaccgagggcgagaagcccggcgagctgatgcccagcagcggcgccaagaccgtgctgctgaaggtgcccgaggacgccgagaaccccaccgagagcgagaagcccgacaccagcgccgagagcgacaccgagcagaaccccgagagaaaggtggaggaggacggcgccgaggagagcgagttcaagatccagatcgtgcccagacagagaaagcagagaaagatcgccgtgagcgccatccagagagagtacctggacatcagcttcaacatcctggacaagctgggcgagcagaaggaccccgaccccagcaccaagggcctgagcaccctggagatgcccagagagagcagcagcgcccccaccctggacgccggcgtgcccgagaccagcagccacagcagcatcagcacccagtacagacagatgaagagaggcagcctgggcgtgctgaccatgagccagctgatgaagagacagctggagcaccagagcagcgccccccacaacatcagcaactgggacaccgagcagatccagcccggcaagagacagtgcaacgtgcccacctgcctgaaccccgacctggagggccagcccctgagaatgagaggcgccaccaagagcagcctgctgagcgcccccagcatcgtgagcatgttcgtgcccgcccccgaggagttcaccgacgagcagcccaccgtgatgaccgacaagtgccacgactgcggcgccatcctggaggagtacgacgaggagaccctgggcctggccatcgtggtgctgagcaccttcatccacctgagccccgacctggccgcccccctgctgctggacatcatgcagagcgtgggcagactggccagcagcaccaccttcagcaaccaggccgagagcatgatggtgcccggcaacgccgccggcgtggccaagcagttcctgagatgcatcttccaccagctggcccccaacggcatcttcccccagctgttccagagcaccatcaaggacggcaccttcctgagaaccctggccagcagcctgatggacttcaacgagctgagcagcatcgccgccctgagccagctgctggagggcctgaacaacaagaagaacctgcccgccggcggcgccatgatcagatgcctggagaacatcgccaccttcatggaggccctgcccatggacagccccagcagcctgtggaccaccatcagcaaccagttccagaccttcttcgccaagctgccctgcgtgctgcccctgaagtgcagcctggacagcagcctgagaatcatgatctgcctgctgaagatccccagcaccaacgccaccagaagcctgctggagcccttcagcaagctgctgagcttcgtgatccagaacgccgtgttcaccctggcctacctggtggagctgtgcggcctgtgctacagagccttcaccaaggagagagacaagttctacctgagcagaagcgtggtgctggagctgctgcaggccctgaagctgaagagccccctgcccgacaccaacctgctgctgctggtgcagttcatctgcgccgacgccggcaccaagctggccgagagcaccatcctgagcaagcagatgatcgccagcgtgcccggctgcggcaccgccgccatggagtgcgtgagacagtacatcaacgaggtgctggacttcatggccgacatgcacaccctgaccaagctgaagagccacatgaagacctgcagccagcccctgcacgaggacaccttcggcggccacctgaaggtgggcctggcccagatcgccgccatggacatcagcagaggcaaccacagagacaacaaggccgtgatcagatacctgccctggctgtaccacccccccagcgccatgcagcagggccccaaggagttcatcgagtgcgtgagccacatcagactgctgagctggctgctgctgggcagcctgacccacaacgccgtgtgccccaacgccagcagcccctgcctgcccatccccctggacgccggcagccacgtggccgaccacctgatcgtgatcctgatcggcttccccgagcagagcaagaccagcgtgctgcacatgtgcagcctgttccacgccttcatcttcgcccagctgtggaccgtgtactgcgagcagagcgccgtggccaccaacctgcagaaccagaacgagttcagcttcaccgccatcctgaccgccctggagttctggagcagagtgacccccagcatcctgcagctgatggcccacaacaaggtgatggtggagatggtgtgcctgcacgtgatcagcctgatggaggccctgcaggagtgcaacagcaccatcttcgtgaagctgatccccatgtggctgcccatgatccagagcaacatcaagcacctgagcgccggcctgcagctgagactgcaggccatccagaaccacgtgaaccaccacagcctgagaaccctgcccggcagcggccagagcagcgccggcctggccgccctgagaaagtggctgcagtgcacccagttcaagatggcccaggtggagatccagagcagcgaggccgccagccagttctaccccctgtag

SEQ ID NO: 343947 - DNA, 7908 bp, Artificial Sequence
  derived and/or modified sequence
atgagtacaaaggctgagcaattcgcctcgaaaatccgatacttacaggagtaccataatcgggtactgcataacatctacccggtcccatctggtacagacatcgctaacacactgaagtatttctcccagacactgttatccattctgtcccggacagggaaaaaggaaaaccaggacgcctcaaatcttacagtgccgatgaccatgtgcctctttcccgtcccctttccattaaccccgagtctccgcccccaggtgtcttccattaatccgaccgtgacacgcagcttgctgtactctgtgctcagagatgctccgagcgagagagggccacaatcacgcgatgcacagctctccgattacccgtcgctggactaccagggactttatgtgacgctcgtaacactattggatctcgtgcctttgttgcagcatgggcaacatgacctgggtcagtccatattttatacaacaacttgcttactcccatttctgaatgacgacatcctttccacactgccgtacacgatgatcagtacactcgctacattcccacccttcttacacaaggatataattgaatatctgtccacttcattccttcctatggcgatcctgggctcctcacgcagggaaggggtccctgcccatgtcaatctgtcggcttcctcaatgctcatgattgcgatgcagtacacgtcaaatccagtgtatcactgtcaacttctcgagtgtctgatgaagtacaaacaggaagtctggaaagacttactgtacgttattgcttacggtccaagccaagtaaagccaccagctgtccaaatgctgttccattactggcccaacctgaaaccaccaggcgcaattagtgagtacaggggattgcagtatacagcctggaaccctattcactgccagcatattgaatgtcataacgccattaataagcccgcggtgaaaatgtgcatcgatcctagtttaagcgttgccctgggagacaaaccaccccccctgtatttgtgcgaggagtgctctgaacgcatagcaggcgatcacagcgagtggttgatcgatgtgctcctcccacaggcagagatttctgcaatctgccagaagaagaactgttcaagccatgttcggcgcgccgtcgtcacctgtttctccgccggatgttgtggacggcatgggaatcgcccagtccgctattgtaagagatgccacagcaatcaccactcgaacgaggtcggagccgccgctgagactcatctgtatcagacttccccccctcctatcaatactagagaatgcggagcagaagagctggtgtgtgctgtggaggccgtcatcagtcttctcaaggaagctgaattccacgctgaacagagggagcacgagctgaacaggcggaggcagcttggcctgtctagctcgcaccattctctggataatgccgacttcgataacaaagacgatgataagcacgaccagcgtttactctctcaatttggaatctggtttctggtctcactgtgtacaccgtcagaaaatacccccaccgagagtctcgcgcgactggtggccatggtgttccagtggtttcattcgactgcatatatgatggatgatgaggtgggtagcctcgtcgaaaaactcaaaccacagttcgtgactaagtggcttaaaacagtctgcgacgtccgttttgatgtcatggtgatgtgcttgctccccaagcccatggagttcgccagggtggggggttactgggacaagagttgctctactgtgacgcagctcaaggaaggcctcaaccggatcctgtgtctgatcccatacaacgtcataaatcagtccgtctgggaatgcattatgcccgagtggctggaggcgatccgaaccgaagtccccgacaatcagttgaaggagttccgtgaggttctctccaaaatgttcgacatcgagctgtgccctctgccattttcaatggaagagatgtttggttttattagctgtcgttttactgggtatccgtcatctgtccaggagcaggccctcctgtggcttcacgtgctgtcagagctcgatatcatggtacctttgcagctgctgatttctatgtttagtgacggggtaaattcagtgaaagagttggcaaatcagagaaagtcacgggtctcagagctggctgggaacctagcaagccgccgtgtgagcgtggcatcagaccctggccggcgggtgcaacacaacatgttgagccccttccattctcccttccagtcaccgttccggtcccccctgcggtccccatttaggtcccccttcaagaattttggacatccaggtgggcgaactatcgactttgactgcgaggacgacgaaatgaacctcaattgcttcattttaatgtttgacctgctgctgaaacaaatggagctccaggacgacgggataaccatgggactggagcacagtctctctaaggacattatctccatcattaataatgttttccaagctccatggggtgggtcgcatacatgtcaaaaagatgaaaaggctatcgaatgtaatctgtgccaatccagcattttgtgctaccagctggcatgtgaacttttagagcggctagcaccaaaggaagagtcgcgcctggttgaaccaactgattctctggaggattctctgctaagctctagacctgagtttatcatcggccctgagggcgaggaggaagaaaaccccgctagtaagcacggcgaaaaccccggcaattgcactgaacccgtagagcacgctgcggtgaaaaacgataccgaaaggaaattttgttaccagcagctcccagtaacattgcgcctaatctatacaatcttccaggaaatggccaaatttgaggaacccgatatcctgttcaacatgctgaattgtctgaagatcctctgtctgcacggcgaatgtctatatatcgcgcgcaaagaccaccctcagtttttggcttacatacaggatcatatgcttatcgcatcactttggagagtggtaaagtcggagttcagtcagttatctagcttggctgtccccttattgctgcacgccttgtcccttccacacggtgctgatattttttggacaattattaatgggaacttcaatagcaaggattggaagatgagattcgaagcagttgaaaaagtcgcagtgatttgtcgattcctcgatatacattcagttacgaaaaatcatctactcaagtactccctcgcgcacgctttttgttgctttctcacggcagtcgaggatgttaatcccgccgtggcaacccgggctggcttactgctcgatactatcaaaagacctgccctccagggtctgtgcttgtgcctggatttccagttcgataccgtggtgaaggatcgaccaactattttatccaaactgctactcctacatttcctcaagcaagacattccagccttatcatgggaattttttgtcaataggtttgagaccctgagtctggaggcacagttacacctggactgtaataaggagttcccctttccaaccacaatcaccgccgtgagaaccaatgtggccaacctgtccgacgccgccttatggaagattaagagagcccgcttcgctaggaaccgccagaagtctgtgcgcagtctgcgggatagcgtaaaaggtccagtggagtctaaacgagcgttgtcgttgccggaaactcttacgtctaaaatccgtcaacagtccccagaaaatgataatactatcaaagatctgctgcctgaagacgccggcattgaccatcaaaccgtgcatcagctgatcaccgtactgatgaaattcatggccaaagacgaatcaagcgccgagtcagatatatcatcagcgaaagcgttcaacactgtaaagagacacctgtatgtgttgctagggtatgaccaacaagaggggtgctttatgattgctccccagaaaatgcgcttaagcacctgctttaatgcatttatagccggaattgcgcaggtgatggattataatattaacttagggaaacatctgctcccactagtggttcaggtgctgaaatactgttcctgcccccagctccgtcactattttcagcagcccccgaggtgttcgctgtggagtctgaagccccatataagacagatgtggctgaaagctctgctggttatcctgtacaagtacccatatcgggactgcgatatttctaagatacttctccacctaatccacataaccgtgaacactctgaatgcccagtaccactcctgcaaaccccacgccaccgccggccccctttactcagacaactctaacatctccaggtattccgaaaaggagaaaggagaaattgagcttgcagaatacagggagactggagccctccaggatagcctactacactgtgtgagggaagagtctattccaaaaaagaaactgaggtcgtttaagcagaaatcactagacatagggaacgccgactcgctcctgttcacccttgacgaacatcgacgcaagtcatgtatagataggtgtgatatcgaaaagccacccacacaagcagcctacatagcacaacgccccaatgatcccggcagatcacggcagaattctgcaactaggcccgataattcagagatccccgagaatccagctatggagggcttccctgacgcgaggcggccggtcattccagaagtgcgcctcaattgcatggagacattcgaagtgaaggtggactctccggtcaagcccgcccccaaggaggacttggacttaattgacctgagctccgacagcacatcaggtccggaaaaacactcaattctttccactagcgatagtgatagtctggtttttgagccactccctcctttacggatcgtagagagtgacgaggaggaagagacaatgaaccaaggagatgacggaccttctggcaaaaacgctgcttcctcgcccagtgtgccaagccatccgtctgtcctgtctctgagtaccgccccactggtccaggtgtcagttgaggattgcagcaaagatttttcctcaaaggattctggtaacaaccagtcagctgggaataccgattccgccctcatcacacttgaagaccctatggatgccgaaggttcatctaaaccggaggagttgcccgaattctcatgcgggtccccactgactctgaaacaaaagcgagatctcctgcagaagagcttcgccctgccagagatgagtctggacgaccatccggatccagggaccgagggcgagaagccaggtgaacttatgccgtcgtcaggggccaaaactgtgttattgaaagtgccagaggacgccgagaacccaactgagtccgagaaacctgataccagtgccgagagcgacacggagcagaatcctgagcgaaaagtggaagaagatggcgccgaggaaagtgagtttaagattcagatcgtccccaggcagcgcaaacaaagaaaaatagcagtgtcagctatccagcgcgaatacctagacattagctttaacatcttggataaactgggcgaacaaaaggatccagacccttctacaaaaggcctgtcgacactggagatgcctagggagagcagcagcgcacctacgcttgatgctggggtcccagagaccagctcccactcatctatatcaacgcagtacagacagatgaaaaggggaagcctcggcgttctcacaatgtcccagctgatgaaaagacagctggagcaccaatcaagtgcacctcacaatatctctaactgggataccgaacagattcagcccggaaagcgtcagtgcaacgtgccaacatgtctgaatccagacctcgagggccagcccttgcgaatgcgtggtgccacaaagtccagccttctctcagctccttccatcgtgtctatgttcgtccctgcgccagaagagttcactgacgagcagccaaccgtgatgactgacaaatgccacgattgcggggctatcctggaggaatacgatgaggaaactctgggcctcgccattgtggtcttatcaacgtttatacacctgtcacccgacttggcagcccccttactgctggatatcatgcagagtgtgggccgcctggcctcttccaccacgtttagcaatcaggcggaaagcatgatggtgcctgggaatgctgccggcgtcgcaaaacagttcctacgctgcatttttcaccaattggcccccaacgggatctttccccagctcttccagagtaccataaaagacggtacattcctcagaaccttggcatcttctctgatggacttcaacgaattgtcctccattgccgccctgtctcagctgctggaaggacttaataacaaaaagaacctccccgcggggggcgccatgatccgatgcctcgagaatatcgcaaccttcatggaggcactgcctatggactcccccagttccctatggaccacaatctcaaatcagtttcaaaccttcttcgccaaactaccgtgcgtactgcccctaaaatgcagcttggactccagtcttagaataatgatatgtttgcttaagattccctccactaacgcgactcgcagtcttctggaaccttttagtaagctattgtctttcgtcatccagaacgcagtgttcacattagcttacttagtcgagctctgtggcctgtgctacagagccttcaccaaagaaagggataagttctacctgtcaaggagtgtggtgctggaactgctgcaggctctaaagcttaaatctcccctccctgacaccaatttgttgctgctcgtgcagttcatttgcgctgatgcaggcacaaagctagctgagtccactattctgagtaaacaaatgatagccagcgtgcctggatgcgggacggcagctatggaatgcgtaaggcagtatatcaacgaggtgttggacttcatggctgatatgcacacccttaccaagctcaagtcacacatgaagacttgcagccagccactgcacgaggatacctttggcggacatttgaaggttggtctggcccagattgctgcgatggacatctcccgaggaaaccacagagataataaggccgttataaggtatctgccatggctttatcacccgccctcggccatgcagcagggtcccaaggagtttatcgagtgcgtgtcccacatccgactgctgtcgtggctgctcttgggaagcttgacacataacgccgtctgcccaaacgcatccagcccgtgcctcccaataccgctagatgccggctcccacgtcgccgaccacctgatcgttatcttaatagggtttcccgagcagtctaaaacatccgtcctgcacatgtgctctctgttccatgcattcatttttgcccagctgtggactgtgtactgcgaacaatccgccgtggcaactaatttgcagaaccaaaatgaattctcattcaccgccatcctgacggcgctggagttctggtcccgagtgacgccatccattctgcaactgatggcccacaataaagtaatggttgagatggtgtgccttcatgtcattagtctgatggaagcactccaagagtgtaattcaacaatttttgtcaagctgataccaatgtggctgcctatgatccagagtaacatcaaacaccttagtgctgggctgcagctgcgactgcaagctatccagaaccacgtaaaccatcattctctgcgaacattgcccgggagcgggcagagctcggcaggactagccgcgctgcggaagtggctccagtgtactcagttcaaaatggcacaggtggaaattcagtccagtgaagctgcatcccagttttacccactgtag

SEQ ID NO: 343948 - DNA, 7908 bp, Artificial Sequence
  derived and/or modified sequence
atgagcaccaaggccgagcagtttgccagcaagatccgctacctgcaggagtaccacaacagagtgctgcacaacatctaccctgtgcccagcggcacagacatcgccaacaccctgaagtacttcagccagaccctgctgagcatcctgagcaggacaggcaagaaggagaaccaggatgccagcaacctgactgtgcccatgaccatgtgcctcttccctgtgcccttccccctgacccccagcctgcggccccaggtgagcagcatcaaccccaccgtgaccaggagcctgctgtacagcgtgctgagagatgcccccagcgagcggggcccccagagcagagatgcccagctgagtgactaccccagcctggactaccagggcctgtatgtgaccctggtgaccctgctggacctggtgcccctgctgcagcacggccagcacgacctgggccagagcatcttctacaccaccacctgcctgctgcccttcctgaatgatgacatcctgagcaccctgccctacaccatgatcagcaccctggccaccttcccccccttcctgcacaaggacatcatcgagtacctgagcaccagcttcctgcccatggccatcctgggcagcagcagaagagagggcgtgcctgcccacgtgaacctgagcgccagctccatgctgatgattgccatgcagtacaccagcaaccctgtgtaccactgccagctgctggagtgcctgatgaagtacaagcaggaggtgtggaaggacctgctgtatgtgattgcctacggccccagccaggtgaagcccccagctgtgcagatgctgttccactactggcccaacctgaagcccccaggggccatcagcgagtaccggggcctgcagtacacagcctggaaccccatccactgccagcacatcgagtgccacaatgccatcaacaagccagctgtgaagatgtgcatcgaccccagcctgtctgtggccctgggggacaagcccccacccctgtacctgtgtgaggagtgcagcgagagaattgctggggaccacagcgagtggctgattgatgtgctgctgccccaggccgagatcagcgccatctgccagaagaagaactgcagcagccacgtgagaagagctgtggtgacctgcttctctgctggctgctgcggccgccacggcaacagacctgtgcgctactgcaagcgctgccacagcaaccaccacagcaatgaggtgggcgctgctgctgagacccacctgtaccagaccagccccccacccatcaacacccgggagtgtggggctgaggagctggtgtgtgctgtggaggccgtcatcagcctgctgaaggaggccgagttccacgccgagcagcgggagcacgagctgaacagaagacggcagctgggcctgagcagcagccaccacagcctggacaatgctgactttgacaacaaggatgatgacaagcatgaccagaggctgctgagccagtttggcatctggttcctggtgtccctgtgcaccccatctgagaacacccccacagagagcctggcccggctggtggccatggtgttccagtggttccacagcacagcctacatgatggatgatgaggtgggcagcctggtggagaagctgaagccccagtttgtgaccaagtggctgaagacagtgtgtgatgtgcgctttgatgtgatggtgatgtgcctgctgcccaagcccatggagtttgcccgggtgggcggctactgggacaagagctgcagcacagtgacccagctgaaggagggcctgaaccgcatcctgtgcctgatcccctacaacgtcatcaaccagagcgtgtgggagtgcatcatgcctgagtggctggaggccatcagaacagaggtgcctgacaaccagctgaaggagttccgggaggtgctgagcaagatgtttgacatcgagctgtgccccctgcccttctccatggaggagatgtttggcttcatcagctgccgcttcaccggctaccccagctctgtgcaggagcaggccctgctgtggctgcacgtgctgtctgagctggacatcatggtgcccctgcagctgctgatctccatgttcagtgatggagtgaacagcgtgaaggagctggccaaccagaggaagagccgggtgtctgagctggccggcaacctggccagccggcgggtgtctgtggccagtgaccccggccggcgggtgcagcacaacatgctgagccccttccacagccccttccagagccccttccgcagccccctgcggagccccttccgcagccccttcaagaactttggccaccctgggggccgcaccatcgactttgactgtgaagatgatgagatgaacctgaactgcttcatcctgatgtttgacctgctgctgaagcagatggagctgcaggatgatggcatcaccatgggcctggagcacagcctgagcaaggacatcatcagcatcatcaacaacgtgttccaggccccctggggcggcagccacacctgccagaaggatgagaaggccatcgagtgcaacctgtgccagagcagcatcctgtgctaccagctggcctgtgagctgctggagcggctggcccccaaggaggagagccggctggtggagcccacagacagcctggaggacagcctgctgagcagcaggcctgagttcatcatcggccctgagggggaggaggaggagaacccagccagcaagcacggggagaaccctggcaactgcacagagcctgtggagcacgccgctgtgaagaatgacacagagaggaagttctgctaccagcagctgcctgtgaccctgcggctcatctacaccatcttccaggagatggccaagtttgaggagccagacatcctcttcaacatgctgaactgcctgaagatcctgtgcctgcatggagaatgtctgtacatcgccaggaaggaccacccccagttcctggcctacatccaggaccacatgctgattgccagcctgtggagggtggtgaagtctgagttcagccagctgagcagcctggccgtgcccctgctgctgcacgccctgagcctgccccatggagctgacatcttctggaccatcatcaatggaaacttcaacagcaaggactggaagatgagatttgaagctgtggagaaggtggccgtcatctgccgcttcctggacatccacagcgtgaccaagaaccacctgctgaagtacagcctggcccacgccttctgctgcttcctgacagctgtggaggatgtgaacccagctgtggccaccagggctggcctgctgctggacaccatcaagaggcctgccctgcagggcctgtgcctgtgcctggacttccagtttgacacagtggtgaaggaccggcccaccatcctgagcaagctgctgctgctgcacttcctgaagcaggacatcccagccctgtcctgggagttctttgtgaacagatttgagaccctgagcctggaggcccagctgcacctggactgcaacaaggagttccccttccccaccaccatcacagctgtgaggaccaacgtggccaacctgagtgatgctgccctgtggaagatcaagagggccaggtttgccaggaaccggcagaagtctgtgcgcagcctgcgggacagcgtgaagggccctgtggagagcaagagggccctgagcctgcctgagaccctgaccagcaagatccggcagcagagcccagaaaatgacaacaccatcaaggacctgctgcctgaagatgctggcatcgaccaccagacagtgcaccagctgatcaccgtgctgatgaagttcatggccaaggatgagagcagcgctgagagtgacatcagcagcgccaaggccttcaacacagtgaagaggcacctgtatgtgctgctgggctatgaccagcaggagggctgcttcatgattgccccccagaagatgaggctgagcacctgcttcaatgccttcatcgccggcatcgcccaggtgatggactacaacatcaacctgggcaagcacctgctgcccctggtggtgcaggtgctgaagtactgcagctgcccccagctgcggcactacttccagcagcccccacgctgcagcctgtggagcctgaagccccacatccggcagatgtggctgaaggccctgctggtgatcctgtacaagtacccctacagagactgtgacatcagcaagatcctgctgcacctgatccacatcaccgtgaacaccctgaatgcccagtaccacagctgcaagccccacgccacagctggccccctgtacagcgacaacagcaacatcagccgctacagcgagaaggagaagggggagattgagctggccgagtaccgggagactggagccctgcaggacagcctgctgcactgtgtgcgggaggagagcatccccaagaagaagctgcggagcttcaagcagaagagcctggacattggaaatgctgacagcctgctcttcaccctggatgagcacaggaggaagagctgcatcgacagatgtgacatcgagaagccacccacccaggccgcctacatcgcccagaggcccaatgaccccggccgcagccggcagaacagcgccaccaggccagacaacagcgagatcccagaaaatcctgccatggagggcttcccagatgcccggcggcctgtgattcctgaggtgcggctgaactgcatggagacctttgaggtgaaggtggacagccctgtgaagccagcccccaaggaggacctggacctgattgacctgagcagtgacagcaccagcggccctgagaagcacagcatcctgagcaccagtgacagcgacagcctggtgtttgagcccctgccccccctgcgcatcgtggagagtgatgaggaggaggagaccatgaaccagggagatgatggccccagcggcaagaatgctgccagcagccccagcgtgcccagccaccccagcgtgctgagcctgagcacagcccccctggtgcaggtgtctgtggaggactgcagcaaggacttcagcagcaaggacagcggcaacaaccagagcgctggcaacacagacagcgccctgatcaccctggaggaccccatggatgctgagggcagcagcaagccagaggagctgcctgagttcagctgtggcagccccctgaccctgaagcagaagagggacctgctgcagaagagctttgccctgcctgagatgagcctggatgaccacccagaccctggaacagaaggagagaagccaggagagctgatgcccagcagcggggccaagacagtgctgctgaaggtgcctgaagatgctgagaaccccacagagagcgagaagccagacaccagcgctgagagtgacacagagcagaaccctgagaggaaggtggaggaggatggagctgaggagagcgagttcaagatccagatcgtgccccggcagaggaagcagaggaagattgctgtgtctgccatccagcgggagtacctggacatctccttcaacatcctggacaagctgggggagcagaaggaccctgaccccagcaccaagggcctgagcaccctggagatgccccgggagagcagcagcgcccccaccctggatgctggggtgcctgagaccagcagccacagcagcatcagcacccagtaccggcagatgaagaggggcagcctgggcgtgctgaccatgagccagctgatgaagaggcagctggagcaccagagcagcgccccccacaacatcagcaactgggacacagagcagatccagcccgggaagaggcagtgcaatgtgcccacctgcctgaacccagacctggagggccagcccctgaggatgagaggagccaccaagagcagcctgctgagcgcccccagcatcgtgtccatgtttgtgcctgcccctgaggagttcacagatgagcagcccaccgtgatgacagacaagtgccacgactgtggggccatcctggaggagtatgatgaggagaccctgggcctggccatcgtggtgctgagcaccttcatccacctgagcccagacctggccgcccccctgctgctggacatcatgcagagcgtgggccgcctggccagcagcaccaccttcagcaaccaggccgagagcatgatggtgcctggaaatgctgctggggtggccaagcagttcctgcgctgcatcttccaccagctggcccccaacggcatcttcccccagctgttccagagcaccatcaaggatggcaccttcctgcggaccctggccagcagcctgatggacttcaatgagctgagcagcattgctgccctgagccagctgctggagggcctgaacaacaagaagaacctgcctgctggaggagccatgatccgctgcctggagaacatcgccaccttcatggaggccctgcccatggacagccccagcagcctgtggaccaccatcagcaaccagttccagaccttctttgccaagctgccctgtgtgctgcccctgaagtgcagcctggacagcagcctgcgcatcatgatctgcctgctgaagatccccagcaccaatgccaccaggagcctgctggagcccttcagcaagctgctgagctttgtgatccagaatgctgtgttcaccctggcctacctggtggagctgtgtggcctgtgctaccgggccttcaccaaggagcgggacaagttctacctgagccgctctgtggtgctggagctgctgcaggccctgaagctgaagagccccctgcctgacaccaacctgctgctgctggtgcagttcatctgtgctgatgctggcaccaagctggccgagagcaccatcctgagcaagcagatgattgcctctgtgcccggctgcggcacagctgccatggagtgtgtgcggcagtacatcaatgaggtgctggacttcatggctgacatgcacaccctgaccaagctgaagagccacatgaagacctgcagccagcccctgcacgaggacacctttggaggccacctgaaggtgggcctggcccagattgctgccatggacatcagccggggcaaccaccgggacaacaaggctgtgatccgctacctgccctggctgtaccacccccccagcgccatgcagcagggccccaaggagttcattgaatgtgtgagccacatccggctgctgtcctggctgctgctgggcagcctgacccacaatgctgtgtgccccaatgccagcagcccctgcctgcccatccccctggatgctggcagccacgtggccgaccacctgattgtcatcctgattggcttccctgagcagagcaagacctctgtgctgcacatgtgcagcctcttccacgccttcatctttgcccagctgtggacagtgtactgtgagcagagcgctgtggccaccaacctgcagaaccagaatgagttctccttcaccgccatcctgacagccctggagttctggagccgggtgacccccagcatcctgcagctgatggcccacaacaaggtgatggtggagatggtgtgcctgcacgtgatcagcctgatggaggccctgcaggagtgcaacagcaccatctttgtgaagctgatccccatgtggctgcccatgatccagagcaacatcaagcacctgtctgctggcctgcagctgcggctgcaggccatccagaaccacgtgaaccaccacagcctgcggaccctgcccggcagcggccagagcagcgctggcctggccgccctgaggaagtggctgcagtgcacccagttcaagatggcccaggtggagatccagagcagcgaggccgccagccagttctaccccctgtag

SEQ ID NO: 343949 - DNA, 7908 bp, Artificial Sequence
  derived and/or modified sequence
atgagcaccaaggccgagcagttcgccagcaagatccggtacctgcaggaataccacaatcgcgttctccacaacatctacccggtcccttccggaacagatattgccaacacactgaagtactttagccaaaccctactgtcgatcctctctagaaccggcaaaaaggaaaaccaggatgcctccaacctgaccgtgcccatgactatgtgcctctttcctgtgcccttcccgctgaccccatcattacggccacaggtttcatccatcaacccaactgtgacccggagcctgctctatagcgtcctgcgtgatgcacctagcgagaggggaccacagagcagagacgcgcaattgtccgactacccttcgctggactaccagggtctctacgtgaccctggttaccctgctggatttggttcccttgttgcagcacggtcagcacgatttagggcagtcaatattttacactaccacgtgcctgctccccttccttaacgatgatatacttagtaccctgccgtacacaatgatttccaccctggccacctttcccccttttctgcacaaagatatcatcgagtacctctctacatcgttcttgcccatggccattctggggtcctcacggcgcgagggggtgccggcacatgttaatttgtcggcgagttcaatgcttatgatagctatgcaatacacaagcaatccagtatatcattgccagctactcgaatgcctcatgaaatacaagcaagaagtctggaaggacttgttatacgtcattgcctacgggcccagccaggtgaagcccccagctgtccagatgctcttccattattggcccaacctgaaacccccaggagcaatcagcgaatacagaggactgcagtatacggcctggaatcctatccactgtcagcatatagaatgccacaacgctatcaataagcccgccgtcaagatgtgcatcgatccgtcactgtctgtagccttgggggacaaaccaccaccactttacttatgcgaggaatgctctgagcgcattgctggagatcacagcgagtggttaattgatgtgctgctgccccaggcagagatatcggccatttgccagaaaaaaaactgttctagccatgtgaggcgggcagttgtgacctgcttttctgcaggttgctgtggcaggcacggaaatagacccgtgagatactgcaaacggtgtcactctaatcatcactctaatgaggtcggcgcagccgctgaaacgcatctctaccaaaccagccctcccccaatcaatacgagggagtgcggggccgaggaactcgtctgcgccgtggaagccgtgatcagtctcctgaaagaggcagagtttcacgccgagcagcgggaacacgaacttaatagaagacggcagctaggccttagttcttcgcaccatagcctggacaacgccgattttgacaacaaggacgatgacaaacatgatcagcgactattgtcgcagtttggaatctggttcttagtcagtctgtgcaccccgagtgagaatacacctaccgaatccttagcccgtctggtcgccatggttttccagtggtttcactccaccgcctacatgatggacgacgaggtgggatctttggtggaaaagctgaagccccagtttgtaactaaatggttaaaaacagtctgtgacgtgcgttttgatgtgatggtgatgtgtctcttaccaaagcccatggagtttgcccgcgtgggtgggtactgggacaagagctgtagcaccgttactcagctgaaggaggggctgaatcgtatcctttgcctcattccttacaatgtgattaaccaatcagtctgggagtgtatcatgccagagtggctggaagctatccgcaccgaggtccctgacaatcagctgaaagagtttagagaagtgctcagcaaaatgttcgatattgagctgtgtcctctgccattcagtatggaggagatgttcggattcatctcttgccggttcaccgggtacccatcctcggttcaggaacaagccctcctgtggctccacgtactgagcgagcttgatattatggtcccactccagctgctgatcagtatgtttagtgacggcgtcaacagcgtcaaagaactggccaaccagcggaagtctagggtatctgagctggccggtaatctggcctcccgtagggtatccgtcgccagtgaccccgggcggagggtacagcacaacatgctgagtccgtttcacagcccctttcagtccccattccgctcccccctgaggtcccccttcagaagtccatttaagaacttcggccaccccggcggtagaacaattgatttcgactgtgaggatgacgagatgaatctaaattgttttatcttaatgttcgatctcttgctgaagcagatggagctgcaggacgatgggatcactatggggctggagcattccctgtctaaagacattataagcatcattaataacgtgttccaagcaccctggggtgggtcccatacatgccagaaggatgagaaagccatagagtgtaacctttgtcagagcagcatcttgtgctaccagctcgcctgtgagctgctcgagcgcctggcccccaaagaagagagccggctggtagagccaaccgactcactggaggattctctcctgagttcccgccccgagttcatcataggccctgagggcgaagaggaagaaaatcctgctagcaaacacggagaaaatcctggcaactgcaccgaaccagttgaacatgccgctgttaaaaatgatacagaaaggaagttctgttaccagcagctgccggtgacactcagactgatatataccatcttccaagagatggcgaaattcgaggagcccgatattctgtttaatatgctgaattgtctaaaaatactctgtctgcacggcgaatgcctatatattgccagaaaggatcacccacaatttcttgcctatatacaggaccatatgttaattgcctccctgtggcgtgtcgtcaaaagcgagttttctcagctttcttctctggccgtaccattgcttctgcatgccctgtctctgcctcacggagcagacatcttttggacaatcatcaacggcaatttcaactcaaaggactggaagatgcgatttgaggccgtggaaaaagtggctgttatctgcagatttctcgacatccacagtgtcactaaaaaccatttactcaagtattctctggcacacgctttctgctgtttccttaccgccgtcgaagatgtgaaccccgccgtggccacgcgcgctggtctcttgttggatacaattaagcgtccagccctgcagggcctctgcctctgtctggatttccagttcgacaccgtcgtgaaagaccggcccacaattctctccaagcttctgctgctacactttcttaagcaagacattccagctctttcctgggaattctttgttaacagatttgaaacattgtcgctggaagcacaactccacctggactgcaacaaagaattcccgtttccaactaccatcacggcggtgcgtaccaatgtggcaaatctcagcgatgccgcactttggaaaatcaagagagcacgctttgctagaaatagacaaaaaagtgttcgctcgctacgggattcagtgaaagggcctgttgagtccaaacgcgcgctgagcctcccagagactctgactagcaagatcaggcaacagagtccggagaacgacaatacaattaaagacttactgccagaggacgccggaatagaccatcagacggttcatcagctgatcacagtgttgatgaagtttatggctaaggacgagtcctccgccgagtcggatattagctcagcaaaggcgttcaacaccgtcaaacgccatttatacgtgctgttaggctacgatcagcaagagggttgcttcatgatcgctccccagaaaatgagattatcaacctgcttcaatgcttttattgcgggaatcgcccaggtgatggactataacatcaacttaggtaaacacctgcttcctcttgtcgtgcaggtacttaagtactgctcatgcccccaactcagacactacttccagcaacctcctaggtgtagtctgtggtccctaaagccacacatccgccagatgtggcttaaagcccttctggtaattctgtataaatacccttacagggattgtgacatttccaagattctgctacacctgatccacatcaccgtgaacacactaaatgcccaatatcactcctgcaaacctcatgcgacagccggccccctgtacagcgataactccaacataagtcggtattccgagaaagagaagggcgagatcgagctcgccgagtacagggagacaggcgccctacaggactcacttttgcattgtgtgagagaggagtctattccaaaaaagaagctgcgctcctttaaacagaagtccctggacattggaaatgctgacagcctcctgtttactttggatgaacacaggagaaagtcttgtatcgaccggtgcgatatcgagaagccccccacgcaagcagcctatattgcacagaggcccaatgatcctggcaggtcacgacagaactcagcaacaagacctgacaactctgagatccccgaaaatccagctatggagggctttccagacgctcgcaggcccgttattcccgaggtgcgcctgaattgcatggagaccttcgaggtgaaggtggactccccggtgaaaccagcccccaaagaagatctggatctgattgacctgagctccgacagcacgtctgggcccgagaaacatagcatcctgtcaacctcagattctgacagccttgtcttcgagccattacctccattgaggatcgttgagtctgatgaggaggaggagactatgaatcaaggcgatgacggaccttcaggcaagaatgcagcgagcagtccctccgtgccttcacacccaagtgttcttagcctatcgacggcccctctcgtgcaagtgagcgtggaggactgttcgaaggacttcagttcaaaggattccggtaacaatcagtcggcgggaaataccgattcagcgctgattactctggaagatcccatggatgccgaaggctcatccaaaccggaagaactccctgaattctcctgtggaagccccctgactctgaaacaaaaacgcgaccttttgcagaaaagcttcgcactgcctgagatgtctctggacgaccatccagatcctggtacagagggcgaaaagcccggcgaactgatgccttcatctggcgccaagacggtactcctaaaggtcccagaagacgccgaaaaccctactgaatctgagaagcccgacacttccgcagagagcgacaccgagcagaacccagagcgcaaggtcgaggaggacggagctgaggagtccgaattcaagatccagattgtccccagacagaggaagcagcggaagatcgccgtcagcgccatccagagagagtatctagacatcagtttcaacatcttagacaagctaggagaacagaaggaccccgatccttcaactaagggcctgagcacgctagagatgcccagggaaagcagctcagccccaacactagacgccggggttccggagacctcaagccactcgagcatttcgacccaatatcggcagatgaagcgtgggagcctcggagtcctaacaatgtctcagctaatgaaacgacagctggaacaccagtcgtcagccccacataatatcagcaactgggacactgagcagattcagcccggcaaaagacagtgtaacgtgcccacgtgccttaacccagacttggaggggcaacctctgcgaatgcgtggcgctaccaagagctctctgctatctgctcctagcattgtgagcatgttcgtgcctgcccctgaggaattcacggatgaacagcccactgtaatgaccgataagtgtcacgattgcggtgcaatattagaagaatacgacgaggagacacttgggctggcaatagttgtcctctccacgtttatccacctgagccccgatctggccgccccactgcttctcgacatcatgcagtctgtcggacgattagctagttcaacaacgttttccaatcaggctgaaagcatgatggtccctggcaatgccgccggggtggccaaacagttcctccgctgtatctttcaccagttggcccccaatggaatcttcccccagctcttccagtctactatcaaagatggaacatttctgcgcacgttggcttcctccctgatggacttcaatgagttaagctctatcgcagcactctcacaacttttagagggcctcaataacaagaaaaaccttccggcgggtggggcgatgatcaggtgcctggagaacatcgcaacgttcatggaagctcttcccatggattccccgtcatctttgtggaccactattagtaaccaatttcaaacgtttttcgccaagctaccttgcgtcctgcccctgaagtgctccctggactcatcacttcggatcatgatttgcctcctgaaaataccaagcacaaacgcgactagatccctcctggaaccatttagcaagttattaagtttcgtgatacagaacgcagtttttactctggcatacttggttgagctttgtggactctgttatcgcgcattcacaaaagaacgggataagttctatctgagccgctcagttgttttggaactcctccaggccctgaaactgaaatcgccccttcctgacactaacctgttgctgttagtgcaattcatctgtgccgacgcagggactaaacttgctgagtccaccatcttgagtaagcagatgatcgcttcagtaccaggctgcggaacggccgctatggagtgtgtccgccagtatattaatgaagttctggacttcatggccgacatgcatacactgacgaagctgaagtctcacatgaaaacctgttcacagcctctccacgaggacacctttggcggccacctgaaggtgggcctggcccaaatcgctgccatggatatctcgcgcgggaaccaccgcgacaacaaggcggtaatcaggtacctgccgtggctataccatccaccttcagccatgcagcagggcccaaaagagtttattgagtgtgtgagccacattcgcctgctgagctggctcctgttaggttcccttacacacaatgcagtctgcccgaacgcctcgtctccttgcttaccaataccccttgatgccggttcacacgttgccgaccacctgattgtcattcttataggctttccagagcagagcaagacatccgtgctgcacatgtgttctttattccatgccttcatcttcgctcagctgtggaccgtgtactgcgaacagtctgctgtagcaactaatctgcaaaaccagaatgaattttcttttacagccatactgacagcgttggagttttggtcccgtgttactccctccatccttcaactaatggcccacaataaagttatggtcgaaatggtgtgccttcatgtaatatcactgatggaggcgttgcaggagtgcaactccacgatcttcgtcaaactgatccctatgtggctgcccatgatacaatccaatattaagcatttatcggctggtctgcaattgagacttcaagccattcagaaccatgtcaatcaccactctctgaggactctacccggcagtggccagagtagcgccgggctcgcggcgcttcggaaatggctgcagtgcacacagttcaaaatggctcaagtcgaaattcagtcctcagaggccgcctcacaattttacccactctag

SEQ ID NO: 343950 - DNA, 7907 bp, Artificial Sequence
  derived and/or modified sequence
atgagtacaaaagccgagcaattcgcatctaagatccgctatcttcaggaatatcacaacagagtcctgcacaatatttatcccgtgccatcagggacagacatagcgaatacccttaagtacttctcacagaccctgctaagcattttgtctcggacgggcaaaaaggagaatcaggatgcctctaatcttaccgtgcccatgacaatgtgtttattccctgtgccattccccctaacgccttccctccggccacaggtgtcttccattaatcccactgtaactcgtagtttgctttactccgtcttgcgcgatgccccaagcgagagaggaccccaaagccgggacgcacagctgagtgactatccctcccttgattaccaggggctttacgtcacgttggtgacccttctggacctggtcccactgttgcagcacggccagcatgacctgggtcagtctattttttacacaacgacatgtcttctcccgttcctgaatgacgacattctttccacccttccctatacaatgattagcaccctggcaacatttccgccatttttgcataaagatataatagagtacttgagtacctcctttctaccgatggccattcttggaagctcccgacgagagggagtacctgcacatgttaatttgtcagccagcagtatgctgatgattgctatgcagtatacctcgaaccccgtctatcattgtcagctgctggagtgtcttatgaagtataagcaggaagtttggaaggaccttctgtacgtcattgcttacggtccatcccaggtcaagcccccagctgtccaaatgctctttcattattggcctaatttgaagccaccaggcgctatctccgagtatagaggactgcagtacacagcatggaaccccatccactgtcagcacatcgaatgccacaatgcgatcaacaaacctgccgtgaagatgtgcatcgacccgagcctgtccgtcgccctgggggataaaccgcctcctctgtatttgtgcgaggagtgctctgagagaatagcaggagaccactccgaatggttaatcgacgtgctgttaccccaggcagaaataagcgcaatctgtcagaaaaagaattgcagctcccacgtaagacgcgctgtagtgacctgctttagcgcgggttgttgtggacggcatgggaatagacccgtgagatactgcaagaggtgtcattccaaccaccactcaaatgaggtaggagctgcagcagagactcatctataccaaaccagcccacctcctattaacacacgtgaatgtggcgcagaggagcttgtgtgtgcagtggaagctgtcatctccctcttgaaagaggccgagtttcacgcagagcagagagagcacgaacttaacagaagacgccagctgggcctcagtagttctcaccattcactggacaacgcagacttcgacaacaaggacgatgacaaacatgaccagagactgctgtctcaatttgggatttggttcctggtgagcctctgcacaccttcggagaatacacccactgagtccttggcccgattggtggcaatggtgtttcagtggttccatagcaccgcctacatgatggacgatgaggtggggtcactcgtggagaagcttaagccgcaattcgtgacgaaatggcttaagaccgtctgtgatgtccgcttcgacgtgatggttatgtgccttctcccaaagccaatggagttcgcccgtgtgggcggttactgggacaaatcttgctccactgttactcagttgaaggagggactgaaccgaattttgtgcctcatcccatataacgttattaaccagtcggtgtgggaatgcattatgccagaatggttggaggcaattcgaaccgaagtcccggacaatcaactcaaggaattccgagaggtgctgtctaagatgttcgatattgagttatgcccattgccgtttagcatggaggagatgttcggctttatcagctgtagatttaccgggtaccccagctccgttcaggagcaggcactgctgtggctccatgtactgtcagaactggacatcatggtcccgctgcagctccttatttctatgttctcagacggagtgaactctgttaaggaacttgctaatcagagaaagagcagagtaagtgaacttgctggaaacctcgcctccagacgcgttagcgtggccagcgatccgggaaggagagtgcagcataatatgctgtccccattccatagcccatttcaatctccattccgctccccactccgttctcccttccgaagccctttcaagaactttggtcaccccggagggaggacgatagattttgattgcgaagatgacgaaatgaatctgaactgtttcattttgatgtttgacctgctgctaaaacagatggagcttcaggatgatggaataactatggggctggaacactcactgagcaaggacatcatttctataattaacaacgtttttcaggccccatggggaggctcccatacctgccagaaggacgaaaaagccattgagtgcaatctttgccagtcatcaatcctatgctaccagctggcgtgcgagttgctcgagaggctcgccccaaaagaagagtctcgcctggtggaacctacagactcgctggaagattcactgctgtcctctagaccggagttcatcataggacctgaaggggaggaagaggagaatcctgctagcaaacacggcgaaaaccccggaaactgcactgagcctgtagaacacgcagctgtgaagaacgataccgaacgtaagttctgttaccagcagctcccggtcacacttcgtttaatatatacaattttccaggagatggctaaatttgaagagcccgatatcctcttcaacatgcttaattgtcttaagattctctgcctccatggtgaatgtctgtatatcgccagaaaggatcacccccagtttttagcttatattcaagatcacatgttgatcgccagtttatggcgtgtcgtcaaaagcgagttttctcagctaagctctctggctgtccccctcctcttgcacgctctcagcctgccacatggagctgacatattttggactattattaatggaaacttcaactcaaaggattggaagatgcggtttgaggccgtggaaaaggtagcagtaatttgccggtttctagacatccactccgtgaccaaaaaccatctgctgaagtactcgctggcgcacgctttctgctgcttcctgacagccgtagaggatgtcaatcctgcggtggccacacgagcgggtcttctcctggataccataaagcgccctgcactgcagggcctctgcctttgtctggattttcagtttgatactgtcgtgaaagaccggccaaccatcctttccaaactgcttctgctgcattttcttaaacaggatattcctgccctctcgtgggaattctttgtgaacagattcgagacgctgtccttagaagctcagctgcacttagattgtaataaggagttcccatttcccacgacgatcactgcggtgcggacaaacgtggcaaatttgagtgacgcggctctgtggaaaatcaagcgggcacggttcgccaggaatcgccaaaagtctgtcaggtcattgcgggactcagttaaagggccagtggaaagtaagcgggctctgagcctgccagagactctcacttcaaaaatccgccagcagtctcccgaaaatgacaataccattaaggacttgctgcccgaggatgctggaatcgaccaccagactgttcatcaattgattaccgtgcttatgaagtttatggctaaggatgagagctctgccgaaagcgacatcagctctgctaaagcatttaatacagtgaaacggcatctttacgttctattaggctatgatcaacaagaaggctgttttatgattgcaccacagaagatgagattgagcacctgctttaatgcatttatcgctggcatagctcaggttatggactataatattaatctcggaaaacatctgctgcctctggtggtgcaggtgctcaagtactgttcttgcccacaactgcggcactactttcaacagccgcctaggtgcagtctctggagcctcaaacctcatatccgccagatgtggttgaaggcattgctcgtgatcctgtataagtacccctatagagactgcgacatcagcaaaattttgctccacttgatccacatcaccgtgaacactctgaatgctcaataccacagctgcaagccacatgcaaccgccggtcctctttacagtgataattccaatataagccgctattctgagaaagagaaaggggagatcgaacttgctgagtaccgggagaccggggctctgcaggacagtttattgcactgcgtcagagaggagtcaatccccaaaaaaaaactgagaagtttcaagcaaaagagcttggatatcgggaacgctgacagtctattgtttacacttgacgaacatcgcaggaaatcctgcatcgacaggtgcgatattgagaaaccccctacccaagcggcatatattgctcagcgcccaaacgacccaggaaggtcccgtcaaaattccgccacacgacccgataattcggaaatacctgagaatccggcaatggaaggatttcctgatgctagacggcctgtgatacctgaggtgcgtctgaattgcatggaaacattcgaagtgaaggtcgatagcccggtgaagccagccccaaaggaagacctggacctgatcgatctgtctagcgactcgaccagtgggcctgagaagcactctatcctatctacgtcagattcagacagcctggtctttgagcctctacccccactcagaattgtcgagtcggacgaggaggaagagactatgaatcagggcgacgatggtccttccgggaagaacgccgcatcttcaccttccgtgcccagccatccatctgtgctgtcgttgagcacagctccactagtgcaagtatccgtcgaagattgttctaaggacttttcatctaaagactccggcaataatcagtctgctggcaataccgattctgcccttataactttggaggaccctatggacgccgaaggttcatcaaagcctgaggagctgcctgagtttagctgcggtagcccgttgacattgaagcagaagcgggatctgttacagaagagtttcgctctgcccgagatgtccctcgatgatcaccccgacccaggtaccgagggtgagaaaccaggcgagctaatgccaagcagcggagcgaagacagtgctgctgaaggtgccagaggacgcagagaatcctacggagtccgagaagccggatacatccgcagaaagcgataccgagcagaatcctgaacgaaaggtagaggaagacggcgctgaggagtctgaattcaagatccagattgtgccacggcaacgcaaacagcgcaagattgccgtttccgccattcagcgggagtatttagatatttccttcaacattctggataaactcggggagcaaaaggaccctgaccccagcacaaaaggcctcagcacactcgagatgccccgagagagttctagtgcgccaaccctggacgcaggcgttcccgagactagctcacacagttctattagtacccagtacagacagatgaagcgtgggtctcttggtgtccttacaatgtctcagcttatgaagcggcagttggagcatcaatcttctgccccacataatataagcaattgggacaccgagcaaatccagcctgggaaacggcagtgtaacgtgcctacatgcttgaatcccgatcttgagggccaaccactgaggatgcgcggagcgacaaagagtagtcttttgagtgccccttcaatcgtctcaatgttcgtgcctgctcccgaagagtttacagacgaacagccgaccgtcatgactgataaatgtcatgactgtggggctatacttgaggaatatgatgaagaaaccctaggcctggctattgtggtcctgtccacatttatccacctgagccccgatctagccgcaccactcctcctggatatcatgcagagcgtcggtaggctggccagcagcaccacattctctaatcaggcggagtccatgatggtccctggcaacgcagcaggagtggccaagcagttccttcgctgcatcttccaccagttagcccctaatggaatcttcccgcagctgtttcagtccactatcaaagacgggacattcctgcgcaccctggcctccagcttgatggatttcaacgagttgtcctcaatcgccgcactgtctcaattgctggaagggttaaataataagaagaatttgccagctggaggtgcgatgattcgctgtttagaaaatatcgccacattcatggaggcactgccgatggatagcccctcctccctttggaccaccatttcaaaccagttccagacattctttgcaaaactaccttgcgtcctgccactaaagtgttctctggacagctctcttcgcataatgatctgcctgcttaagataccctctacaaacgccacaagaagtctgctcgaacctttcagcaaattgctcagctttgttatccaaaatgcagtctttaccctagcgtacttggtcgaactgtgtggactctgttacagggcattcaccaaggagcgggataaattctacctgagtcgttccgtggtactggagttgttgcaagccctgaaacttaaaagccccttgccagataccaacctgctgctgttggtgcagtttatttgtgcggacgccggtaccaaactcgcagaatccacaatcttgtctaaacaaatgattgcgagcgtacccggatgtggcactgccgcaatggagtgcgtgcgacagtacattaatgaggtactggatttcatggcggacatgcacactctcaccaaactgaagtctcacatgaagacttgctcacaaccgctacacgaggatacatttggcggacatctcaaagtgggattggctcaaattgcggctatggacatctcaaggggaaatcatagggataacaaagcggtcattagatatcttccctggttataccacccccctagcgccatgcagcaggggcctaaagaattcatcgagtgtgtgagccacattagactgctgagctggctgctgctcggctccctaacccataatgctgtctgtcccaatgcttcgtcaccctgtcttcccattccactggacgcaggatcccatgtcgccgatcatctgatagtcattttaatcggatttcctgaacaaagcaagacatccgtacttcacatgtgttccttgttccacgcttttatttttgcccagctgtggacagtatattgcgagcagagcgcggttgcgaccaacttgcagaaccaaaatgaattctcctttacagctatactaacagccttagagttttggtctagagtgacccccagcatactccaactgatggcccacaataaggttatggtggagatggtttgtcttcatgtgatctccttgatggaggcgctgcaggagtgtaattccaccatctttgtgaaattaatcccaatgtggctgcccatgatccagtctaatattaagcacctgagtgccggactccagctgcggctgcaggccatccagaaccacgtgaatcaccattcacttcgtacacttccaggcagcggccagtcaagcgctgggctcgcagcactgcgcaaatggcttcagtgcacccagttcaagatggctcaggtggaaattcaaagcagtgaggctgcgtcccagttttatcctctgta

SEQ ID NO: 343951 - DNA, 7908 bp, Artificial Sequence
  derived and/or modified sequence
atgtccaccaaagcggagcagtttgcttccaagatccggtacttgcaggaatatcataaccgggttctccacaacatttatcctgtaccatcaggaacagatattgcaaacaccttgaaatacttttctcagaccttgttaagcattttgtcccgcacagggaagaaggaaaaccaagatgcctccaatttgacagtgcccatgaccatgtgtctttttcctgtgccattcccactcaccccatctctaagaccgcaggtcagttccatcaaccctactgttactcgctccctcctttacagcgtcctgcgagatgctccctcagaacgcggcccgcaaagtcgtgatgctcagttgtcagactacccttctttggactaccaaggcctctacgtgactttggtgaccctcctggatctagttcctttactacagcacggccaacacgatcttggacagtcgatattttatacaactacatgtttgctaccttttctcaatgatgatattctgagtactttgccctacacgatgatatcaacgttggctacctttcctccatttctgcacaaggatatcattgaatatcttagcacatcttttctaccaatggctatattgggctcctcaaggagagaaggtgtacctgcccatgttaacctctctgcatcatccatgctaatgattgcaatgcagtacacatccaatccagtgtatcattgtcaattactggaatgcctcatgaaatataaacaagaagtctggaaagatcttttgtatgtgattgcgtatgggccttcacaagtgaagcctccagctgtgcaaatgcttttccactactggcccaatttaaaacctcctggggcaataagcgagtacagggggttgcagtacacagcttggaatcccatccactgccagcacattgaatgccacaatgcaattaacaaaccagctgtgaagatgtgtatagacccttccctgtcagtagcgttgggtgataaaccacccccgttgtatctctgtgaagaatgcagcgagaggattgcaggggaccacagtgagtggctgattgatgttcttctgccacaagctgaaatatctgctatatgtcagaaaaagaactgcagttcccacgttagaagagcagttgtcacctgcttctcagcagggtgctgtggtcgtcacggaaacaggcctgttcggtactgcaagaggtgccactcaaatcatcacagtaatgaagtgggggccgctgcggagactcacctctatcagacctctcctccgcccatcaacacgcgggaatgcggcgctgaggagctggtctgcgccgtggaagccgtgatcagcttgttgaaagaagccgagttccatgctgagcagcgagaacatgagctgaaccggcggcggcagctgggcctctcctcttcccaccattccctggataatgctgactttgataacaaggacgatgataaacacgatcagaggctgctcagtcaattcggaatatggttcttagtgagcctctgcacacccagtgagaacacgcctacagaaagcttggcccggctggtggccatggtgtttcagtggtttcactccactgcgtatatgatggatgatgaagtgggaagtctggtggaaaagctgaagcctcagtttgtcaccaaatggctgaagaccgtatgtgatgttcgcttcgatgtcatggtcatgtgccttcttcctaaacccatggaatttgccagggttggtggctactgggataagtcctgtagcacagtgactcagctgaaggaaggtctcaaccgaatcctctgcctgatcccctataatgtgatcaatcaatctgtctgggagtgtattatgccggaatggctggaagccatcagaacagaagtcccagataatcagttaaaagaattcagggaagtattaagcaaaatgtttgacattgaactctgtcctctgcctttctcaatggaggagatgtttggttttattagttgtcggtttacaggatacccctcctctgtgcaggagcaagctttactgtggcttcatgtattatcggagttagatatcatggttccacttcaactactaataagtatgttttctgatggagttaattcagtcaaagagctggcaaatcaaagaaaatcaagagtcagtgaactggcagggaaccttgcatctcgaagggtgagtgttgcctctgatcctggccgacgagttcagcacaatatgcttagtccatttcatagtcctttccagagtccgtttcggagtcctttgcgtagtccgtttcgtagccctttcaagaattttggacacccaggaggaaggactattgactttgattgtgaagatgatgaaatgaatctaaattgtttcatcctcatgtttgatcttctcctgaagcagatggagttacaagatgatggaatcacgatgggtttagagcacagcttatcaaaggacattatttctattataaacaatgtcttccaagccccctgggggggatcccacacctgccagaaggacgaaaaagcaatcgagtgcaacttatgtcagtctagtatcctctgctatcagcttgcttgtgaactcctggagagactagctcctaaagaagaaagccggctggtggagcccacagacagcctggaggatagcctcctttcttccagaccagagtttatcataggccctgaaggggaggaggaggagaatcctgcaagcaagcatggggagaacccaggcaactgcaccgagcccgtggaacatgctgcagtaaagaatgataccgaaagaaaattttgctaccaacagcttccggtaacattgagactaatatataccattttccaggaaatggctaagtttgaagagccagacattctttttaatatgctcaattgcctgaagattctctgtctgcatggagaatgtttatacattgccagaaaagatcaccctcaatttttagcctacattcaggaccacatgttgattgcaagcctgtggagggtcgtcaaatccgagttctctcagctgtcttccctggcagtccctcttctcctccatgccctgtcacttcctcatggtgctgacatcttctggacaatcataaatggcaatttcaacagcaaagactggaagatgaggtttgaagcagtggaaaaagttgctgtaatttgtagatttctggatattcactcagtaaccaaaaaccacctgctgaagtactccctggcacatgccttctgctgcttcctgacagcagtggaggatgtcaaccccgcagtggctaccagagctggtctcctgcttgacaccataaagaggccagcattgcagggtctatgtctttgtcttgacttccagtttgatactgtggttaaagacagacccacaattttgagcaagcttttactcttgcactttcttaagcaggatattcctgctctgagctgggagttctttgtcaatagatttgagacgctttctttggaagcccagctacatttggattgtaacaaggaatttccttttcctacaaccatcactgctgtgaggaccaatgttgctaacctcagcgatgcagccttatggaagatcaagagagctcgctttgcaagaaaccgccagaagagtgtacgttccctgagggacagcgtgaaagggcctgtggaatccaagagggcgctctccctccctgagaccctgacctccaaaattcgacaacaatctcctgagaatgacaacaccatcaaggacctgctcccagaagacgctgggatcgaccaccagacagttcaccagctgattacagtgctcatgaagttcatggccaaggatgaaagcagcgctgagtcagacatcagcagtgcaaaggccttcaacacggtcaagcgacacctgtacgtcttactcggctatgaccagcaggaaggttgcttcatgattgcacctcaaaaaatgcgcctgtcaacttgctttaatgcattcattgcaggaattgcccaagttatggactataacattaacttgggaaaacaccttctccccttagtggttcaggtgctcaaatactgctcttgtcctcaactccggcattatttccaacagccgcctcgttgctccctctggtccctaaagcctcacatccggcagatgtggttgaaggccttgcttgtcatcctttacaagtatccataccgagactgtgatatcagcaagatcctgctgcatctgattcacataacagtcaatacactcaatgcgcagtatcatagctgcaagccccatgccacggcaggacctttgtacagtgacaacagtaacataagcagatacagcgaaaaagaaaaaggtgaaatagaactggctgaatatagagagacgggtgcattacaagacagccttctccactgtgtgagagaagaaagcattccgaaaaaaaagctacgctctttcaaacaaaaatctcttgatatagggaatgcagactcgcttttgtttacattagacgaacatcgtaggaagtcgtgcatagatcggtgtgacatagagaagcctccgacccaagctgcgtatatcgcacaaagaccaaacgaccctggacgttctagacagaactctgctacgaggcctgacaatagtgaaatccccgagaacccagctatggaagggtttccagatgctcgaaggcctgtcataccagaggttaggttaaactgtatggagactttcgaggtgaaagttgactcgccggtaaagcctgctcctaaagaggatttagatctgatagatctatcctcagattcaacctcggggcctgaaaaacactctatactctcaacctccgacagcgactctcttgtatttgagcctcttccccctctcagaatagtcgagagtgacgaagaagaggagacgatgaaccaaggcgatgacggcccctccggtaaaaatgctgcctcttctccctccgtccccagccatccctccgtcctcagcctgagcacagctccgcttgtacaagtaagtgtggaggattgttccaaagacttttcttctaaggactcaggaaataatcagtcagcagggaacactgactctgccctcatcactctggaagaccctatggacgccgaaggatcctcaaagccagaggagctgccagagttctcctgcggtagcccactgacgctgaagcaaaaacgagacctccttcagaagtcgtttgctctccccgagatgtcgctggatgatcaccctgacccgggcactgagggggagaagcctggggagctgatgccaagttcaggggcaaaaaccgtcctcctcaaagttcccgaagatgcagagaaccccacagaaagtgagaagcctgataccagtgcagaatctgatacagaacagaatcctgaaaggaaggtggaagaggatggagctgaggaatccgaatttaagattcagattgttcccaggcagaggaagcagaggaagattgctgtcagtgctatccagagagagtacctcgacatctccttcaacattctggacaaactgggagaacagaaagatccagatccttctactaaaggactttcaactttggaaatgccacgagaatcttcatctgcccctacgttagatgcaggtgtgccggaaacaagtagccattcctcaatatcaactcagtataggcagatgaaaaggggatccctgggagttctgacaatgagccagttaatgaagcggcagctggagcatcagtctagcgccccccataacatcagcaactgggacactgaacagatacagcctgggaaacgccagtgtaacgtgccaacgtgcctaaaccctgacctggagggacagccattgaggatgagaggtgccaccaaatccagcctgctatcagcaccaagcatagtcagtatgtttgtgcctgcacctgaagagttcactgacgagcagccgacggtgatgacggacaaatgccatgactgtggggccattcttgaagaatacgatgaagagacacttgggctagccatcgtggtcctctccacattcattcacttaagcccagacctggcagccccgctgctgctggatatcatgcagtctgtgggaagattggcatccagtactaccttttctaatcaagcagaaagcatgatggttcccggcaatgcggcgggggtggccaagcagttcctgcgctgcatcttccatcagttggcccccaacggcatcttcccgcagctgttccaaagcacgatcaaagatgggacttttttacggaccttagcctcgtctctgatggacttcaatgagctgagctccatcgcagctctcagtcagctcctagagggtctaaataacaaaaagaatttaccagcagggggtgctatgattcgctgtttggaaaacattgcaaccttcatggaagctttgcctatggattctcctagtagcctctggaccacaattagcaaccagtttcagacattttttgccaagctgccttgtgttttacctctgaagtgttctttagattccagtttaagaattatgatttgcctcttgaagatcccttctaccaatgctacaaggagtttgttggaaccattttcaaaactgctcagctttgtaattcagaatgccgtcttcactctggcctacctggtggagctgtgtggcttatgttaccgagctttcactaaggaacgagataaattctacttgtctcgtagtgttgttctagaacttctgcaggccctaaagctcaaatctcctttaccagatacaaaccttcttctgcttgttcagtttatttgtgcagatgctggaaccaaactagctgagtcaacaatcctgagcaagcagatgatagcctctgtacctggatgtgggactgcagcgatggagtgtgtgaggcagtacatcaacgaagtgctggatttcatggcagacatgcacacgctgaccaaactgaagagccacatgaagacatgttcccagcctctgcatgaagatacctttgggggacatctcaaagtggggctggcccagattgcagccatggacatctcacggggcaaccacagagataacaaagctgtgatccgctatctgccttggctttatcatcccccctctgcaatgcagcaaggacctaaagaattcattgagtgtgtctcccatatccgactgttgtcctggctgctgctgggttccctcactcacaatgcagtgtgcccaaatgcctcctctccctgcctgcccattcctctggatgcaggctcccacgttgcagaccatcttattgttatcctgattggatttccagagcaatcaaagacctccgtgctgcacatgtgctccctcttccacgcgttcatctttgctcagctgtggacagtttattgcgagcaaagtgccgtcgctacaaatctccaaaatcagaatgaattcagcttcacggcgatactgacagcactagaattttggagtagggtgacacccagcatccttcagctaatggcccataacaaagtgatggtagaaatggtgtgtctccatgtgattagtttaatggaggcattgcaggaatgcaattcgaccatttttgtcaagctgatacctatgtggttgccaatgattcagtcaaatatcaagcacttatctgcgggactccagcttcgcctccaggctattcagaaccacgtgaaccaccacagcctaaggacgctgccgggctcgggccagagcagtgctggcctggcagccctccgaaagtggttgcagtgcactcagttcaaaatggcccaggtggagatccagtcctcggaagcagcctctcaattttatcctctatga

SEQ ID NO: 343952 - protein, 2657 aa, Artificial Sequence
  derived and/or modified sequence
MNSKRHKIASKIRYLQEYHNRVLHNIYPVPSGTDIANTLKYFSQTLLSILSRTGKKENQDASNLTVPMTMCLFPVPFPLTPSLRPQVSSINPTVTRSLLYSVLRDAPSERGPQSRDAQLSDYPSLDYQGLYVTLVTLLDLVPLLQHGQHDLGQSIFYTTTCLLPFLNDDILSTLPYTMISTLATFPPFLHKDIIEYLSTSFLPMAILGSSRREGVPAHVNLSASSMLMIAMQYTSNPVYHCQLLECLMKYKQEVWKDLLYVIAYGPSQVKPPAVQMLFHYWPNLKPPGAISEYRGLQYTAWNPIHCQHIECHNAINKPAVKMCIDPSLSVALGDKPPPLYLCEECSERIAGDHSEWLIDVLLPQAEISAICQKKNCSSHVRRAVVTCFSAGCCGRHGNRPVRYCKRCHSNHHSNEVGAAAETHLYQTSPPPINTRECGAEELVCAVEAVISLLKEAEFHAEQREHELNRRRQLGLSSSHHSLDNADFDNKDDDKHDQRLLSQFGIWFLVSLCTPSENTPTESLARLVAMVFQWFHSTAYMMDDEVGSLVEKLKPQFVTKWLKTVCDVRFDVMVMCLLPKPMEFARVGGYWDKSCSTVTQLKEGLNRILCLIPYNVINQSVWECIMPEWLEAIRTEVPDNQLKEFREVLSKMFDIELCPLPFSMEEMFGFISCRFTGYPSSVQEQALLWLHVLSELDIMVPLQLLISMFSDGVNSVKELANQRKSRVSELAGNLASRRVSVASDPGRRVQHNMLSPFHSPFQSPFRSPLRSPFRSPFKNFGHPGGRTIDFDCEDDEMNLNCFILMFDLLLKQMELQDDGITMGLEHSLSKDIISIINNVFQAPWGGSHTCQKDEKAIECNLCQSSILCYQLACELLERLAPKEESRLVEPTDSLEDSLLSSRPEFIIGPEGEEEENPASKHGENPGNCTEPVEHAAVKNDTERKFCYQQLPVTLRLIYTIFQEMAKFEEPDILFNMLNCLKILCLHGECLYIARKDHPQFLAYIQDHMLIASLWRVVKSEFSQLSSLAVPLLLHALSLPHGADIFWTIINGNFNSKDWKMRFEAVEKVAVICRFLDIHSVTKNHLLKYSLAHAFCCFLTAVEDVNPAVATRAGLLLDTIKRPALQGLCLCLDFQFDTVVKDRPTILSKLLLLHFLKQDIPALSWEFFVNRFETLSLEAQLHLDCNKEFPFPTTITAVRTNVANLSDAALWKIKRARFARNRQKSVRSLRDSVKGPVESKRALSLPETLTSKIPMRLTRHEQSAPALGGTPEQTPGQQSPENDNTIKDLLPEDAGIDHQTVHQLITVLMKFMAKDESSAESDISSAKAFNTVKRHLYVLLGYDQQEGCFMIAPQKMRLSTCFNAFIAGIAQVMDYNINLGKHLLPLVVQVLKYCSCPQLRHYFQQPPRCSLWSLKPHIRQMWLKALLVILYKYPYRDCDISKILLHLIHITVNTLNAQYHSCKPHATAGPLYSDNSNISRYSEKEKGEIELAEYRETGALQDSLLHCVREESIPKKKLRSFKQKSLDIGNADSLLFTLDEHRRKSCIDRCDIEKPPTQAAYIAQRPNDPGRSRQNSATRPDNSEIPENPAMEGFPDARRPVIPEVRLNCMETFEVKVDSPVKPAPKEDLDLIDLSSDSTSGPEKHSILSTSDSDSLVFEPLPPLRIVESDEEEETMNQGDDGPSGKNAASSPSVPSHPSVLSLSTAPLVQVSVEDCSKDFSSKDSGNNQSAGNTDSALITLEDPMDAEGSSKPEELPEFSCGSPLTLKQKRDLLQKSFALPEMSLDDHPDPGTEGEKPGELMPSSGAKTVLLKVPEDAENPTESEKPDTSAESDTEQNPERKVEEDGAEESEFKIQIVPRQRKQRKIAVSAIQREYLDISFNILDKLGEQKDPDPSTKGLSTLEMPRESSSAPTLDAGVPETSSHSSISTQYRQMKRGSLGVLTMSQLMKRQLEHQSSAPHNISNWDTEQIQPGKRQCNVPTCLNPDLEGQPLRMRGATKSSLLSAPSIVSMFVPAPEEFTDEQPTVMTDKCHDCGAILEEYDEETLGLAIVVLSTFIHLSPDLAAPLLLDIMQSVGRLASSTTFSNQAESMMVPGNAAGVAKQFLRCIFHQLAPNGIFPQLFQSTIKDGTFLRTLASSLMDFNELSSIAALSQLLEGLNNKKNLPAGGAMIRCLENIATFMEALPMDSPSSLWTTISNQFQTFFAKLPCVLPLKCSLDSSLRIMICLLKIPSTNATRSLLEPFSKLLSFVIQNAVFTLAYLVELCGLCYRAFTKERDKFYLSRSVVLELLQALKLKSPLPDTNLLLLVQFICADAGTKLAESTILSKQMIASVPGCGTAAMECVRQYINEVLDFMADMHTLTKLKSHMKTCSQPLHEDTFGGHLKVGLAQIAAMDISRGNHRDNKAVIRYLPWLYHPPSAMQQGPKEFIECVSHIRLLSWLLLGSLTHNAVCPNASSPCLPIPLDAGSHVADHLIVILIGFPEQSKTSVLHMCSLFHAFIFAQLWTVYCEQSAVATNLQNQNEFSFTAILTALEFWSRVTPSILQLMAHNKVMVEMVCLHVISLMEALQECNSTIFVKLIPMWLPMIQSNIKHLSAGLQLRLQAIQNHVNHHSLRTLPGSGQSSAGLAALRKWLQCTQFKMAQVEIQSSEAASQFYPL

SEQ ID NO: 343953 - protein, 2657 aa, Artificial Sequence
  derived and/or modified sequence
MSTKAEQFASKIRYLQEYHNRVLHNIYPVPSGTDIANTLKYFSQTLLSILSRTGKKENQDASNLTVPMTMCLFPVPFPLTPSLRPQVSSINPTVTRSLLYSVLRDAPSERGPQSRDAQLSDYPSLDYQGLYVTLVTLLDLVPLLQHGQHDLGQSIFYTTTCLLPFLNDDILSTLPYTMISTLATFPPFLHKDIIEYLSTSFLPMAILGSSRREGVPAHVNLSASSMLMIAMQYTSNPVYHCQLLECLMKYKQEVWKDLLYVIAYGPSQVKPPAVQMLFHYWPNLKPPGAISEYRGLQYTAWNPIHCQHIECHNAINKPAVKMCIDPSLSVALGDKPPPLYLCEECSERIAGDHSEWLIDVLLPQAEISAICQKKNCSSHVRRAVVTCFSAGCCGRHGNRPVRYCKRCHSNHHSNEVGAAAETHLYQTSPPPINTRECGAEELVCAVEAVISLLKEAEFHAEQREHELNRRRQLGLSSSHHSLDNADFDNKDDDKHDQRLLSQFGIWFLVSLCTPSENTPTESLARLVAMVFQWFHSTAYMMDDEVGSLVEKLKPQFVTKWLKTVCDVRFDVMVMCLLPKPMEFARVGGYWDKSCSTVTQLKEGLNRILCLIPYNVINQSVWECIMPEWLEAIRTEVPDNQLKEFREVLSKMFDIELCPLPFSMEEMFGFISCRFTGYPSSVQEQALLWLHVLSELDIMVPLQLLISMFSDGVNSVKELANQRKSRVSELAGNLASRRVSVASDPGRRVQHNMLSPFHSPFQSPFRSPLRSPFRSPFKNFGHPGGRTIDFDCEDDEMNLNCFILMFDLLLKQMELQDDGITMGLEHSLSKDIISIINNVFQAPWGGSHTCQKDEKAIECNLCQSSILCYQLACELLERLAPKEESRLVEPTDSLEDSLLSSRPEFIIGPEGEEEENPASKHGENPGNCTEPVEHAAVKNDTERKFCYQQLPVTLRLIYTIFQEMAKFEEPDILFNMLNCLKILCLHGECLYIARKDHPQFLAYIQDHMLIASLWRVVKSEFSQLSSLAVPLLLHALSLPHGADIFWTIINGNFNSKDWKMRFEAVEKVAVICRFLDIHSVTKNHLLKYSLAHAFCCFLTAVEDVNPAVATRAGLLLDTIKRPALQGLCLCLDFQFDTVVKDRPTILSKLLLLHFLKQDIPALSWEFFVNRFETLSLEAQLHLDCNKEFPFPTTITAVRTNVANLSDAALWKIKRARFARNRQKSVRSLRDSVKGPVESKRALSLPETLTSKIPMRLTRHEQSAPALGGTPEQTPGQQSPENDNTIKDLLPEDAGIDHQTVHQLITVLMKFMAKDESSAESDISSAKAFNTVKRHLYVLLGYDQQEGCFMIAPQKMRLSTCFNAFIAGIAQVMDYNINLGKHLLPLVVQVLKYCSCPQLRHYFQQPPRCSLWSLKPHIRQMWLKALLVILYKYPYRDCDISKILLHLIHITVNTLNAQYHSCKPHATAGPLYSDNSNISRYSEKEKGEIELAEYRETGALQDSLLHCVREESIPKKKLRSFKQKSLDIGNADSLLFTLDEHRRKSCIDRCDIEKPPTQAAYIAQRPNDPGRSRQNSATRPDNSEIPENPAMEGFPDARRPVIPEVRLNCMETFEVKVDSPVKPAPKEDLDLIDLSSDSTSGPEKHSILSTSDSDSLVFEPLPPLRIVESDEEEETMNQGDDGPSGKNAASSPSVPSHPSVLSLSTAPLVQVSVEDCSKDFSSKDSGNNQSAGNTDSALITLEDPMDAEGSSKPEELPEFSCGSPLTLKQKRDLLQKSFALPEMSLDDHPDPGTEGEKPGELMPSSGAKTVLLKVPEDAENPTESEKPDTSAESDTEQNPERKVEEDGAEESEFKIQIVPRQRKQRKIAVSAIQREYLDISFNILDKLGEQKDPDPSTKGLSTLEMPRESSSAPTLDAGVPETSSHSSISTQYRQMKRGSLGVLTMSQLMKRQLEHQSSAPHNISNWDTEQIQPGKRQCNVPTCLNPDLEGQPLRMRGATKSSLLSAPSIVSMFVPAPEEFTDEQPTVMTDKCHDCGAILEEYDEETLGLAIVVLSTFIHLSPDLAAPLLLDIMQSVGRLASSTTFSNQAESMMVPGNAAGVAKQFLRCIFHQLAPNGIFPQLFQSTIKDGTFLRTLASSLMDFNELSSIAALSQLLEGLNNKKNLPAGGAMIRCLENIATFMEALPMDSPSSLWTTISNQFQTFFAKLPCVLPLKCSLDSSLRIMICLLKIPSTNATRSLLEPFSKLLSFVIQNAVFTLAYLVELCGLCYRAFTKERDKFYLSRSVVLELLQALKLKSPLPDTNLLLLVQFICADAGTKLAESTILSKQMIASVPGCGTAAMECVRQYINEVLDFMADMHTLTKLKSHMKTCSQPLHEDTFGGHLKVGLAQIAAMDISRGNHRDNKAVIRYLPWLYHPPSAMQQGPKEFIECVSHIRLLSWLLLGSLTHNAVCPNASSPCLPIPLDAGSHVADHLIVILIGFPEQSKTSVLHMCSLFHAFIFAQLWTVYCEQSAVATNLQNQNEFSFTAILTALEFWSRVTPSILQLMAHNKVMVEMVCLHVISLMEALQECNSTIFVKLIPMWLPMIQSNIKHLSAGLQLRLQAIQNHVNHHSLRTLPGSGQSSAGLAALRKWLQCTQFKMAQVEIQSSEAASQFYPL

SEQ ID NO: 343954 - DNA, 7974 bp, Artificial Sequence
  derived and/or modified sequence
atgaacagcaagagacacaagatcgccagcaagatcagatacctgcaggagtaccacaacagagtgctgcacaacatctaccccgtgcccagcggcaccgacatcgccaacaccctgaagtacttcagccagaccctgctgagcatcctgagcagaaccggcaagaaggagaaccaggacgccagcaacctgaccgtgcccatgaccatgtgcctgttccccgtgcccttccccctgacccccagcctgagaccccaggtgagcagcatcaaccccaccgtgaccagaagcctgctgtacagcgtgctgagagacgcccccagcgagagaggcccccagagcagagacgcccagctgagcgactaccccagcctggactaccagggcctgtacgtgaccctggtgaccctgctggacctggtgcccctgctgcagcacggccagcacgacctgggccagagcatcttctacaccaccacctgcctgctgcccttcctgaacgacgacatcctgagcaccctgccctacaccatgatcagcaccctggccaccttcccccccttcctgcacaaggacatcatcgagtacctgagcaccagcttcctgcccatggccatcctgggcagcagcagaagagagggcgtgcccgcccacgtgaacctgagcgccagcagcatgctgatgatcgccatgcagtacaccagcaaccccgtgtaccactgccagctgctggagtgcctgatgaagtacaagcaggaggtgtggaaggacctgctgtacgtgatcgcctacggccccagccaggtgaagccccccgccgtgcagatgctgttccactactggcccaacctgaagccccccggcgccatcagcgagtacagaggcctgcagtacaccgcctggaaccccatccactgccagcacatcgagtgccacaacgccatcaacaagcccgccgtgaagatgtgcatcgaccccagcctgagcgtggccctgggcgacaagcccccccccctgtacctgtgcgaggagtgcagcgagagaatcgccggcgaccacagcgagtggctgatcgacgtgctgctgccccaggccgagatcagcgccatctgccagaagaagaactgcagcagccacgtgagaagagccgtggtgacctgcttcagcgccggctgctgcggcagacacggcaacagacccgtgagatactgcaagagatgccacagcaaccaccacagcaacgaggtgggcgccgccgccgagacccacctgtaccagaccagccccccccccatcaacaccagagagtgcggcgccgaggagctggtgtgcgccgtggaggccgtgatcagcctgctgaaggaggccgagttccacgccgagcagagagagcacgagctgaacagaagaagacagctgggcctgagcagcagccaccacagcctggacaacgccgacttcgacaacaaggacgacgacaagcacgaccagagactgctgagccagttcggcatctggttcctggtgagcctgtgcacccccagcgagaacacccccaccgagagcctggccagactggtggccatggtgttccagtggttccacagcaccgcctacatgatggacgacgaggtgggcagcctggtggagaagctgaagccccagttcgtgaccaagtggctgaagaccgtgtgcgacgtgagattcgacgtgatggtgatgtgcctgctgcccaagcccatggagttcgccagagtgggcggctactgggacaagagctgcagcaccgtgacccagctgaaggagggcctgaacagaatcctgtgcctgatcccctacaacgtgatcaaccagagcgtgtgggagtgcatcatgcccgagtggctggaggccatcagaaccgaggtgcccgacaaccagctgaaggagttcagagaggtgctgagcaagatgttcgacatcgagctgtgccccctgcccttcagcatggaggagatgttcggcttcatcagctgcagattcaccggctaccccagcagcgtgcaggagcaggccctgctgtggctgcacgtgctgagcgagctggacatcatggtgcccctgcagctgctgatcagcatgttcagcgacggcgtgaacagcgtgaaggagctggccaaccagagaaagagcagagtgagcgagctggccggcaacctggccagcagaagagtgagcgtggccagcgaccccggcagaagagtgcagcacaacatgctgagccccttccacagccccttccagagccccttcagaagccccctgagaagccccttcagaagccccttcaagaacttcggccaccccggcggcagaaccatcgacttcgactgcgaggacgacgagatgaacctgaactgcttcatcctgatgttcgacctgctgctgaagcagatggagctgcaggacgacggcatcaccatgggcctggagcacagcctgagcaaggacatcatcagcatcatcaacaacgtgttccaggccccctggggcggcagccacacctgccagaaggacgagaaggccatcgagtgcaacctgtgccagagcagcatcctgtgctaccagctggcctgcgagctgctggagagactggcccccaaggaggagagcagactggtggagcccaccgacagcctggaggacagcctgctgagcagcagacccgagttcatcatcggccccgagggcgaggaggaggagaaccccgccagcaagcacggcgagaaccccggcaactgcaccgagcccgtggagcacgccgccgtgaagaacgacaccgagagaaagttctgctaccagcagctgcccgtgaccctgagactgatctacaccatcttccaggagatggccaagttcgaggagcccgacatcctgttcaacatgctgaactgcctgaagatcctgtgcctgcacggcgagtgcctgtacatcgccagaaaggaccacccccagttcctggcctacatccaggaccacatgctgatcgccagcctgtggagagtggtgaagagcgagttcagccagctgagcagcctggccgtgcccctgctgctgcacgccctgagcctgccccacggcgccgacatcttctggaccatcatcaacggcaacttcaacagcaaggactggaagatgagattcgaggccgtggagaaggtggccgtgatctgcagattcctggacatccacagcgtgaccaagaaccacctgctgaagtacagcctggcccacgccttctgctgcttcctgaccgccgtggaggacgtgaaccccgccgtggccaccagagccggcctgctgctggacaccatcaagagacccgccctgcagggcctgtgcctgtgcctggacttccagttcgacaccgtggtgaaggacagacccaccatcctgagcaagctgctgctgctgcacttcctgaagcaggacatccccgccctgagctgggagttcttcgtgaacagattcgagaccctgagcctggaggcccagctgcacctggactgcaacaaggagttccccttccccaccaccatcaccgccgtgagaaccaacgtggccaacctgagcgacgccgccctgtggaagatcaagagagccagattcgccagaaacagacagaagagcgtgagaagcctgagagacagcgtgaagggccccgtggagagcaagagagccctgagcctgcccgagaccctgaccagcaagatccccatgagactgaccagacacgagcagagcgcccccgccctgggcggcacccccgagcagacccccggccagcagagccccgagaacgacaacaccatcaaggacctgctgcccgaggacgccggcatcgaccaccagaccgtgcaccagctgatcaccgtgctgatgaagttcatggccaaggacgagagcagcgccgagagcgacatcagcagcgccaaggccttcaacaccgtgaagagacacctgtacgtgctgctgggctacgaccagcaggagggctgcttcatgatcgccccccagaagatgagactgagcacctgcttcaacgccttcatcgccggcatcgcccaggtgatggactacaacatcaacctgggcaagcacctgctgcccctggtggtgcaggtgctgaagtactgcagctgcccccagctgagacactacttccagcagccccccagatgcagcctgtggagcctgaagccccacatcagacagatgtggctgaaggccctgctggtgatcctgtacaagtacccctacagagactgcgacatcagcaagatcctgctgcacctgatccacatcaccgtgaacaccctgaacgcccagtaccacagctgcaagccccacgccaccgccggccccctgtacagcgacaacagcaacatcagcagatacagcgagaaggagaagggcgagatcgagctggccgagtacagagagaccggcgccctgcaggacagcctgctgcactgcgtgagagaggagagcatccccaagaagaagctgagaagcttcaagcagaagagcctggacatcggcaacgccgacagcctgctgttcaccctggacgagcacagaagaaagagctgcatcgacagatgcgacatcgagaagccccccacccaggccgcctacatcgcccagagacccaacgaccccggcagaagcagacagaacagcgccaccagacccgacaacagcgagatccccgagaaccccgccatggagggcttccccgacgccagaagacccgtgatccccgaggtgagactgaactgcatggagaccttcgaggtgaaggtggacagccccgtgaagcccgcccccaaggaggacctggacctgatcgacctgagcagcgacagcaccagcggccccgagaagcacagcatcctgagcaccagcgacagcgacagcctggtgttcgagcccctgccccccctgagaatcgtggagagcgacgaggaggaggagaccatgaaccagggcgacgacggccccagcggcaagaacgccgccagcagccccagcgtgcccagccaccccagcgtgctgagcctgagcaccgcccccctggtgcaggtgagcgtggaggactgcagcaaggacttcagcagcaaggacagcggcaacaaccagagcgccggcaacaccgacagcgccctgatcaccctggaggaccccatggacgccgagggcagcagcaagcccgaggagctgcccgagttcagctgcggcagccccctgaccctgaagcagaagagagacctgctgcagaagagcttcgccctgcccgagatgagcctggacgaccaccccgaccccggcaccgagggcgagaagcccggcgagctgatgcccagcagcggcgccaagaccgtgctgctgaaggtgcccgaggacgccgagaaccccaccgagagcgagaagcccgacaccagcgccgagagcgacaccgagcagaaccccgagagaaaggtggaggaggacggcgccgaggagagcgagttcaagatccagatcgtgcccagacagagaaagcagagaaagatcgccgtgagcgccatccagagagagtacctggacatcagcttcaacatcctggacaagctgggcgagcagaaggaccccgaccccagcaccaagggcctgagcaccctggagatgcccagagagagcagcagcgcccccaccctggacgccggcgtgcccgagaccagcagccacagcagcatcagcacccagtacagacagatgaagagaggcagcctgggcgtgctgaccatgagccagctgatgaagagacagctggagcaccagagcagcgccccccacaacatcagcaactgggacaccgagcagatccagcccggcaagagacagtgcaacgtgcccacctgcctgaaccccgacctggagggccagcccctgagaatgagaggcgccaccaagagcagcctgctgagcgcccccagcatcgtgagcatgttcgtgcccgcccccgaggagttcaccgacgagcagcccaccgtgatgaccgacaagtgccacgactgcggcgccatcctggaggagtacgacgaggagaccctgggcctggccatcgtggtgctgagcaccttcatccacctgagccccgacctggccgcccccctgctgctggacatcatgcagagcgtgggcagactggccagcagcaccaccttcagcaaccaggccgagagcatgatggtgcccggcaacgccgccggcgtggccaagcagttcctgagatgcatcttccaccagctggcccccaacggcatcttcccccagctgttccagagcaccatcaaggacggcaccttcctgagaaccctggccagcagcctgatggacttcaacgagctgagcagcatcgccgccctgagccagctgctggagggcctgaacaacaagaagaacctgcccgccggcggcgccatgatcagatgcctggagaacatcgccaccttcatggaggccctgcccatggacagccccagcagcctgtggaccaccatcagcaaccagttccagaccttcttcgccaagctgccctgcgtgctgcccctgaagtgcagcctggacagcagcctgagaatcatgatctgcctgctgaagatccccagcaccaacgccaccagaagcctgctggagcccttcagcaagctgctgagcttcgtgatccagaacgccgtgttcaccctggcctacctggtggagctgtgcggcctgtgctacagagccttcaccaaggagagagacaagttctacctgagcagaagcgtggtgctggagctgctgcaggccctgaagctgaagagccccctgcccgacaccaacctgctgctgctggtgcagttcatctgcgccgacgccggcaccaagctggccgagagcaccatcctgagcaagcagatgatcgccagcgtgcccggctgcggcaccgccgccatggagtgcgtgagacagtacatcaacgaggtgctggacttcatggccgacatgcacaccctgaccaagctgaagagccacatgaagacctgcagccagcccctgcacgaggacaccttcggcggccacctgaaggtgggcctggcccagatcgccgccatggacatcagcagaggcaaccacagagacaacaaggccgtgatcagatacctgccctggctgtaccacccccccagcgccatgcagcagggccccaaggagttcatcgagtgcgtgagccacatcagactgctgagctggctgctgctgggcagcctgacccacaacgccgtgtgccccaacgccagcagcccctgcctgcccatccccctggacgccggcagccacgtggccgaccacctgatcgtgatcctgatcggcttccccgagcagagcaagaccagcgtgctgcacatgtgcagcctgttccacgccttcatcttcgcccagctgtggaccgtgtactgcgagcagagcgccgtggccaccaacctgcagaaccagaacgagttcagcttcaccgccatcctgaccgccctggagttctggagcagagtgacccccagcatcctgcagctgatggcccacaacaaggtgatggtggagatggtgtgcctgcacgtgatcagcctgatggaggccctgcaggagtgcaacagcaccatcttcgtgaagctgatccccatgtggctgcccatgatccagagcaacatcaagcacctgagcgccggcctgcagctgagactgcaggccatccagaaccacgtgaaccaccacagcctgagaaccctgcccggcagcggccagagcagcgccggcctggccgccctgagaaagtggctgcagtgcacccagttcaagatggcccaggtggagatccagagcagcgaggccgccagccagttctaccccctgtag

SEQ ID NO: 343955 - DNA, 7974 bp, Artificial Sequence
  derived and/or modified sequence
atgagcaccaaggccgagcagttcgccagcaagatcagatacctgcaggagtaccacaacagagtgctgcacaacatctaccccgtgcccagcggcaccgacatcgccaacaccctgaagtacttcagccagaccctgctgagcatcctgagcagaaccggcaagaaggagaaccaggacgccagcaacctgaccgtgcccatgaccatgtgcctgttccccgtgcccttccccctgacccccagcctgagaccccaggtgagcagcatcaaccccaccgtgaccagaagcctgctgtacagcgtgctgagagacgcccccagcgagagaggcccccagagcagagacgcccagctgagcgactaccccagcctggactaccagggcctgtacgtgaccctggtgaccctgctggacctggtgcccctgctgcagcacggccagcacgacctgggccagagcatcttctacaccaccacctgcctgctgcccttcctgaacgacgacatcctgagcaccctgccctacaccatgatcagcaccctggccaccttcccccccttcctgcacaaggacatcatcgagtacctgagcaccagcttcctgcccatggccatcctgggcagcagcagaagagagggcgtgcccgcccacgtgaacctgagcgccagcagcatgctgatgatcgccatgcagtacaccagcaaccccgtgtaccactgccagctgctggagtgcctgatgaagtacaagcaggaggtgtggaaggacctgctgtacgtgatcgcctacggccccagccaggtgaagccccccgccgtgcagatgctgttccactactggcccaacctgaagccccccggcgccatcagcgagtacagaggcctgcagtacaccgcctggaaccccatccactgccagcacatcgagtgccacaacgccatcaacaagcccgccgtgaagatgtgcatcgaccccagcctgagcgtggccctgggcgacaagcccccccccctgtacctgtgcgaggagtgcagcgagagaatcgccggcgaccacagcgagtggctgatcgacgtgctgctgccccaggccgagatcagcgccatctgccagaagaagaactgcagcagccacgtgagaagagccgtggtgacctgcttcagcgccggctgctgcggcagacacggcaacagacccgtgagatactgcaagagatgccacagcaaccaccacagcaacgaggtgggcgccgccgccgagacccacctgtaccagaccagccccccccccatcaacaccagagagtgcggcgccgaggagctggtgtgcgccgtggaggccgtgatcagcctgctgaaggaggccgagttccacgccgagcagagagagcacgagctgaacagaagaagacagctgggcctgagcagcagccaccacagcctggacaacgccgacttcgacaacaaggacgacgacaagcacgaccagagactgctgagccagttcggcatctggttcctggtgagcctgtgcacccccagcgagaacacccccaccgagagcctggccagactggtggccatggtgttccagtggttccacagcaccgcctacatgatggacgacgaggtgggcagcctggtggagaagctgaagccccagttcgtgaccaagtggctgaagaccgtgtgcgacgtgagattcgacgtgatggtgatgtgcctgctgcccaagcccatggagttcgccagagtgggcggctactgggacaagagctgcagcaccgtgacccagctgaaggagggcctgaacagaatcctgtgcctgatcccctacaacgtgatcaaccagagcgtgtgggagtgcatcatgcccgagtggctggaggccatcagaaccgaggtgcccgacaaccagctgaaggagttcagagaggtgctgagcaagatgttcgacatcgagctgtgccccctgcccttcagcatggaggagatgttcggcttcatcagctgcagattcaccggctaccccagcagcgtgcaggagcaggccctgctgtggctgcacgtgctgagcgagctggacatcatggtgcccctgcagctgctgatcagcatgttcagcgacggcgtgaacagcgtgaaggagctggccaaccagagaaagagcagagtgagcgagctggccggcaacctggccagcagaagagtgagcgtggccagcgaccccggcagaagagtgcagcacaacatgctgagccccttccacagccccttccagagccccttcagaagccccctgagaagccccttcagaagccccttcaagaacttcggccaccccggcggcagaaccatcgacttcgactgcgaggacgacgagatgaacctgaactgcttcatcctgatgttcgacctgctgctgaagcagatggagctgcaggacgacggcatcaccatgggcctggagcacagcctgagcaaggacatcatcagcatcatcaacaacgtgttccaggccccctggggcggcagccacacctgccagaaggacgagaaggccatcgagtgcaacctgtgccagagcagcatcctgtgctaccagctggcctgcgagctgctggagagactggcccccaaggaggagagcagactggtggagcccaccgacagcctggaggacagcctgctgagcagcagacccgagttcatcatcggccccgagggcgaggaggaggagaaccccgccagcaagcacggcgagaaccccggcaactgcaccgagcccgtggagcacgccgccgtgaagaacgacaccgagagaaagttctgctaccagcagctgcccgtgaccctgagactgatctacaccatcttccaggagatggccaagttcgaggagcccgacatcctgttcaacatgctgaactgcctgaagatcctgtgcctgcacggcgagtgcctgtacatcgccagaaaggaccacccccagttcctggcctacatccaggaccacatgctgatcgccagcctgtggagagtggtgaagagcgagttcagccagctgagcagcctggccgtgcccctgctgctgcacgccctgagcctgccccacggcgccgacatcttctggaccatcatcaacggcaacttcaacagcaaggactggaagatgagattcgaggccgtggagaaggtggccgtgatctgcagattcctggacatccacagcgtgaccaagaaccacctgctgaagtacagcctggcccacgccttctgctgcttcctgaccgccgtggaggacgtgaaccccgccgtggccaccagagccggcctgctgctggacaccatcaagagacccgccctgcagggcctgtgcctgtgcctggacttccagttcgacaccgtggtgaaggacagacccaccatcctgagcaagctgctgctgctgcacttcctgaagcaggacatccccgccctgagctgggagttcttcgtgaacagattcgagaccctgagcctggaggcccagctgcacctggactgcaacaaggagttccccttccccaccaccatcaccgccgtgagaaccaacgtggccaacctgagcgacgccgccctgtggaagatcaagagagccagattcgccagaaacagacagaagagcgtgagaagcctgagagacagcgtgaagggccccgtggagagcaagagagccctgagcctgcccgagaccctgaccagcaagatccccatgagactgaccagacacgagcagagcgcccccgccctgggcggcacccccgagcagacccccggccagcagagccccgagaacgacaacaccatcaaggacctgctgcccgaggacgccggcatcgaccaccagaccgtgcaccagctgatcaccgtgctgatgaagttcatggccaaggacgagagcagcgccgagagcgacatcagcagcgccaaggccttcaacaccgtgaagagacacctgtacgtgctgctgggctacgaccagcaggagggctgcttcatgatcgccccccagaagatgagactgagcacctgcttcaacgccttcatcgccggcatcgcccaggtgatggactacaacatcaacctgggcaagcacctgctgcccctggtggtgcaggtgctgaagtactgcagctgcccccagctgagacactacttccagcagccccccagatgcagcctgtggagcctgaagccccacatcagacagatgtggctgaaggccctgctggtgatcctgtacaagtacccctacagagactgcgacatcagcaagatcctgctgcacctgatccacatcaccgtgaacaccctgaacgcccagtaccacagctgcaagccccacgccaccgccggccccctgtacagcgacaacagcaacatcagcagatacagcgagaaggagaagggcgagatcgagctggccgagtacagagagaccggcgccctgcaggacagcctgctgcactgcgtgagagaggagagcatccccaagaagaagctgagaagcttcaagcagaagagcctggacatcggcaacgccgacagcctgctgttcaccctggacgagcacagaagaaagagctgcatcgacagatgcgacatcgagaagccccccacccaggccgcctacatcgcccagagacccaacgaccccggcagaagcagacagaacagcgccaccagacccgacaacagcgagatccccgagaaccccgccatggagggcttccccgacgccagaagacccgtgatccccgaggtgagactgaactgcatggagaccttcgaggtgaaggtggacagccccgtgaagcccgcccccaaggaggacctggacctgatcgacctgagcagcgacagcaccagcggccccgagaagcacagcatcctgagcaccagcgacagcgacagcctggtgttcgagcccctgccccccctgagaatcgtggagagcgacgaggaggaggagaccatgaaccagggcgacgacggccccagcggcaagaacgccgccagcagccccagcgtgcccagccaccccagcgtgctgagcctgagcaccgcccccctggtgcaggtgagcgtggaggactgcagcaaggacttcagcagcaaggacagcggcaacaaccagagcgccggcaacaccgacagcgccctgatcaccctggaggaccccatggacgccgagggcagcagcaagcccgaggagctgcccgagttcagctgcggcagccccctgaccctgaagcagaagagagacctgctgcagaagagcttcgccctgcccgagatgagcctggacgaccaccccgaccccggcaccgagggcgagaagcccggcgagctgatgcccagcagcggcgccaagaccgtgctgctgaaggtgcccgaggacgccgagaaccccaccgagagcgagaagcccgacaccagcgccgagagcgacaccgagcagaaccccgagagaaaggtggaggaggacggcgccgaggagagcgagttcaagatccagatcgtgcccagacagagaaagcagagaaagatcgccgtgagcgccatccagagagagtacctggacatcagcttcaacatcctggacaagctgggcgagcagaaggaccccgaccccagcaccaagggcctgagcaccctggagatgcccagagagagcagcagcgcccccaccctggacgccggcgtgcccgagaccagcagccacagcagcatcagcacccagtacagacagatgaagagaggcagcctgggcgtgctgaccatgagccagctgatgaagagacagctggagcaccagagcagcgccccccacaacatcagcaactgggacaccgagcagatccagcccggcaagagacagtgcaacgtgcccacctgcctgaaccccgacctggagggccagcccctgagaatgagaggcgccaccaagagcagcctgctgagcgcccccagcatcgtgagcatgttcgtgcccgcccccgaggagttcaccgacgagcagcccaccgtgatgaccgacaagtgccacgactgcggcgccatcctggaggagtacgacgaggagaccctgggcctggccatcgtggtgctgagcaccttcatccacctgagccccgacctggccgcccccctgctgctggacatcatgcagagcgtgggcagactggccagcagcaccaccttcagcaaccaggccgagagcatgatggtgcccggcaacgccgccggcgtggccaagcagttcctgagatgcatcttccaccagctggcccccaacggcatcttcccccagctgttccagagcaccatcaaggacggcaccttcctgagaaccctggccagcagcctgatggacttcaacgagctgagcagcatcgccgccctgagccagctgctggagggcctgaacaacaagaagaacctgcccgccggcggcgccatgatcagatgcctggagaacatcgccaccttcatggaggccctgcccatggacagccccagcagcctgtggaccaccatcagcaaccagttccagaccttcttcgccaagctgccctgcgtgctgcccctgaagtgcagcctggacagcagcctgagaatcatgatctgcctgctgaagatccccagcaccaacgccaccagaagcctgctggagcccttcagcaagctgctgagcttcgtgatccagaacgccgtgttcaccctggcctacctggtggagctgtgcggcctgtgctacagagccttcaccaaggagagagacaagttctacctgagcagaagcgtggtgctggagctgctgcaggccctgaagctgaagagccccctgcccgacaccaacctgctgctgctggtgcagttcatctgcgccgacgccggcaccaagctggccgagagcaccatcctgagcaagcagatgatcgccagcgtgcccggctgcggcaccgccgccatggagtgcgtgagacagtacatcaacgaggtgctggacttcatggccgacatgcacaccctgaccaagctgaagagccacatgaagacctgcagccagcccctgcacgaggacaccttcggcggccacctgaaggtgggcctggcccagatcgccgccatggacatcagcagaggcaaccacagagacaacaaggccgtgatcagatacctgccctggctgtaccacccccccagcgccatgcagcagggccccaaggagttcatcgagtgcgtgagccacatcagactgctgagctggctgctgctgggcagcctgacccacaacgccgtgtgccccaacgccagcagcccctgcctgcccatccccctggacgccggcagccacgtggccgaccacctgatcgtgatcctgatcggcttccccgagcagagcaagaccagcgtgctgcacatgtgcagcctgttccacgccttcatcttcgcccagctgtggaccgtgtactgcgagcagagcgccgtggccaccaacctgcagaaccagaacgagttcagcttcaccgccatcctgaccgccctggagttctggagcagagtgacccccagcatcctgcagctgatggcccacaacaaggtgatggtggagatggtgtgcctgcacgtgatcagcctgatggaggccctgcaggagtgcaacagcaccatcttcgtgaagctgatccccatgtggctgcccatgatccagagcaacatcaagcacctgagcgccggcctgcagctgagactgcaggccatccagaaccacgtgaaccaccacagcctgagaaccctgcccggcagcggccagagcagcgccggcctggccgccctgagaaagtggctgcagtgcacccagttcaagatggcccaggtggagatccagagcagcgaggccgccagccagttctaccccctgtag

SEQ ID NO: 343956 - DNA, 7974 bp, Artificial Sequence
  derived and/or modified sequence
atgaattctaagagacataagattgcatccaagatacggtacttgcaggaatatcataacagggtgctgcacaacatctaccccgttccctcagggactgatattgccaacacactgaagtacttctcacagacactcctgtctatcttaagccggaccggtaagaaagaaaaccaggacgccagtaacctgactgtccccatgaccatgtgcctttttcctgtgccttttccgctcacaccgtccctgcggccgcaggtgtccagcataaatccaacggtcacccgctcccttctgtacagcgttctgagagatgccccgtcagagcgagggccgcagtctcgcgatgctcagctgtccgactaccccagcctggattatcaaggattatacgtgactcttgtaaccctgctcgatttagtgccactgttgcagcacgggcagcacgatctaggacagtctatattctatacaactacttgcctgttgccctttcttaacgacgacattctgtcaacgctgccctacaccatgatctcgactctggccacctttccccccttcctccacaaggacattatcgagtatctgagtaccagctttctgccaatggccatcctaggatccagccgccgtgagggggtgcccgcgcacgtgaatctcagtgcatcctccatgttgatgatagcgatgcagtacacgtcaaaccccgtctatcactgccagctgctagagtgccttatgaaatataaacaggaagtgtggaaggacttgctctacgtaattgcctacggaccatctcaagttaagccacctgctgttcagatgctttttcactactggccaaacctgaagcccccaggcgccatcagcgaataccgaggattacagtacactgcctggaacccgatccactgtcagcacattgagtgtcacaacgccatcaataagcccgccgttaaaatgtgtatcgacccctctctgtctgtggcgctaggcgacaagccgccaccgctgtacttgtgcgaagagtgttccgagcggattgccggggaccactcagaatggcttatcgatgtactcctgccacaagctgagatctctgccatctgtcagaaaaaaaattgctcctcccatgttaggcgggcagtggtgacctgcttctcagccggatgctgtggaagacatggaaatcggcctgtgagatactgcaagcgttgtcatagtaaccaccatagcaatgaggtcggggctgcagcagagacccatctgtaccaaacctcaccaccccctatcaatacccgcgaatgcggagctgaggaactggtgtgcgcagtcgaagctgtaattagcctgcttaaagaagcggagttccatgccgaacagagggagcacgaacttaaccggcgccgtcagctgggcctctcctctagccaccactcactcgataacgcagatttcgataacaaggacgatgataaacatgatcagagactgctttctcagttcgggatctggtttctggtgtcactgtgtactcccagcgaaaacactcctaccgaaagcctcgctcggctcgtagctatggttttccagtggtttcacagtacagcgtacatgatggatgacgaggttggctctctcgtcgagaaactcaagcctcagtttgtgaccaagtggctcaaaacggtttgcgacgtgcggttcgacgtgatggtcatgtgtttgctgcccaagccaatggagttcgcccgagtcgggggttactgggataagtcatgctccactgtgactcagttgaaggaaggcctgaaccgcattctctgcttaatcccatataacgtgatcaatcagtcagtgtgggagtgcataatgcccgaatggctggaggctataaggaccgaagtgccagacaaccagctgaaggagtttagggaggtcctctcaaagatgttcgatattgagctgtgtccactgcctttctctatggaagaaatgttcggttttatttcttgtcggttcaccggctacccatcttctgtgcaggaacaggcactcctgtggctgcacgtcctgagcgagcttgacataatggtgcccctccagttactgattagtatgtttagcgatggcgtcaattctgtgaaagaattggccaatcagcgaaagtcaagagtcagcgagcttgccgggaatctagccagccggagagtgagcgtcgcctctgaccccgggcggcgagttcagcataacatgctctcccccttccactccccatttcagagtcctttcagaagcccgctaagatctccctttaggagtccatttaagaatttcggccatccagggggccgaacaattgattttgactgcgaagacgatgagatgaatctgaactgttttatcctgatgtttgatctcctcctgaagcagatggagctgcaggatgatggaattaccatgggcctagagcactctttgtcaaaggacataatatcgattataaacaacgtgttccaagccccttggggcgggtctcacacatgccagaaagatgaaaaagccattgaatgcaacctgtgccagagcagcatcctttgttaccagctcgcgtgtgaattactggaacgcctggctcctaaggaggagtccagacttgtggagcccacggatagcctggaagactcgcttctttcctctcgtcctgagttcatcataggtcccgagggggaggaagaagagaacccggcttctaaacatggcgaaaaccccggaaattgcactgaacccgtcgagcacgccgctgtgaagaacgataccgaacggaagttttgttatcagcagcttcccgtcacactgcgacttatctataccattttccaggagatggccaaattcgaggagcccgacatcttgtttaacatgctaaactgtctgaagattctgtgtcttcatggagaatgcctgtacatcgctagaaaggaccacccccagttcctggcatacattcaagaccacatgctgatcgctagcttgtggcgtgtcgttaaatcagagttctctcagttatcatctctggccgtgccactgctgctgcacgccctatccctcccacacggcgcagatatattctggacgatcatcaatggaaactttaactccaaagactggaagatgaggttcgaagccgttgaaaaggtggctgtcatctgtcgcttcctcgatattcacagcgtgactaaaaatcacctcttaaaatacagcttagcccatgctttctgttgtttccttacagccgtcgaggacgtgaatcctgctgtggccacaagggccggtctcctgttggatactatcaagcggcccgcactacagggcctgtgtttgtgtctggattttcaattcgacactgtcgtgaaagacagacctaccatcctctccaaactgctgctgctccacttcctgaagcaagacattcccgccctgagctgggagttctttgtcaacaggttcgagacactgagcttagaagcccagctgcacctcgactgcaataaagagtttccgtttccgactaccatcactgctgtgcggaccaacgtggccaacttgagcgatgctgctctgtggaagattaaaagagcacggttcgctcggaataggcagaagtcagtccggtcactacgcgacagtgtgaagggcccagtggaatccaaacgagccttgtcactgccagaaactttgacgagtaagatccctatgagattaactcgccacgagcagagcgcaccggcattaggaggcactccggaacaaactcctgggcagcaatctcccgagaacgataatactatcaaggaccttctgcccgaggatgcggggattgaccaccaaactgttcaccagctgataacggtccttatgaagtttatggcgaaggatgaaagttcagctgagtcagacatttcttcagctaaagcattcaacacagtcaagagacatctctacgtgctcctgggctacgaccagcaggagggttgcttcatgatcgcccctcagaaaatgagactgtcaacatgtttcaacgctttcattgcggggattgctcaggtaatggactataacatcaacctaggaaaacacctgctgcccctcgtggtgcaggtgctcaagtactgtagctgccctcagctcagacactatttccagcagcccccacggtgttccctctggtcactcaagccgcacatcaggcagatgtggctgaaagctctactcgtgattttatataaatatccatatcgagattgtgacattagtaaaatcttactgcatcttatccacattactgtgaacacactgaacgcgcaataccactcctgtaagcctcacgccacggcagggccactatactccgataactctaacatttcacggtactctgaaaaagagaagggagaaatcgagctggcagagtaccgggagaccggggctctgcaggactcattgctccattgtgtccgagaagaatcaataccaaaaaaaaagttacggagttttaagcagaaatctcttgatattggaaatgcagattctcttcttttcacgctggacgagcatagaagaaaatcttgcattgatcgatgcgatattgaaaagcctcctacgcaggctgcgtatattgcccaaagacctaacgacccggggcgtagccggcagaatagtgcaacccggccggacaattctgagattcctgagaacccggcaatggagggctttcctgacgctcgccgccccgttatcccagaagtgcgcctgaattgcatggagacctttgaggtcaaggttgactcccccgtgaaaccagcacccaaagaagacctggatttgatagatctttctagcgatagcacatctggtccggagaagcactcgatcttgtcaactagcgactcggattctctggtctttgaacccttgccacccctccgcattgtggaatccgacgaggaggaggaaaccatgaaccagggggacgacggacccagcggaaaaaatgcggcctcttctccttcagttcccagccacccttccgtgctctcattgtcaacagcacctcttgttcaggtgtctgtcgaggactgtagtaaagacttctcatccaaagattccggaaacaaccaatccgccggtaatacggattcagccctcatcactctcgaggaccctatggatgcagagggaagttcaaagccagaagagttacctgagttttcatgcggatccccattgactctgaagcaaaaaagagaccttttgcaaaagtcctttgctttgcctgaaatgtctctagacgatcatcctgaccccggaaccgaaggcgaaaagcctggtgaactgatgccttcaagtggagcaaaaactgttctcctgaaggttcccgaagatgctgagaaccctactgaaagcgaaaagcccgatacctcagccgagtcagacacggagcagaaccctgaacgcaaggtggaagaggatggagcagaggaatctgaatttaaaattcaaatcgttccaaggcaacgtaagcagagaaagattgcagttagcgccatccagcgggagtacttagatatatcttttaacatcctggacaaattaggagagcagaaggatcctgatccctccaccaagggtctttccacgctagagatgccacgtgagagctcctcagccccaacactggacgccggcgtccccgagacaagcagccactcatctatctccacgcagtatcgacagatgaagagggggagtctgggtgtgctgacaatgagccagttaatgaagagacagctcgagcaccaaagctcggccccgcacaatatcagcaattgggacaccgagcagatacagccgggcaaacggcagtgcaacgtacccacctgcctgaaccccgacctggagggccagccgctgcgtatgcggggtgctacaaagtcttccctgttgtctgccccaagcatcgtcagtatgtttgtgcctgcaccagaggaattcacagatgagcagcctacagtgatgaccgataaatgccatgattgcggcgccattctggaagagtatgatgaggaaactttgggcctggccatagtggttctgtcgacgtttatacacctgtcgccagaccttgctgcacctctcctgctcgacattatgcaatcagtggggagattggcatctagcacaacattctctaatcaagccgaatccatgatggtccccggcaatgctgctggtgtcgcgaaacagtttctacggtgcatttttcaccagctcgcccctaatggtatcttcccacagctgttccagtccacaattaaggatgggaccttcctgagaacattggcaagctctctcatggacttcaacgaactctcttccattgcagccctgagtcagttgctggaaggtctgaacaataagaaaaacttacccgccggaggggcaatgattagatgcttggaaaacattgctacattcatggaagcgctgccaatggactcaccaagcagcctgtggactaccatatctaaccaattccaaacattttttgccaaacttccatgtgtgttgcccttaaagtgttccctggattctagcctgcgaattatgatttgtcttttgaagatcccctcaacaaacgccacccggagtctgctcgaacccttctccaagctgctgtcattcgtcatccagaacgccgtcttcacccttgcatacttggtggagctctgtggactgtgttatcgcgcctttaccaaagagcgcgataaattttatctgtcccggtcagtggtgctggagcttctgcaggctttgaagcttaagagccctctccctgacacaaacctacttcttctggtgcagttcatctgtgccgatgcggggactaagctggccgaatcaactattttgagcaaacagatgatcgcttccgttcctggatgcggaacagctgcaatggagtgcgtgcggcaatatatcaatgaagtattagacttcatggcagacatgcatactttgacaaagctcaaatcccacatgaagacctgttcccagccccttcatgaggacactttcgggggccacctgaaagtgggcctggcacagatagccgcaatggatatcagcaggggcaaccaccgagacaacaaagccgttatccggtaccttccatggttataccacccccccagtgccatgcagcaagggccaaaagaatttatagaatgtgtctcccatattcgtctccttagctggctacttctgggctccctgacacataatgctgtgtgtcccaatgcctctagcccctgcttgcctatcccactggatgccggttcacacgttgcagatcacctgatagtcatcctcattggtttcccagagcagagcaagacgtccgtccttcatatgtgctccttatttcatgcctttatttttgcccaactgtggaccgtgtactgcgagcagagtgctgtggctacaaatctccaaaatcagaatgaatttagtttcactgccatccttacagctttggagttttggagccgagtgactccttcgatcctgcagctaatggcccataacaaggttatggttgaaatggtttgtttacacgtgatctccttgatggaggctttacaggagtgcaattcaacaatttttgtgaaactgattccaatgtggttgccaatgattcaaagcaatattaaacacctctccgcagggcttcagcttagactgcaggccatccagaaccacgttaaccatcatagcttgaggactctgcccggatccggacaaagttcagcagggcttgccgcccttaggaagtggctgcaatgtactcagtttaaaatggcccaagtcgagatccagtcaagcgaagccgccagccagttttacccgctatag

SEQ ID NO: 343957 - DNA, 7974 bp, Artificial Sequence
  derived and/or modified sequence
atgtcaacaaaggctgaacagtttgccagtaaaattagatacctccaggaataccacaatcgcgtactacacaacatttacccggtgccatctggcactgatattgcaaatactctgaagtacttctcgcagacacttctgtccatcctgagcaggacagggaaaaaggagaatcaggacgcttcaaatctgaccgttccaatgacaatgtgtctcttccccgtgccttttcccctaacaccatctctcaggccccaagttagctctatcaaccccaccgtcacaagaagcctactgtattctgtccttcgggatgccccctctgagaggggtccccagtctagggacgctcagctgtcggattatccaagcctcgactatcaaggcctgtacgtgaccttggtgactctgctggacctggtccccctgctccaacacggccagcatgatttgggacagtcaatcttttatactaccacatgcctgctacccttcctgaacgatgatatcctctctacactgccttacacaatgatttctacccttgcgaccttcccaccattcctacacaaagatatcatagagtaccttagcacatctttccttcctatggctattctgggctcctccaggagagaaggtgttccagcccatgtaaacttgtcagcatcatcaatgctaatgatcgctatgcaatataccagcaacccggtctaccactgtcagctcctggagtgtctgatgaaatacaaacaagaagtgtggaaggatctcctttacgttatcgcctatggcccttcgcaggtgaagcctcccgcagtgcagatgctatttcattattggccaaacctgaagccccccggggctatttctgagtaccgaggtcttcagtatacagcctggaacccaatccattgtcagcacattgagtgtcacaacgctatcaataaacccgctgtaaagatgtgtattgatccctcactgagcgtcgccctgggcgataagccacctcccctctatctgtgcgaagagtgttcggaaaggatcgctggcgatcatagcgaatggctaatcgatgtgttgctgccccaagcagagataagcgccatttgtcagaagaagaactgttccagccacgtgaggcgcgctgttgttacatgcttcagcgccggctgctgtggtcggcacggaaacagaccggtccgctactgcaagcggtgccatagcaatcaccattccaacgaggtcggagctgctgctgagacccatctttatcagacctctcctccacctatcaatacaagagaatgcggcgcggaagagctcgtctgcgctgtcgaggccgttatctccctcctgaaggaggccgagttccacgccgagcaacgcgaacacgaactgaaccgacggcggcagctcgggctctcctcaagccatcattcactggacaatgccgattttgacaataaagacgacgataagcacgaccagagactgcttagccagtttggtatctggtttttagtcagcctttgtaccccttctgagaacacacccaccgaaagcctggctaggttggtagcgatggtcttccagtggttccattcaactgcatacatgatggacgacgaggtgggtagcctggtcgaaaaactcaaaccccagttcgtgaccaagtggttaaagacagtctgcgacgtgcgcttcgacgtaatggtgatgtgcctgctgcctaagcccatggaattcgcgcgcgttggcggttactgggacaaaagctgctcaactgtcacacagctcaaggagggactcaacagaatcctgtgtctgatcccttacaatgtgatcaaccaaagcgtttgggagtgtattatgcctgaatggctggaggccatccgaactgaggtgcctgataatcagctgaaggagttccgggaggtcctttccaaaatgttcgacatcgaattgtgccctctgcctttcagcatggaggaaatgtttggctttatctcgtgccgctttacaggctaccctagttcagtgcaggaacaggcactgctgtggttgcatgtgctctccgagcttgacatcatggtccctctgcagctgcttatttcaatgttttccgatggagtaaatagtgttaaagagctggcaaatcagcgaaaaagtcgtgtgagcgaactagccgggaacctggcaagcagacgtgtgagcgtggcctccgaccctggccgaagagttcaacacaacatgctgtcgccattccacagcccatttcagtccccctttcggagcccgttacggtccccctttaggtcacccttcaaaaatttcggacaccccggaggaagaactatcgactttgactgtgaagacgacgagatgaacttgaactgctttattctgatgtttgacctcctgctgaaacagatggagctgcaggatgacgggattaccatgggtctggaacacagcctttctaaagacatcatcagcatcatcaataatgtgttccaggctccttggggcggatcacacacctgccaaaaagatgaaaaggcaatcgagtgcaatctctgccagagttccattttatgctaccagttggcctgcgagctcctcgagcggctagctcctaaagaggagagcaggctggtagaacccaccgacagcttggaggacagtcttctctccagccggcctgaattcatcatcggcccagaaggagaggaggaggagaacccagcctctaagcatggagagaaccccggaaactgtactgagcccgtggaacatgccgcagtgaaaaacgacacagagcgcaaattctgttaccagcagctgcctgttacacttaggctgatctatacaatctttcaggaaatggcaaaattcgaagaaccagacatcctgtttaacatgctaaactgccttaaaattctgtgtttacatggagagtgcttgtatatagctcgcaaagaccatcctcaatttcttgcttacatacaggaccacatgttaatcgccagcttatggagagtcgttaagtcggagttcagccaacttagctctctagccgtcccgctgttgctgcatgctctaagcctgcctcatggcgccgatatcttctggactattatcaatgggaactttaacagcaaggactggaaaatgcggtttgaggccgtggaaaaagtcgccgtaatctgcagattcctggatattcactctgtgaccaaaaatcacctcctgaagtactctctggctcacgccttctgttgttttctgactgcggtcgaggacgttaaccccgctgttgccacccgggcaggacttttgctcgataccatcaaacggccggctttgcagggcctctgtttgtgtctagactttcaattcgacacggttgtgaaggacaggcctacaattctaagtaaactactgctgttgcacttcctcaagcaggatatacctgcactttcttgggagttctttgtgaaccgctttgagaccttatctttggaggcccagctacaccttgattgcaataaagagttcccctttcccacaacaattacagccgttcgtactaacgttgcaaacctgtcagacgccgcattatggaagatcaagagggcccgttttgctagaaacagacagaaatcggtgcgttctctcagagattccgtgaaaggtccagtggaatctaagagggcgctttcgttgccagagaccctgactagtaagatcccgatgaggctgactcgccatgagcagagcgcgccagcgttgggagggacacccgaacaaacacccgggcagcagagcccggagaacgacaatactattaaggatcttctccctgaagatgcagggatcgaccaccagacagtgcatcagctgattacagtgctgatgaaattcatggctaaggacgaatcttccgccgagtctgacatttcctcagcaaaggcttttaacactgtgaaacggcacctgtacgttttacttggttatgaccagcaggagggctgctttatgattgctccgcaaaagatgcggctttccacatgtttcaatgcatttattgccggaatcgctcaggtcatggactataacattaatctcggtaaacatctgctgcccctcgttgtgcaggtgttaaagtattgttcttgtccccaactaagacactatttccaacaacctcctagatgttctctgtggtctctaaagcctcacatcaggcagatgtggctaaaggcactgcttgttatcctgtacaagtatccgtatcgggactgcgatatcagcaagatcctcctgcatctcattcacattaccgtcaacactttgaacgctcaataccatagctgcaaaccccacgcaaccgcagggcccctatattctgataattccaacatctctaggtatagtgaaaaagagaaaggagagatcgagctcgctgaataccgcgagaccggagctctccaggactcattattacattgtgtacgggaggagtccattccaaagaagaaattaagatctttcaagcaaaagtcccttgacatcggcaatgcggactctctgttgttcacccttgacgagcaccgccgaaaatcttgcattgaccggtgtgatattgaaaagccccctacccaggccgcttacatagcgcaacggccgaatgacccaggcagatcacgtcaaaactctgccacaagaccagataactcggaaataccagaaaacccggccatggagggttttcccgacgcccggcggcccgtaatccctgaggttagattaaactgtatggaaaccttcgaagtgaaagtggactccccggttaaaccggcaccaaaggaggacctcgacctgatcgacctcagttctgactcaacgagcggccctgagaaacactcaatactctcgacatccgactcggactcattggtatttgagcccctgcccccgctgcggatagtggagtccgacgaggaggaggaaaccatgaatcagggcgacgatggtccctccggaaagaacgccgctagtagcccctccgtgccttcccacccaagtgtgctgtcccttagcacagcacccctggtccaggtgtctgtggaagattgcagcaaggacttcagtagtaaggatagcggcaacaaccaatcagcagggaatactgactcagctttgatcacattggaggaccctatggacgctgaggggtcaagtaagcccgaggaattgccagaattttcgtgcggaagccccctaacattaaagcaaaagagggacttgctacagaagagtttcgcgctgcctgagatgtcgctggatgaccatcccgacccaggaaccgagggagaaaaaccaggcgagttgatgcctagcagcggcgccaagactgtgctgctcaaggttcctgaagacgcagaaaatcccactgaatccgagaaacccgatactagcgctgagagcgatacagaacaaaatcctgagcggaaagtcgaggaggatggcgcggaagaaagtgaattcaagatccaaatcgtcccaagacaacggaagcagcgtaagatcgccgttagcgcaatccagcgcgagtacttggacatttcattcaacatcttagacaaactcggcgagcagaaggacccagacccaagcaccaaggggctctctactctcgagatgcccagagaaagttctagcgcccctacactggacgccggagtccccgagacatccagccacagctctatttctacccaatatcggcagatgaagcggggatctctcggtgttcttaccatgtcccagctgatgaaaagacagctggagcaccagtccagcgctccccacaatatctcaaactgggacactgaacagatccagcccggcaagcggcagtgtaacgtcccaacatgcctgaacccagatcttgagggccaacctctgagaatgcgtggagcaacgaaaagcagcctgctgtccgctccaagcattgtgagtatgtttgtcccggcccctgaggaattcactgacgagcaacctacggtgatgaccgataagtgtcacgattgcggggctattctggaagaatatgatgaagagactctcggcttggcgattgtggtgctgtcaacctttatccatctgagccctgatctggccgcgcccttactcctcgatattatgcaaagtgttggaagattagccagtagcaccacattctctaatcaggctgaaagcatgatggtcccaggaaatgccgctggcgtagcaaaacagttcctccgctgtatttttcatcagctggctccaaacgggattttcccacaactgtttcagtcaactatcaaggacggtaccttcctgagaaccttggcatcgagcctcatggacttcaacgagctgtcttctattgctgcacttagtcaactacttgaaggtctgaataataagaaaaatttgcctgccgggggcgctatgataaggtgtttagagaacatcgccacttttatggaagctttgcctatggactcccccagttccttgtggaccaccattagtaatcagtttcagaccttctttgcgaagttaccctgcgtgcttcctctgaaatgcagcctggatagctcactaagaattatgatctgtttactcaagatcccttctacaaatgccacccggtcccttctggaacctttctctaaactgttgtccttcgttatccagaacgcagtgtttacgttggcatacctcgtggaattgtgtggtctgtgttatcgcgcctttacaaaggagagagataagttctatctgtcccgcagcgtggtcctagagcttttacaagctctgaagttaaaatctccgctccctgatacaaatctcctgctcctggttcagttcatttgtgccgacgctggaaccaagttagccgaatccaccatcttatctaagcagatgatcgcgagcgtcccaggatgcggtacagccgctatggagtgcgtccgacagtacatcaatgaggtccttgacttcatggcagacatgcacacgctgaccaaacttaagagtcacatgaagacatgttcgcaaccattgcatgaagacacattcggggggcacttgaaggtgggactcgcccaaatagctgcgatggatatttcacgcggaaaccacagggacaataaggctgtcatccgttacctgccatggctctatcatcctcctagcgccatgcagcaaggtcccaaggagtttatcgagtgtgtcagtcatattcgcctactttcatggctgttgttgggtagccttactcataacgcggtgtgtcctaacgcttcttccccttgccttccaatccccctggacgccgggagccacgtcgctgaccacttgatcgtgattctgatcggcttccctgaacagtctaagacctcggtgctacatatgtgctcactgttccatgccttcatcttcgcgcaactgtggacggtatattgcgaacagtctgccgttgcaacaaaccttcagaaccagaatgaattctccttcacggccattctcaccgcgctggaattctggagccgggtcactccttctatactgcaactaatggctcacaacaaagtcatggtcgagatggtttgcctccacgtcatctctctgatggaagcactgcaagagtgcaatagtaccatcttcgttaagcttatcccaatgtggctgccaatgatccagtcaaatataaagcacctgtcggctggacttcagcttcgcctccaagcaattcagaaccacgtgaaccatcatagtctgcggaccctcccaggtagcggacagagttctgccggcctggcagccttacggaaatggttgcagtgtacccagtttaagatggcccaagtcgagattcagtctagtgaggcggcttctcagttctaccccctctag

SEQ ID NO: 343958 - DNA, 7974 bp, Artificial Sequence
  derived and/or modified sequence
atgaacagcaagaggcacaagatcgccagcaagatccgctacctgcaggagtaccacaacagagtgctgcacaacatctaccctgtgcccagcggcacagacatcgccaacaccctgaagtacttcagccagaccctgctgagcatcctgagcaggacaggcaagaaggagaaccaggatgccagcaacctgactgtgcccatgaccatgtgcctcttccctgtgcccttccccctgacccccagcctgcggccccaggtgagcagcatcaaccccaccgtgaccaggagcctgctgtacagcgtgctgagagatgcccccagcgagcggggcccccagagcagagatgcccagctgagtgactaccccagcctggactaccagggcctgtatgtgaccctggtgaccctgctggacctggtgcccctgctgcagcacggccagcacgacctgggccagagcatcttctacaccaccacctgcctgctgcccttcctgaatgatgacatcctgagcaccctgccctacaccatgatcagcaccctggccaccttcccccccttcctgcacaaggacatcatcgagtacctgagcaccagcttcctgcccatggccatcctgggcagcagcagaagagagggcgtgcctgcccacgtgaacctgagcgccagctccatgctgatgattgccatgcagtacaccagcaaccctgtgtaccactgccagctgctggagtgcctgatgaagtacaagcaggaggtgtggaaggacctgctgtatgtgattgcctacggccccagccaggtgaagcccccagctgtgcagatgctgttccactactggcccaacctgaagcccccaggggccatcagcgagtaccggggcctgcagtacacagcctggaaccccatccactgccagcacatcgagtgccacaatgccatcaacaagccagctgtgaagatgtgcatcgaccccagcctgtctgtggccctgggggacaagcccccacccctgtacctgtgtgaggagtgcagcgagagaattgctggggaccacagcgagtggctgattgatgtgctgctgccccaggccgagatcagcgccatctgccagaagaagaactgcagcagccacgtgagaagagctgtggtgacctgcttctctgctggctgctgcggccgccacggcaacagacctgtgcgctactgcaagcgctgccacagcaaccaccacagcaatgaggtgggcgctgctgctgagacccacctgtaccagaccagccccccacccatcaacacccgggagtgtggggctgaggagctggtgtgtgctgtggaggccgtcatcagcctgctgaaggaggccgagttccacgccgagcagcgggagcacgagctgaacagaagacggcagctgggcctgagcagcagccaccacagcctggacaatgctgactttgacaacaaggatgatgacaagcatgaccagaggctgctgagccagtttggcatctggttcctggtgtccctgtgcaccccatctgagaacacccccacagagagcctggcccggctggtggccatggtgttccagtggttccacagcacagcctacatgatggatgatgaggtgggcagcctggtggagaagctgaagccccagtttgtgaccaagtggctgaagacagtgtgtgatgtgcgctttgatgtgatggtgatgtgcctgctgcccaagcccatggagtttgcccgggtgggcggctactgggacaagagctgcagcacagtgacccagctgaaggagggcctgaaccgcatcctgtgcctgatcccctacaacgtcatcaaccagagcgtgtgggagtgcatcatgcctgagtggctggaggccatcagaacagaggtgcctgacaaccagctgaaggagttccgggaggtgctgagcaagatgtttgacatcgagctgtgccccctgcccttctccatggaggagatgtttggcttcatcagctgccgcttcaccggctaccccagctctgtgcaggagcaggccctgctgtggctgcacgtgctgtctgagctggacatcatggtgcccctgcagctgctgatctccatgttcagtgatggagtgaacagcgtgaaggagctggccaaccagaggaagagccgggtgtctgagctggccggcaacctggccagccggcgggtgtctgtggccagtgaccccggccggcgggtgcagcacaacatgctgagccccttccacagccccttccagagccccttccgcagccccctgcggagccccttccgcagccccttcaagaactttggccaccctgggggccgcaccatcgactttgactgtgaagatgatgagatgaacctgaactgcttcatcctgatgtttgacctgctgctgaagcagatggagctgcaggatgatggcatcaccatgggcctggagcacagcctgagcaaggacatcatcagcatcatcaacaacgtgttccaggccccctggggcggcagccacacctgccagaaggatgagaaggccatcgagtgcaacctgtgccagagcagcatcctgtgctaccagctggcctgtgagctgctggagcggctggcccccaaggaggagagccggctggtggagcccacagacagcctggaggacagcctgctgagcagcaggcctgagttcatcatcggccctgagggggaggaggaggagaacccagccagcaagcacggggagaaccctggcaactgcacagagcctgtggagcacgccgctgtgaagaatgacacagagaggaagttctgctaccagcagctgcctgtgaccctgcggctcatctacaccatcttccaggagatggccaagtttgaggagccagacatcctcttcaacatgctgaactgcctgaagatcctgtgcctgcatggagaatgtctgtacatcgccaggaaggaccacccccagttcctggcctacatccaggaccacatgctgattgccagcctgtggagggtggtgaagtctgagttcagccagctgagcagcctggccgtgcccctgctgctgcacgccctgagcctgccccatggagctgacatcttctggaccatcatcaatggaaacttcaacagcaaggactggaagatgagatttgaagctgtggagaaggtggccgtcatctgccgcttcctggacatccacagcgtgaccaagaaccacctgctgaagtacagcctggcccacgccttctgctgcttcctgacagctgtggaggatgtgaacccagctgtggccaccagggctggcctgctgctggacaccatcaagaggcctgccctgcagggcctgtgcctgtgcctggacttccagtttgacacagtggtgaaggaccggcccaccatcctgagcaagctgctgctgctgcacttcctgaagcaggacatcccagccctgtcctgggagttctttgtgaacagatttgagaccctgagcctggaggcccagctgcacctggactgcaacaaggagttccccttccccaccaccatcacagctgtgaggaccaacgtggccaacctgagtgatgctgccctgtggaagatcaagagggccaggtttgccaggaaccggcagaagtctgtgcgcagcctgcgggacagcgtgaagggccctgtggagagcaagagggccctgagcctgcctgagaccctgaccagcaagatccccatgaggctgaccaggcatgagcagagcgccccagccctgggcggcaccccagagcagaccccaggccagcagagcccagaaaatgacaacaccatcaaggacctgctgcctgaagatgctggcatcgaccaccagacagtgcaccagctgatcaccgtgctgatgaagttcatggccaaggatgagagcagcgctgagagtgacatcagcagcgccaaggccttcaacacagtgaagaggcacctgtatgtgctgctgggctatgaccagcaggagggctgcttcatgattgccccccagaagatgaggctgagcacctgcttcaatgccttcatcgccggcatcgcccaggtgatggactacaacatcaacctgggcaagcacctgctgcccctggtggtgcaggtgctgaagtactgcagctgcccccagctgcggcactacttccagcagcccccacgctgcagcctgtggagcctgaagccccacatccggcagatgtggctgaaggccctgctggtgatcctgtacaagtacccctacagagactgtgacatcagcaagatcctgctgcacctgatccacatcaccgtgaacaccctgaatgcccagtaccacagctgcaagccccacgccacagctggccccctgtacagcgacaacagcaacatcagccgctacagcgagaaggagaagggggagattgagctggccgagtaccgggagactggagccctgcaggacagcctgctgcactgtgtgcgggaggagagcatccccaagaagaagctgcggagcttcaagcagaagagcctggacattggaaatgctgacagcctgctcttcaccctggatgagcacaggaggaagagctgcatcgacagatgtgacatcgagaagccacccacccaggccgcctacatcgcccagaggcccaatgaccccggccgcagccggcagaacagcgccaccaggccagacaacagcgagatcccagaaaatcctgccatggagggcttcccagatgcccggcggcctgtgattcctgaggtgcggctgaactgcatggagacctttgaggtgaaggtggacagccctgtgaagccagcccccaaggaggacctggacctgattgacctgagcagtgacagcaccagcggccctgagaagcacagcatcctgagcaccagtgacagcgacagcctggtgtttgagcccctgccccccctgcgcatcgtggagagtgatgaggaggaggagaccatgaaccagggagatgatggccccagcggcaagaatgctgccagcagccccagcgtgcccagccaccccagcgtgctgagcctgagcacagcccccctggtgcaggtgtctgtggaggactgcagcaaggacttcagcagcaaggacagcggcaacaaccagagcgctggcaacacagacagcgccctgatcaccctggaggaccccatggatgctgagggcagcagcaagccagaggagctgcctgagttcagctgtggcagccccctgaccctgaagcagaagagggacctgctgcagaagagctttgccctgcctgagatgagcctggatgaccacccagaccctggaacagaaggagagaagccaggagagctgatgcccagcagcggggccaagacagtgctgctgaaggtgcctgaagatgctgagaaccccacagagagcgagaagccagacaccagcgctgagagtgacacagagcagaaccctgagaggaaggtggaggaggatggagctgaggagagcgagttcaagatccagatcgtgccccggcagaggaagcagaggaagattgctgtgtctgccatccagcgggagtacctggacatctccttcaacatcctggacaagctgggggagcagaaggaccctgaccccagcaccaagggcctgagcaccctggagatgccccgggagagcagcagcgcccccaccctggatgctggggtgcctgagaccagcagccacagcagcatcagcacccagtaccggcagatgaagaggggcagcctgggcgtgctgaccatgagccagctgatgaagaggcagctggagcaccagagcagcgccccccacaacatcagcaactgggacacagagcagatccagcccgggaagaggcagtgcaatgtgcccacctgcctgaacccagacctggagggccagcccctgaggatgagaggagccaccaagagcagcctgctgagcgcccccagcatcgtgtccatgtttgtgcctgcccctgaggagttcacagatgagcagcccaccgtgatgacagacaagtgccacgactgtggggccatcctggaggagtatgatgaggagaccctgggcctggccatcgtggtgctgagcaccttcatccacctgagcccagacctggccgcccccctgctgctggacatcatgcagagcgtgggccgcctggccagcagcaccaccttcagcaaccaggccgagagcatgatggtgcctggaaatgctgctggggtggccaagcagttcctgcgctgcatcttccaccagctggcccccaacggcatcttcccccagctgttccagagcaccatcaaggatggcaccttcctgcggaccctggccagcagcctgatggacttcaatgagctgagcagcattgctgccctgagccagctgctggagggcctgaacaacaagaagaacctgcctgctggaggagccatgatccgctgcctggagaacatcgccaccttcatggaggccctgcccatggacagccccagcagcctgtggaccaccatcagcaaccagttccagaccttctttgccaagctgccctgtgtgctgcccctgaagtgcagcctggacagcagcctgcgcatcatgatctgcctgctgaagatccccagcaccaatgccaccaggagcctgctggagcccttcagcaagctgctgagctttgtgatccagaatgctgtgttcaccctggcctacctggtggagctgtgtggcctgtgctaccgggccttcaccaaggagcgggacaagttctacctgagccgctctgtggtgctggagctgctgcaggccctgaagctgaagagccccctgcctgacaccaacctgctgctgctggtgcagttcatctgtgctgatgctggcaccaagctggccgagagcaccatcctgagcaagcagatgattgcctctgtgcccggctgcggcacagctgccatggagtgtgtgcggcagtacatcaatgaggtgctggacttcatggctgacatgcacaccctgaccaagctgaagagccacatgaagacctgcagccagcccctgcacgaggacacctttggaggccacctgaaggtgggcctggcccagattgctgccatggacatcagccggggcaaccaccgggacaacaaggctgtgatccgctacctgccctggctgtaccacccccccagcgccatgcagcagggccccaaggagttcattgaatgtgtgagccacatccggctgctgtcctggctgctgctgggcagcctgacccacaatgctgtgtgccccaatgccagcagcccctgcctgcccatccccctggatgctggcagccacgtggccgaccacctgattgtcatcctgattggcttccctgagcagagcaagacctctgtgctgcacatgtgcagcctcttccacgccttcatctttgcccagctgtggacagtgtactgtgagcagagcgctgtggccaccaacctgcagaaccagaatgagttctccttcaccgccatcctgacagccctggagttctggagccgggtgacccccagcatcctgcagctgatggcccacaacaaggtgatggtggagatggtgtgcctgcacgtgatcagcctgatggaggccctgcaggagtgcaacagcaccatctttgtgaagctgatccccatgtggctgcccatgatccagagcaacatcaagcacctgtctgctggcctgcagctgcggctgcaggccatccagaaccacgtgaaccaccacagcctgcggaccctgcccggcagcggccagagcagcgctggcctggccgccctgaggaagtggctgcagtgcacccagttcaagatggcccaggtggagatccagagcagcgaggccgccagccagttctaccccctgtag

SEQ ID NO: 343959 - DNA, 7974 bp, Artificial Sequence
  derived and/or modified sequence
atgagcaccaaggccgagcagtttgccagcaagatccgctacctgcaggagtaccacaacagagtgctgcacaacatctaccctgtgcccagcggcacagacatcgccaacaccctgaagtacttcagccagaccctgctgagcatcctgagcaggacaggcaagaaggagaaccaggatgccagcaacctgactgtgcccatgaccatgtgcctcttccctgtgcccttccccctgacccccagcctgcggccccaggtgagcagcatcaaccccaccgtgaccaggagcctgctgtacagcgtgctgagagatgcccccagcgagcggggcccccagagcagagatgcccagctgagtgactaccccagcctggactaccagggcctgtatgtgaccctggtgaccctgctggacctggtgcccctgctgcagcacggccagcacgacctgggccagagcatcttctacaccaccacctgcctgctgcccttcctgaatgatgacatcctgagcaccctgccctacaccatgatcagcaccctggccaccttcccccccttcctgcacaaggacatcatcgagtacctgagcaccagcttcctgcccatggccatcctgggcagcagcagaagagagggcgtgcctgcccacgtgaacctgagcgccagctccatgctgatgattgccatgcagtacaccagcaaccctgtgtaccactgccagctgctggagtgcctgatgaagtacaagcaggaggtgtggaaggacctgctgtatgtgattgcctacggccccagccaggtgaagcccccagctgtgcagatgctgttccactactggcccaacctgaagcccccaggggccatcagcgagtaccggggcctgcagtacacagcctggaaccccatccactgccagcacatcgagtgccacaatgccatcaacaagccagctgtgaagatgtgcatcgaccccagcctgtctgtggccctgggggacaagcccccacccctgtacctgtgtgaggagtgcagcgagagaattgctggggaccacagcgagtggctgattgatgtgctgctgccccaggccgagatcagcgccatctgccagaagaagaactgcagcagccacgtgagaagagctgtggtgacctgcttctctgctggctgctgcggccgccacggcaacagacctgtgcgctactgcaagcgctgccacagcaaccaccacagcaatgaggtgggcgctgctgctgagacccacctgtaccagaccagccccccacccatcaacacccgggagtgtggggctgaggagctggtgtgtgctgtggaggccgtcatcagcctgctgaaggaggccgagttccacgccgagcagcgggagcacgagctgaacagaagacggcagctgggcctgagcagcagccaccacagcctggacaatgctgactttgacaacaaggatgatgacaagcatgaccagaggctgctgagccagtttggcatctggttcctggtgtccctgtgcaccccatctgagaacacccccacagagagcctggcccggctggtggccatggtgttccagtggttccacagcacagcctacatgatggatgatgaggtgggcagcctggtggagaagctgaagccccagtttgtgaccaagtggctgaagacagtgtgtgatgtgcgctttgatgtgatggtgatgtgcctgctgcccaagcccatggagtttgcccgggtgggcggctactgggacaagagctgcagcacagtgacccagctgaaggagggcctgaaccgcatcctgtgcctgatcccctacaacgtcatcaaccagagcgtgtgggagtgcatcatgcctgagtggctggaggccatcagaacagaggtgcctgacaaccagctgaaggagttccgggaggtgctgagcaagatgtttgacatcgagctgtgccccctgcccttctccatggaggagatgtttggcttcatcagctgccgcttcaccggctaccccagctctgtgcaggagcaggccctgctgtggctgcacgtgctgtctgagctggacatcatggtgcccctgcagctgctgatctccatgttcagtgatggagtgaacagcgtgaaggagctggccaaccagaggaagagccgggtgtctgagctggccggcaacctggccagccggcgggtgtctgtggccagtgaccccggccggcgggtgcagcacaacatgctgagccccttccacagccccttccagagccccttccgcagccccctgcggagccccttccgcagccccttcaagaactttggccaccctgggggccgcaccatcgactttgactgtgaagatgatgagatgaacctgaactgcttcatcctgatgtttgacctgctgctgaagcagatggagctgcaggatgatggcatcaccatgggcctggagcacagcctgagcaaggacatcatcagcatcatcaacaacgtgttccaggccccctggggcggcagccacacctgccagaaggatgagaaggccatcgagtgcaacctgtgccagagcagcatcctgtgctaccagctggcctgtgagctgctggagcggctggcccccaaggaggagagccggctggtggagcccacagacagcctggaggacagcctgctgagcagcaggcctgagttcatcatcggccctgagggggaggaggaggagaacccagccagcaagcacggggagaaccctggcaactgcacagagcctgtggagcacgccgctgtgaagaatgacacagagaggaagttctgctaccagcagctgcctgtgaccctgcggctcatctacaccatcttccaggagatggccaagtttgaggagccagacatcctcttcaacatgctgaactgcctgaagatcctgtgcctgcatggagaatgtctgtacatcgccaggaaggaccacccccagttcctggcctacatccaggaccacatgctgattgccagcctgtggagggtggtgaagtctgagttcagccagctgagcagcctggccgtgcccctgctgctgcacgccctgagcctgccccatggagctgacatcttctggaccatcatcaatggaaacttcaacagcaaggactggaagatgagatttgaagctgtggagaaggtggccgtcatctgccgcttcctggacatccacagcgtgaccaagaaccacctgctgaagtacagcctggcccacgccttctgctgcttcctgacagctgtggaggatgtgaacccagctgtggccaccagggctggcctgctgctggacaccatcaagaggcctgccctgcagggcctgtgcctgtgcctggacttccagtttgacacagtggtgaaggaccggcccaccatcctgagcaagctgctgctgctgcacttcctgaagcaggacatcccagccctgtcctgggagttctttgtgaacagatttgagaccctgagcctggaggcccagctgcacctggactgcaacaaggagttccccttccccaccaccatcacagctgtgaggaccaacgtggccaacctgagtgatgctgccctgtggaagatcaagagggccaggtttgccaggaaccggcagaagtctgtgcgcagcctgcgggacagcgtgaagggccctgtggagagcaagagggccctgagcctgcctgagaccctgaccagcaagatccccatgaggctgaccaggcatgagcagagcgccccagccctgggcggcaccccagagcagaccccaggccagcagagcccagaaaatgacaacaccatcaaggacctgctgcctgaagatgctggcatcgaccaccagacagtgcaccagctgatcaccgtgctgatgaagttcatggccaaggatgagagcagcgctgagagtgacatcagcagcgccaaggccttcaacacagtgaagaggcacctgtatgtgctgctgggctatgaccagcaggagggctgcttcatgattgccccccagaagatgaggctgagcacctgcttcaatgccttcatcgccggcatcgcccaggtgatggactacaacatcaacctgggcaagcacctgctgcccctggtggtgcaggtgctgaagtactgcagctgcccccagctgcggcactacttccagcagcccccacgctgcagcctgtggagcctgaagccccacatccggcagatgtggctgaaggccctgctggtgatcctgtacaagtacccctacagagactgtgacatcagcaagatcctgctgcacctgatccacatcaccgtgaacaccctgaatgcccagtaccacagctgcaagccccacgccacagctggccccctgtacagcgacaacagcaacatcagccgctacagcgagaaggagaagggggagattgagctggccgagtaccgggagactggagccctgcaggacagcctgctgcactgtgtgcgggaggagagcatccccaagaagaagctgcggagcttcaagcagaagagcctggacattggaaatgctgacagcctgctcttcaccctggatgagcacaggaggaagagctgcatcgacagatgtgacatcgagaagccacccacccaggccgcctacatcgcccagaggcccaatgaccccggccgcagccggcagaacagcgccaccaggccagacaacagcgagatcccagaaaatcctgccatggagggcttcccagatgcccggcggcctgtgattcctgaggtgcggctgaactgcatggagacctttgaggtgaaggtggacagccctgtgaagccagcccccaaggaggacctggacctgattgacctgagcagtgacagcaccagcggccctgagaagcacagcatcctgagcaccagtgacagcgacagcctggtgtttgagcccctgccccccctgcgcatcgtggagagtgatgaggaggaggagaccatgaaccagggagatgatggccccagcggcaagaatgctgccagcagccccagcgtgcccagccaccccagcgtgctgagcctgagcacagcccccctggtgcaggtgtctgtggaggactgcagcaaggacttcagcagcaaggacagcggcaacaaccagagcgctggcaacacagacagcgccctgatcaccctggaggaccccatggatgctgagggcagcagcaagccagaggagctgcctgagttcagctgtggcagccccctgaccctgaagcagaagagggacctgctgcagaagagctttgccctgcctgagatgagcctggatgaccacccagaccctggaacagaaggagagaagccaggagagctgatgcccagcagcggggccaagacagtgctgctgaaggtgcctgaagatgctgagaaccccacagagagcgagaagccagacaccagcgctgagagtgacacagagcagaaccctgagaggaaggtggaggaggatggagctgaggagagcgagttcaagatccagatcgtgccccggcagaggaagcagaggaagattgctgtgtctgccatccagcgggagtacctggacatctccttcaacatcctggacaagctgggggagcagaaggaccctgaccccagcaccaagggcctgagcaccctggagatgccccgggagagcagcagcgcccccaccctggatgctggggtgcctgagaccagcagccacagcagcatcagcacccagtaccggcagatgaagaggggcagcctgggcgtgctgaccatgagccagctgatgaagaggcagctggagcaccagagcagcgccccccacaacatcagcaactgggacacagagcagatccagcccgggaagaggcagtgcaatgtgcccacctgcctgaacccagacctggagggccagcccctgaggatgagaggagccaccaagagcagcctgctgagcgcccccagcatcgtgtccatgtttgtgcctgcccctgaggagttcacagatgagcagcccaccgtgatgacagacaagtgccacgactgtggggccatcctggaggagtatgatgaggagaccctgggcctggccatcgtggtgctgagcaccttcatccacctgagcccagacctggccgcccccctgctgctggacatcatgcagagcgtgggccgcctggccagcagcaccaccttcagcaaccaggccgagagcatgatggtgcctggaaatgctgctggggtggccaagcagttcctgcgctgcatcttccaccagctggcccccaacggcatcttcccccagctgttccagagcaccatcaaggatggcaccttcctgcggaccctggccagcagcctgatggacttcaatgagctgagcagcattgctgccctgagccagctgctggagggcctgaacaacaagaagaacctgcctgctggaggagccatgatccgctgcctggagaacatcgccaccttcatggaggccctgcccatggacagccccagcagcctgtggaccaccatcagcaaccagttccagaccttctttgccaagctgccctgtgtgctgcccctgaagtgcagcctggacagcagcctgcgcatcatgatctgcctgctgaagatccccagcaccaatgccaccaggagcctgctggagcccttcagcaagctgctgagctttgtgatccagaatgctgtgttcaccctggcctacctggtggagctgtgtggcctgtgctaccgggccttcaccaaggagcgggacaagttctacctgagccgctctgtggtgctggagctgctgcaggccctgaagctgaagagccccctgcctgacaccaacctgctgctgctggtgcagttcatctgtgctgatgctggcaccaagctggccgagagcaccatcctgagcaagcagatgattgcctctgtgcccggctgcggcacagctgccatggagtgtgtgcggcagtacatcaatgaggtgctggacttcatggctgacatgcacaccctgaccaagctgaagagccacatgaagacctgcagccagcccctgcacgaggacacctttggaggccacctgaaggtgggcctggcccagattgctgccatggacatcagccggggcaaccaccgggacaacaaggctgtgatccgctacctgccctggctgtaccacccccccagcgccatgcagcagggccccaaggagttcattgaatgtgtgagccacatccggctgctgtcctggctgctgctgggcagcctgacccacaatgctgtgtgccccaatgccagcagcccctgcctgcccatccccctggatgctggcagccacgtggccgaccacctgattgtcatcctgattggcttccctgagcagagcaagacctctgtgctgcacatgtgcagcctcttccacgccttcatctttgcccagctgtggacagtgtactgtgagcagagcgctgtggccaccaacctgcagaaccagaatgagttctccttcaccgccatcctgacagccctggagttctggagccgggtgacccccagcatcctgcagctgatggcccacaacaaggtgatggtggagatggtgtgcctgcacgtgatcagcctgatggaggccctgcaggagtgcaacagcaccatctttgtgaagctgatccccatgtggctgcccatgatccagagcaacatcaagcacctgtctgctggcctgcagctgcggctgcaggccatccagaaccacgtgaaccaccacagcctgcggaccctgcccggcagcggccagagcagcgctggcctggccgccctgaggaagtggctgcagtgcacccagttcaagatggcccaggtggagatccagagcagcgaggccgccagccagttctaccccctgtag

SEQ ID NO: 343960 - DNA, 7974 bp, Artificial Sequence
  derived and/or modified sequence
atgaacagcaagcggcacaagatcgccagcaagatccggtacctgcaggagtaccacaacagggttctccacaatatctaccctgtaccctcgggcacagatattgcaaatacacttaagtatttttcacagaccttgttgtcgattctgagtcgaaccggcaagaaggagaaccaggatgcctcaaacctaacggtacccatgaccatgtgtctgtttccagtgccttttcccctgacgccaagtctgaggccacaggtgagctctataaatcctactgtgacaaggtcccttctgtattccgtgctgagggacgctccctcagagcgcggtccccagtcccgggacgcccagctttcagattatcccagcttggactaccaggggctgtacgtgactctggttacgcttctcgatctggtgccattgttgcagcacggccagcatgacctcggccagtctattttctacacaactacatgtcttctccccttcctcaacgacgacatcttgagtacactgccttacactatgatcagtactctggctacgtttccaccatttctgcataaggatattatcgaatacttaagcacctcgtttcttccaatggcaattctgggtagtagcaggcgggagggggtgcccgcacatgtgaacctaagcgccagctccatgctgatgatcgctatgcaatatacttcaaatcccgtgtatcattgccagctgctcgaatgtctcatgaaatacaagcaggaagtgtggaaggatctgttatacgtcattgcctacggcccttctcaggtgaaacccccagccgtacagatgctcttccactactggccaaatctcaagccaccaggtgccatcagcgagtatcgtggactgcagtacaccgcttggaatcctatccattgccagcacatagaatgtcacaacgccatcaacaaacctgctgttaagatgtgtatcgatcctagcctttccgtggctctcggcgacaagccaccaccgctgtatctatgcgaagagtgctccgagcgcatagcaggagatcattcagagtggctgatagatgtcttgctgcctcaggccgaaatctcggctatttgtcagaagaaaaattgctcctcccatgttcggcgcgccgtagtgacctgtttcagcgccggctgttgcgggagacacggaaatcggcccgtacgttattgcaagaggtgtcatagcaatcatcatagtaatgaagtgggagctgccgctgagacacacttataccagacctcgcccccccccatcaatacccgggagtgcggcgcggaagagctcgtttgtgcggtcgaggctgtgattagcttgctcaaggaggctgaatttcatgcagagcagagagagcacgagctgaaccgtcgtaggcaactcgggttgtcaagttcacaccactctctggacaacgccgacttcgataacaaggatgatgacaaacacgaccaacggctactgagccagttcggcatttggttccttgtgtccctgtgtactccttctgaaaatacgccaaccgagagtctggcacggctcgtggccatggttttccagtggttccacagcacggcatatatgatggacgacgaggtgggttctctcgtagagaagctgaaaccacagtttgtaacgaagtggctgaaaacagtctgtgacgtccgcttcgacgtcatggtgatgtgcttgctgccaaagcctatggagtttgcaagggttggagggtattgggacaagagctgctccacggtgactcagcttaaggagggccttaatcgcatcctttgcctgatcccttacaacgtaataaaccagagcgtatgggaatgtataatgcctgagtggctcgaggcaattcgcacagaggttcctgacaaccagcttaaggagtttcgggaggtgctgagcaagatgttcgatatcgagctttgcccactgcctttcagtatggaggagatgttcggcttcatttcatgccggtttacagggtatcctagttccgtgcaggaacaagccctcctgtggctgcacgtactgtccgagctggatatcatggttccccttcagctactgattagcatgttcagtgacggcgttaattctgtgaaagagttggcaaatcaacgtaagtctagagttagcgaacttgcgggcaacttagcctcaaggagggttagcgttgccagcgaccccggtagaagagtccagcataacatgctaagccctttccattctccatttcaatctccctttcgctctcctctccgcagtccatttcgctccccatttaagaattttggccaccccggtgggagaacaattgatttcgattgcgaagacgacgaaatgaatctcaattgctttatactgatgtttgacctgctgctgaaacagatggaactgcaggacgatggcatcacaatgggcctcgagcactctctgtccaaggacattataagtataataaacaatgtgttccaggctccatggggcggtagtcatacttgtcagaaagatgaaaaagccatagagtgcaatctgtgtcaaagcagcattttgtgctatcagcttgcctgtgagcttctcgagaggctggcacccaaagaggaaagcagactggtcgaacccactgatagcttggaagattccctgcttagcagccgccctgagtttatcatcggtccagagggtgaggaggaggaaaatcccgccagcaaacatggtgagaatcctggaaattgtactgagccggtggagcatgcagccgtgaagaatgacacagagcgcaagttttgttaccagcagttgcccgtaaccctgcgtttgatctacaccatttttcaggagatggcaaagtttgaagagccagacattctattcaacatgttaaattgccttaaaatcctgtgtttacacggggaatgcctttatattgctcgcaaggaccacccccagttccttgcgtacattcaggatcacatgctgattgcgtctttgtggcgggtggttaagtccgaatttagccagctgtccagtctggccgttccactcctactccacgccttgtcacttccccacggggcagacatattttggacaataattaatggcaacttcaacagcaaagactggaaaatgagattcgaagctgtggagaaggttgcagtgatctgccggtttctggacattcacagcgtcactaagaaccatctcctgaaatactctctggcacatgccttttgctgctttctcacagcagtggaggatgtgaatccagcagtggcaacccgggcaggccttctcctggataccattaagcgtcccgccttacaaggtctttgtttgtgtttagattttcagtttgatacagtagtcaaggaccgcccaactattctgtcgaagctcctcctgctgcacttcctgaagcaggacatcccagccctttcttgggaattctttgttaatcgctttgaaacactaagcctggaagcacagctccatctggattgcaacaaagaattcccattcccaaccacaataactgcagttcgcacgaatgtggccaatctatcagatgccgccctgtggaaaataaaaagagctaggtttgctcgtaacagacaaaagagtgtccgttctctgcgggacagtgtaaaagggccggtggagagcaagagggccttgtccctgccggagaccctcacctccaagattccaatgcgattgactcggcacgagcaatctgcacctgctctgggcggcacccccgaacaaacacccggacagcaatcccctgagaacgataataccattaaagacctgctacccgaggacgccggcatcgatcatcagacggtccaccagcttatcaccgttctgatgaaatttatggcaaaagacgagagttctgcagaatccgacattagctccgccaaggccttcaacaccgtgaaaaggcacctctacgttctgctcgggtatgaccagcaggaggggtgcttcatgatcgcaccacagaaaatgaggctatctacgtgtttcaatgcttttatagctggaatagcgcaggtgatggactataacatcaacttaggcaagcaccttctaccactggtggtgcaggtgctaaaatactgtagctgccctcagcttagacactatttccagcagccccctaggtgttcactgtggtcactaaagccgcacatacggcagatgtggcttaaggccctgctggttattctctacaaatacccttaccgcgattgtgacatttcaaaaatacttctgcacctcatccatattaccgttaacacgttgaacgctcagtaccacagttgtaaaccccatgcgacagcgggtcccctctatagcgacaacagcaacattagccgatactccgagaaggagaaaggagaaatcgagctagcggagtatcgcgaaaccggcgccctccaagacagtctgcttcactgcgtgcgggaggagagcataccaaaaaaaaaactgcggagctttaagcagaagtcgcttgacattgggaatgcagactcactcctgtttaccctcgatgaacaccgaagaaagtcatgtattgatcggtgtgacatcgagaagccacccacgcaagccgcctacatcgcgcaacgacctaacgaccccgggagatcgcgtcagaattctgcgaccagaccagacaattctgaaattcccgagaaccccgcaatggaggggttccccgacgcgcgaagacctgtgatacctgaggtaaggcttaattgcatggaaaccttcgaggttaaagtggatagcccggtcaaacccgcccccaaggaggacttagacttgatcgatctatcgagtgattccacgtctggccctgaaaagcattcaatcttgagcacaagcgattcggatagtctagtgttcgagcctcttccgccgctccgaatcgtcgagtccgacgaggaggaggagaccatgaaccagggggatgacggcccatcaggcaaaaatgctgcaagctctccgagtgtgcccagccatccttcagtgctctcactcagcacagcgcctctcgtacaggtctctgtggaggactgtagcaaagacttctcttccaaagactccggcaataatcagtccgccggaaatacagattctgctttgattactctcgaggaccccatggatgccgaagggagttcaaaacctgaagaactgcctgagttcagttgcggttcacctctcactctaaagcaaaagcgagatctgctgcagaagtcctttgccctcccagaaatgtcactcgacgatcatcccgatccaggcacagagggagagaaacctggagagctgatgccgtcaagcggagccaagaccgtgctgttgaaagtcccggaggatgctgaaaatcccacagagtccgagaagccagatacgagcgccgagagtgacacggaacagaatcctgagcgcaaggttgaggaggatggcgcggaagagtcagagttcaaaatccagattgtgcctcggcagaggaagcaaaggaagatcgcagtctctgcaatccagcgggaatacctcgacatctcctttaatatactggataaactgggagagcagaaggatccagatcctagtaccaagggtctcagcaccctggaaatgccacgggaaagctcctctgctcctacgctggatgcaggcgtgcccgagacaagctctcacagtagcatttctacacagtacaggcagatgaaaagaggaagtttgggcgtgctgactatgagccagctgatgaaaagacagctcgaacaccagagttctgcccctcacaacatatcgaactgggatactgagcagattcagccagggaaacgccagtgtaatgtgccaacctgtctgaatcctgatctagagggccagcctctgcgcatgcgaggagcaactaaatcatcactgctaagcgccccttcaattgtgagcatgtttgtccctgctccagaggaattcactgacgagcagcccaccgtgatgaccgacaaatgccatgattgtggagcaatacttgaggagtacgatgaagaaacattgggtctggcaatagtggtcctctcaacctttatccatttgtcacctgatctcgccgccccactgctgctggatataatgcagagtgtgggacgcctggcctcgtctacgacattctccaatcaggccgaatccatgatggtgccgggcaacgcagcaggagtggctaagcaatttctcagatgtatcttccatcagttagctcctaatggcatattcccacaactcttccagtccaccatcaaagatggcacgtttctcagaacccttgctagttctctcatggacttcaatgagctctcttcgatagccgccctctcgcagcttctcgaaggtctgaacaacaaaaagaacctcccagccggaggcgcaatgattcggtgtttggaaaacattgcaacgttcatggaggcactccccatggacagcccaagttctttatggactaccatttctaaccagttccaaacattcttcgccaaattaccgtgcgtgctgcctctcaagtgttctctggattcctccctgcgcattatgatttgtctgctgaagataccctctacaaatgccactaggagtcttctggaacccttttctaaactcctgagtttcgtgatccagaatgccgtttttacgttggcatacctcgtggagctctgtggcttgtgctaccgggcattcactaaggagcgcgacaagttctacctgtctcgtagcgtggtgctggaactccttcaggctctgaaattgaaaagccctttaccggacactaatctgctattgctggtgcagtttatctgcgccgacgccgggactaagttagccgagagtacgattctatccaaacagatgattgcttctgttccagggtgcggtacggccgccatggaatgtgtgaggcagtatatcaatgaagtcctggatttcatggctgatatgcacacactgacaaagttaaagtcacatatgaaaacatgctcacaacccctgcacgaagacaccttcggaggtcacctgaaagtgggtctggcccaaatagcggctatggatatcagtaggggaaatcaccgcgataacaaagcagttataaggtaccttccatggctttatcacccaccctcagccatgcagcaaggcccgaaggaattcatcgaatgcgtcagccatataaggctgctttcctggctcctgctggggagcctcacccacaacgccgtgtgcccaaacgcctcttccccctgcctaccaattccactggatgccggaagccacgttgcggaccacttaattgttattctgataggtttccccgaacagagcaagaccagcgtccttcatatgtgttccctattccacgcattcatctttgcacaactctggactgtctactgcgagcagtcagcagttgctacaaaccttcagaatcaaaacgagttctcttttaccgcaatcctgaccgccctggagttctggtcgcgtgttaccccatctattctgcagctcatggcacacaataaagttatggttgagatggtgtgtcttcacgtgattagcctgatggaagctctccaagagtgcaatagcaccatcttcgtgaaactgatccccatgtggctgcccatgatccagtctaacattaagcacctgagtgccggactccagctgagacttcaagccatccagaatcacgttaatcaccattccctgagaaccctgccaggaagtggccagagctccgccggattagcggccctaagaaaatggctccaatgcacgcaattcaagatggcccaggtcgagatacaatccagtgaagcagcttcccaattttaccctctctag

SEQ ID NO: 343961 - DNA, 7974 bp, Artificial Sequence
  derived and/or modified sequence
atgagcaccaaggccgagcagttcgccagcaagatccggtacctgcaagaataccacaatagagtgctgcataatatttatccagtaccttcggggacagacatcgccaataccctgaaatatttcagccaaaccctcctcagtatcctctcacgaacaggaaagaaagaaaaccaggacgccagcaacctcacagtgccaatgacaatgtgtttatttccagtgcccttcccactgacccccagtcttaggccccaggtcagctcgatcaatcctactgtaacgcggagtctgctttattcagtgctgagggatgcgcccagcgaacgggggcctcaaagtcgggacgcccagctgtctgattacccatctctggactaccaaggactttacgttaccttagtgaccctgttagatttagtcccgttgttgcagcatggtcagcacgatctgggccagagcatcttttacactaccacttgtctgctgccttttctcaatgatgacatattatctactctgccatacaccatgattagcactctggcgaccttccctccattcctccataaggacattatcgaatacctttctacatcattcttgcctatggctatcctgggttccagccgccgggagggcgtgcctgcacacgtgaacctcagtgctagcagtatgctcatgattgccatgcaatatacatcaaatcccgtgtatcactgtcagcttctggagtgccttatgaaatacaagcaagaagtctggaaagatctgctgtacgtaatagcttatggcccatctcaggtgaagccaccggccgtgcaaatgctcttccattattggcccaacctgaagccacccggggccatcagcgaatatagggggctgcagtataccgcctggaaccccatccactgtcagcacattgagtgtcataacgcaatcaataagccagcagtaaagatgtgcatagacccgtctttgtccgtcgccctcggagacaaaccccctcccctgtacctctgcgaggagtgcagcgaaagaatcgcaggcgaccacagcgagtggcttatcgatgttctgctaccccaggctgagattagcgctatatgccagaagaaaaattgtagcagtcacgtgcggcgcgccgttgttacttgtttcagcgccggatgctgcggacggcatggtaaccggcccgttagatattgcaaaaggtgtcactccaaccatcactccaacgaggtaggggctgccgctgaaacgcatctgtatcagacgtcaccccccccaatcaacacccgcgaatgcggtgccgaggagctcgtctgtgccgtcgaggccgtgataagcttactgaaggaagcagaatttcatgcggaacagagagagcacgagttgaatcgacgtcggcagctcgggctatcctcgtcccaccactccctggataatgctgattttgacaacaaggatgacgataagcacgatcagcgcctgctgtcgcagtttggtatctggttccttgtgtcattatgtaccccgagcgagaacactcccaccgagtctcttgcacgtctcgtagctatggtatttcagtggttccactccacagcctacatgatggatgacgaagtcgggtctttggtggagaaactgaaaccccagtttgttacaaaatggcttaaaacagtgtgcgacgtgagattcgatgtcatggttatgtgccttctccccaaacccatggagtttgctagagtgggtggatactgggacaagagttgttcaaccgtcacccagctgaaagagggactgaatcgcatactgtgtctaattccctacaatgtaatcaaccagagtgtgtgggaatgtattatgcccgaatggttggaagccatacgcaccgaggtgcctgacaaccagcttaaggagttccgggaggttctgagtaaaatgtttgacattgagttatgcccacttcccttctctatggaagagatgttcgggttcattagctgccgcttcaccggatacccctctagtgtccaggaacaggccctactttggttgcatgtgctcagcgagctggacatcatggttccactgcagcttctcatatctatgtttagcgacggggtcaactccgtgaaggagctcgctaaccagagaaagtcacgagtgagtgagctagcgggcaatcttgcatcacggcgggtgtcggtcgccagtgaccctggccgccgtgtgcaacacaacatgctgtcccccttccactcaccttttcaatccccattcaggtcccccttacggagcccatttcgatccccgtttaagaacttcggacatccgggagggcgaactatcgattttgactgcgaagacgacgaaatgaatctcaactgtttcattctgatgttcgacttgctgctcaagcaaatggagctgcaggacgatggcattacaatgggccttgagcactctctctccaaggatataatttccatcataaacaacgtgttccaggccccttggggagggtcacatacatgtcaaaaagacgagaaagctatcgaatgtaatctttgccagtcatctatcctgtgttaccaactagcttgtgagcttctggagaggctagcccccaaagaagagagtcgcctagttgagcctacagattcactggaggattctcttttgagctccagaccagaattcataatcggcccagaaggcgaggaagaagagaatcccgcctcaaagcatggggagaaccccggcaactgcactgagcctgtcgagcacgcggctgtgaaaaacgacaccgaacgtaagttttgttaccaacagctcccagtgacactccgactgatctacacaatcttccaggagatggcaaagtttgaggagccagacattctgtttaacatgctgaattgtctgaagatactgtgtttgcacggtgagtgtctgtatatagcgagaaaagatcatcctcagttcctcgcatatattcaggaccatatgcttatcgcctccctttggagagtggttaagtcggaattctctcagctgagttcacttgctgtgcctcttctcctccacgctttgagccttcctcatggcgcggatatcttttggaccattattaacggcaatttcaatagcaaggactggaagatgcgcttcgaagcagtcgagaaagtggccgtgatttgtaggttcttagatatccattcagtgactaagaaccacttgctgaagtatagcctcgctcatgctttttgctgctttctgactgccgtggaggatgtgaatccggccgttgctacccgcgctgggctacttttggacaccatcaagagacccgccctccagggcctgtgtctatgtttggatttccaattcgatacagtggtaaaggatcgtcccactatcctgagcaaattactcctactccacttccttaagcaggatatccccgctctcagttgggagtttttcgtcaatcgttttgaaacactgtcactggaggcgcagttacacctggattgcaacaaagagtttccgttcccaaccactattacagctgtaagaaccaatgtcgccaatttaagcgacgctgccctgtggaaaattaagcgggcccgttttgcccggaacagacaaaagtcagtcaggtctctccgagacagcgtgaaagggccagtggaatcaaagagagctctgtccttgccggagacgcttacgagcaaaatcccaatgcggttgacaaggcatgaacaatctgcacccgctctaggaggaacccctgaacagaccccgggtcagcagagtccagagaatgacaatacgatcaaggatctactgcccgaggacgctggtatcgatcaccagacagtgcaccaactgatcacagtactaatgaaatttatggctaaagacgagtcctccgcagagagtgatatcagttccgccaaagccttcaacaccgttaaacgccacttatatgtcctgctcggttacgaccagcaggaaggttgcttcatgatcgcccctcagaagatgcggctctccacatgtttcaacgctttcatcgcgggaatcgcccaggtgatggactataacattaatctgggcaaacatctgctccccctggttgtccaagtgctcaagtactgttcgtgtcctcagctgcggcactactttcagcaaccaccccggtgctcgctgtggtcacttaagcctcacattaggcaaatgtggctgaaagcactcctggtaattttgtataaatacccataccgcgattgcgacatctcaaaaatcttactccaccttattcacattacagtgaatacccttaacgcgcagtatcattcgtgcaaacctcacgcaactgcaggccctctgtactctgataactcaaatatctccagatactccgaaaaagaaaagggcgagatcgaactggcagagtaccgtgagaccggagctctgcaagattccctgctgcactgtgtgagagaggaaagcattcctaaaaaaaagctgaggtcattcaaacagaaaagcttggacattggtaatgcagattcactgttgttcacactcgacgagcacaggaggaaatcgtgcatcgatcgatgcgacattgagaagccccccacccaggccgcctatattgcccagagacccaacgacccgggacgctccaggcagaacagtgccactaggcccgacaattctgaaatccctgagaatcccgccatggaagggttccccgacgccaggcgacccgtcattcccgaggttcgtttgaactgcatggagactttcgaggtgaaggtcgactcaccggtcaagcctgcccctaaagaagatctggatttgatcgacctgagctcggactctactagcgggcccgaaaaacacagcattctcagcacctccgacagcgatagcctggtttttgagccactgccacccctacgcattgtggagtccgatgaagaggaggaaacaatgaaccaaggcgacgatggaccctccggcaagaacgccgcctcctctccttcggtaccttcccacccaagcgttttgtcattgagtactgctccgcttgtacaggttagcgtggaagactgctccaaggacttttcgtcaaaggacagcggcaacaaccagtctgccgggaacactgattcagctttgattactcttgaggacccgatggacgccgaaggctctagcaagccggaggaacttccagaatttagttgcggatcacccttaaccttgaagcaaaagcgagatctgctgcaaaaatcatttgcacttccggaaatgtccctcgatgaccatcccgacccggggaccgaaggcgagaaaccaggcgaattaatgccgtcttccggggccaaaacagtgctcttgaaagttccagaggatgctgaaaatccaacagagtcggagaaaccagatacctcagctgagtccgataccgagcagaaccctgaaagaaaggtagaagaagacggagccgaagagtccgagtttaaaattcagatcgtacctcgacagagaaaacagcgcaagattgcggtttccgcaatacaacgcgaatacctggacatttccttcaacattctcgacaaactcggagagcagaaggacccagatccttcaacaaaagggctgtctaccctggagatgccccgggagagctcctccgccccgacccttgacgccggagtacccgaaactagctctcactcttccatctcgacacagtacaggcagatgaagaggggctctttaggagtgctgacgatgtctcagctcatgaagcggcagttggagcaccaatcttcagccccccataatatttccaactgggatacagagcagattcagccagggaaacggcagtgcaatgtgcctacttgcctgaaccccgacctcgagggacagcctctgaggatgcggggggcaactaaaagctctctgctgtcagctcctagcattgtgtccatgtttgtgcccgcccccgaggagttcactgacgagcaacccaccgtgatgaccgacaaatgccacgactgtggcgccatacttgaagaatatgacgaggagactctgggattggccatcgtggttttgtccaccttcattcatctgagcccagacttggccgccccgcttctcctagacattatgcagagcgtggggcggctggccagttcaaccacattctctaatcaagccgagtccatgatggtccctggcaacgctgccggcgtggccaagcagttcttgcggtgtattttccatcagctagcaccgaacggtatatttcctcaactcttccagtcgacaattaaagatggaacttttctcaggacattggcttcttctctgatggatttcaatgagctgtcatctatagccgccctgtcacagctcttggaaggattaaataacaaaaaaaatctacctgccgggggtgcaatgatccgttgcctggaaaacattgccacgttcatggaggcactgccaatggattcccctagttccctctggactacaatctctaaccaattccagactttttttgccaagcttccatgtgtgctgccattgaagtgctccctggattctagcctacgtattatgatctgcttactgaagatcccttccacaaatgccacccgcagcctgctcgagcccttctctaaactgctgtcatttgtcattcaaaacgcagtgttcacactcgcttatctggtggagttgtgcggtttatgctatagggcttttaccaaagagagagacaagttttatctgagccggtcagtggtattggaattgctgcaggcactgaagctcaagagcccattacccgacacgaaccttctgctcttagtgcaattcatctgcgccgacgccggaaccaaactggccgaatccacaatccttagtaagcaaatgatagcctcagttccaggctgcgggacagctgctatggagtgcgttagacagtatatcaatgaggtgctagatttcatggcagacatgcacactctcacaaaactgaaatcccacatgaaaacatgttctcaacctctccacgaggacacgtttggtggtcatctgaaggtggggctcgcacagatcgccgctatggatatatcccgaggcaaccaccgcgataataaggctgtgattcgttacctgccctggctgtaccaccctccatcggctatgcagcagggaccaaaggaattcattgaatgcgtgagtcacatcagactcctctcctggctcctgttaggatctttgactcacaacgcggtctgccccaacgctagttcaccctgtctgcctatacctctggatgccggatcgcacgttgctgatcacttaattgtgattctgattggttttcccgagcagtctaaaacatcggtactgcacatgtgttctttgttccatgctttcatttttgcccagctatggactgtgtactgtgaacagtctgccgtcgctacaaacttacagaatcagaatgaattttcttttacagccatactcacagctctcgaattttggtccagagtgacaccctcaatcctgcagctcatggcacataacaaggtaatggtggaaatggtatgcttacacgtgataagcctgatggaagccctccaagaatgtaactcgactattttcgtgaagctgatccccatgtggctgcccatgatccaaagcaacatcaaacacctgagcgctggcctacagctaaggctgcaggccatccagaaccatgtgaaccatcacagtcttaggacgcttcctggctctgggcagtccagcgctgggttagccgcactgcgcaaatggttacagtgtactcaattcaagatggcacaggtggagatccagtcatccgaagctgccagccagttctatcccctttag

SEQ ID NO: 343962 - DNA, 7973 bp, Artificial Sequence
  derived and/or modified sequence
atgaactcaaagagacacaaaatcgcaagcaaaattagatacctgcaggagtaccataaccgggtgttgcacaatatatatcctgtaccttcaggcactgacatcgccaacactttgaagtacttttcccagacgctgctgagtattctgagtcgcacagggaaaaaagagaatcaggacgcttccaacctcactgtgccgatgaccatgtgtcttttccctgtccctttcccgctaactccgagcctgagacctcaggtgtccagcatcaatccaactgttacccgttcactgctgtacagcgtacttagggacgctccctccgagagaggcccacagtcacgggatgcgcagctctctgattacccaagcctcgactaccaggggttgtacgtgacgctcgtcactctcctagacctcgttccgctgcttcagcacggacagcacgacctgggccagagtatcttctataccactacatgcctactcccatttctgaacgatgacattctgtctacactgccttacacaatgatctcaactctggccaccttcccacccttcctgcacaaagacatcatcgagtacttatcaactagcttcttgccaatggcaatcctgggcagttcccggagggagggtgtcccagcacatgtgaatctatcagccagtagcatgctgatgattgctatgcaatacacttccaatccagtatatcattgccagcttctggagtgtctgatgaagtataagcaggaggtgtggaaggatctcctttacgttattgcatacggcccatcccaagtgaaaccaccagccgtccagatgctctttcactattggcctaatctgaagcctcctggcgcaatttccgaatacaggggcctgcaatatacagcatggaaccccatccattgtcagcacatcgaatgccataatgccatcaacaagcccgcagtcaaaatgtgtatcgacccctcgctgagcgtggcacttggagataagccgcctccattatatctgtgcgaggagtgcagcgagcgaatcgctggagaccatagcgagtggctcattgatgtgctgctccctcaggcggagatttcggccatctgccagaagaagaactgctcatcccatgtgcgcagggccgtcgtgacatgtttctctgcgggatgttgtggtagacacggaaatcgaccagtgcgttactgcaagcgctgtcattctaatcaccattcgaacgaagtcggagccgcagctgaaacccatctgtatcagacaagtccccctcctattaacacgcgcgagtgcggtgctgaagagttagtgtgtgccgtggaggctgtgattagccttctcaaagaggccgagtttcacgctgagcagcgggagcacgagttaaatagacgcaggcagttaggactaagtagctcccaccacagcctggataatgccgactttgataacaaagatgatgacaaacacgatcagcggctgctcagtcaattcggtatctggttccttgtgagtctgtgtactccaagtgaaaatacacccactgagtcgctggctagactggtagcaatggtctttcagtggtttcattcaacggcttatatgatggatgacgaagtggggagcctggtcgagaagctgaaaccacaattcgtgaccaagtggcttaagactgtttgtgatgttcgctttgacgtgatggtaatgtgtctcctgccgaagcccatggagttcgcgagagtggggggatattgggataagtcctgttccactgtgacccagctgaaggaaggtctgaatcgaatcctgtgcctgattccctacaatgtgatcaaccaaagcgtctgggaatgcattatgcccgagtggctggaagctatacggacagaggtcccagacaatcaactcaaagagtttcgggaggtgcttagcaaaatgttcgatattgagctgtgtccgcttcctttcagtatggaggagatgtttggtttcatatcctgtcgttttactggataccccagctctgtgcaggagcaagcattactgtggctgcatgttctcagcgaactggatatcatggtccctctccagttactgattagtatgttctccgacggcgttaacagtgtcaaggagttggctaatcagcgaaaaagccgggtgtcggagctagcaggaaacctggccagcaggagggtgtctgtggcctccgatccgggaagaagagtgcaacataatatgctgtccccatttcattcgccctttcagagcccatttaggagtccactgcggtcacctttccggtccccctttaagaacttcggccatccaggcggtcgcacaattgattttgattgcgaggatgacgaaatgaacctgaattgctttattctcatgtttgatttgctactgaagcagatggagctccaagacgatggaatcacaatgggactcgaacactcactgtctaaagacattatctctattatcaataatgtatttcaggctccttgggggggatctcatacctgccagaaagatgagaaggccatagaatgtaatctgtgtcagtcgagtattctctgctaccagcttgcctgcgagttgctagagcggctggctccaaaggaagagtccaggctagtggaacccactgacagtttagaggactccttgctatcgtcccgaccggagttcattatcggcccagaaggagaggaggaagaaaatccagccagtaagcatggcgaaaaccctggcaattgcacggagccagttgaacacgccgcagtgaagaatgacaccgagcggaagttctgctatcagcaactacccgtgaccttgcgattgatctacaccatctttcaggagatggctaaatttgaagagcctgatattctctttaacatgctgaactgccttaaaatcctgtgcctccatggcgaatgcttgtacatcgccagaaaagaccacccgcagttcctggcatatatccaagatcacatgctcatcgccagtctttggagggtagtgaagtcagagttctcacagttgagctccctagccgtccctcttctgctgcatgctctctctcttcctcacggcgctgacatcttctggacgatcatcaacggcaatttcaacagtaaggattggaagatgagattcgaggcagtcgagaaagtcgccgtaatatgccggttcctcgacatacactccgtaaccaaaaatcacctgctaaagtacagcctggctcatgccttttgttgcttcttaactgccgtagaggatgttaatccggctgtggccacacgcgctggacttctgctggacacaattaagcggccagcattgcaggggctgtgtctgtgtcttgatttccaattcgatacagttgttaaagaccgccctaccatactttccaagctcctgctccttcattttcttaaacaggatatccccgctctgtcgtgggagttttttgtgaaccggtttgaaacactgtcactggaggcgcaacttcacctggactgcaacaaagaattcccttttccaacaacaataaccgctgtgcgcaccaacgtcgccaatctgtccgacgccgctctttggaaaattaagagagccaggtttgcccgaaacagacaaaaatcagttagatcactccgggacagcgttaagggacccgtggagtctaagagggccctgtcacttccagagacactcacttccaagatacctatgaggcttaccaggcacgaacagagcgctcctgctctgggaggcacaccggagcagacccccggacaacagagccctgaaaatgacaacaccattaaagacctgctgcccgaagacgcaggtattgatcaccagacagttcatcagttgattaccgtgctcatgaaattcatggctaaagatgagtccagcgccgaaagcgacatatcgtccgcaaaggctttcaacaccgtcaagagacacctttacgttctcctgggttatgaccagcaggagggctgcttcatgatcgcacctcagaagatgcgcctgagcacttgttttaatgcctttatagctggaatcgcccaggtgatggattacaacatcaacttgggcaagcatctgctgcccttggtggtgcaggtgctgaagtactgcagttgcccccagttaagacactactttcagcagccacctcgatgcagcctgtggtctctgaaaccccacataaggcaaatgtggcttaaagcgctcctcgtcatcctctacaaatacccttacagggattgcgacattagcaagattttactgcatttaatccacataacagtcaacaccttaaatgcacagtaccattcctgcaagccccacgcaacggcagggcctctgtactcagacaacagcaacattagtagatattccgaaaaagaaaagggggagatcgaactggcagagtaccgcgagaccggggcacttcaggactctctattgcactgtgtcagggaagagagcatcccaaaaaaaaaactgagatcctttaaacaaaaatctctggacatcggaaacgccgattctctgctattcaccttagacgaacaccgcaggaagtcttgcattgaccgatgcgacatcgaaaaacctcccacacaggctgcttacatcgcgcaacgacccaacgatcccggacgcagtagacaaaactcagctacccggccagataattccgagattccggagaaccccgctatggagggtttccctgacgcacgtaggcctgtgattccagaggttcgactgaactgcatggaaacctttgaagttaaggtagatagcccagttaagccagctcccaaggaggatctggacttgattgacctgtcgtccgacagtacctccgggcctgagaaacatagtattttaagtacaagcgactcggacagtctcgtgttcgaacctcttccacccctgcgcattgtggagtctgacgaggaggaagagactatgaaccaaggcgacgatgggccttccggaaagaatgctgcctcttcgccttcagtaccttctcatccttcagtgctgtctttgagcaccgctcctcttgtgcaggtgtcagtggaggattgctccaaggacttctcttccaaagatagcggcaataatcagagcgctgggaacacagatagcgcactcattactctcgaggatcccatggatgccgagggttccagtaaacctgaggaactgcctgagttcagctgtggaagtcccctgactctgaagcagaagcgagacctgctgcagaagtctttcgctctgccagaaatgtctctggatgatcaccctgaccccggtacagagggagagaagcctggtgaactgatgccctccagcggcgctaaaactgtactgctcaaagtgccggaagatgccgagaatcctaccgagtcagagaagcctgatacctctgccgagagcgacactgagcagaatcctgaaaggaaagtagaagaggacggagcagaggagagcgagttcaagattcagattgtgcctaggcagcgtaagcaacgcaagattgccgtgtccgcaattcagagagaatacctggatatctcctttaacattttggataagctgggggaacagaaggatccagatccatccacaaaaggcctgtcgacgctggaaatgccaagggaaagttcctcagctccgacactggatgcaggagtccccgagacttcttcacacagttctatctcaactcagtacagacagatgaagaggggctctctgggcgtattgaccatgtctcagttaatgaaaaggcagctggagcaccagtcttccgcgcctcacaacatctctaactgggacaccgagcagattcaacctgggaagagacaatgcaacgtaccgacttgtttgaacccagacttggagggtcagccactgcggatgcgaggcgctactaaatccagcctgcttagcgctccgagcatcgtgtccatgtttgtgcccgcaccagaggaatttacggatgagcagcctaccgtgatgactgataaatgtcatgactgtggcgctatcctcgaagagtacgatgaagaaacacttggtctcgcaattgtggtcctgtcaacctttattcatctctctcccgacttggctgctccgctcctgctggatataatgcagagcgtcgggagactggcctcctctacgacatttagcaatcaagctgagagcatgatggtgcctgggaatgctgctggagtggcaaagcaatttctgcgctgtatttttcaccaacttgccccaaatgggatattcccacagctgtttcagtcaactatcaaggacgggactttcctgcgtacccttgcttcctcattgatggactttaatgagcttagctcgatagctgcactgtcacagctcttggagggccttaataataaaaagaatctccctgcaggcggtgctatgattcgctgtctagagaatattgctacgtttatggaagctctccctatggatagcccctcatcattgtggacgacaattagtaatcaattccagacattttttgccaagctaccctgcgtgctgcccctgaaatgctcattggactcctcattgcggatcatgatttgcctgttgaaaattccatccacaaatgcaacacggtcgctgctcgagcccttttccaaacttctaagcttcgtaattcagaacgcagtgtttaccctggcctatctcgtggagctttgtggcctgtgctatcgcgcttttacgaaggaacgtgacaagttctatctaagcaggagtgtggtactggagctcttacaggcactgaagctgaaaagtcccctgcccgacacaaatcttctgctcctggtgcagtttatttgcgctgacgcgggaaccaaactcgcagagagcacaatactgagcaaacagatgatcgcaagcgtccccggatgcggcaccgcagccatggagtgtgttcggcagtacattaacgaggtgttagactttatggcagacatgcataccctgaccaagttgaagagccacatgaagacgtgtagtcagcctctccatgaagatactttcggcggacatctgaaggtcggcctggctcagattgcagcaatggatatcagtagagggaatcaccgggataacaaagccgtgattcgttacctgccttggctgtatcaccccccttccgcgatgcagcaggggcctaaagagttcattgaatgtgttagccatatcagactgttgagctggctgttactgggatccctgacacataacgcagtatgtccgaacgcaagctcaccgtgtctgccgatccctttagacgctggatcacatgtggccgaccacctaatcgtgatcctaattggattcccagagcagtctaaaaccagcgtgctgcatatgtgctcactcttccatgcgtttatcttcgcacagctttggacagtttattgtgagcagtcagcagtcgcaactaatctacaaaatcagaatgagtttagtttcacggccatcctgacagctctcgagttctggagtcgagtcactccctccatcctgcagttaatggcacacaataaagtgatggtcgaaatggtgtgcctgcacgtgatctctctgatggaggccctgcaggagtgcaactccacgatcttcgtgaaattgatccctatgtggctgcctatgattcagtctaatattaagcacctgtctgctggactccagcttcgacttcaagctattcagaaccatgtaaaccaccactccctgcgtaccctgccaggttcgggccagtcttcggccggactggccgctctgagaaagtggttgcagtgcacccaattcaagatggctcaggtggagatccagagcagcgaggccgcatctcagttttaccctctcta

SEQ ID NO: 343963 - DNA, 7973 bp, Artificial Sequence
  derived and/or modified sequence
atgtccaccaaggctgagcagtttgcaagcaaaattcgctacttacaggaataccacaacagagttctgcacaacatatatccggtcccctctgggactgacattgcaaacactctgaagtattttagtcagacgctcctaagtattttgagccgtactggcaagaaggagaatcaggatgccagtaacctgactgtccccatgaccatgtgcctgtttcctgttccgttcccgctgacacctagtctgagaccccaggtgagctccatcaaccccactgtgacccggtcactactgtactctgtgctccgggatgctccaagcgaaaggggaccccaatcccgggacgcccagctgtcagactaccccagcctggattaccaggggctgtacgttaccttggttacactgctggatcttgtgcccctgttgcagcacggccaacacgaccttggtcagtccattttctacaccaccacatgtctgctccctttcctaaacgacgacatcctctccactctgccgtatactatgatttctacattagccacgttccccccattccttcataaggacatcatcgaatacctttccacctcctttctgccaatggctatcctaggctccagcagaagagagggtgtcccagcacacgtgaatctgtcagctagctccatgctcatgattgcaatgcagtacacctcgaatccagtctatcattgccagcttttggagtgtttgatgaagtacaaacaggaggtctggaaagacttgctttacgtaattgcctacggtccgtcacaggttaaaccccctgccgtgcagatgctttttcactattggcctaatctgaagccgccaggggctattagtgagtacagaggcctccaatataccgcatggaatcctatacactgccagcacatcgaatgccacaatgcaattaataagcctgccgtgaaaatgtgtattgatccgtccttaagcgtggctttgggagacaagccaccacccctttacctgtgtgaagagtgtagcgagagaatcgccggagaccattcagagtggttaatcgacgtgctgctgccccaggcagaaatctctgccatttgccagaaaaaaaattgttcctcacatgtccggcgtgctgtcgtgacgtgtttttcagccggttgttgtggcagacacggcaacagacctgttagatactgtaaacggtgtcactcaaaccaccatagtaatgaagttggggctgccgctgaaacccatctgtatcagacatcaccacctccgattaacacccgggaatgcggagccgaggaactagtctgcgcggtggaagcggtcatttcactgctgaaggaagctgaattccacgcagaacagcgggagcacgagctgaaccggaggcgccagcttgggctgtctagcagtcatcatagtctggacaatgccgatttcgacaacaaggacgacgataagcatgatcagagacttctttcacagttcggcatttggttcctcgtctcgctgtgtaccccctccgaaaatacgcctactgagagcttggctaggttagttgccatggtgtttcagtggttccactcaaccgcctatatgatggacgatgaggtcggttccctcgtggagaagctcaagccccagtttgttacgaagtggcttaaaactgtttgtgacgtaagattcgacgtgatggttatgtgccttcttcctaaaccgatggagttcgctcgtgtcgggggatattgggacaagtcttgcagcactgtaactcagctgaaggaggggctcaataggatcctttgtctgatcccctataatgttatcaatcagagcgtatgggagtgtatcatgccagaatggctggaggctatacggactgaggtccctgacaaccagctgaaggaatttcgcgaggtgctgagcaagatgtttgacatcgaactgtgccccttgcctttctccatggaagagatgtttggatttatcagctgtcgatttacaggatacccatcttccgtgcaagagcaggctttattgtggcttcacgtgttgtctgagctcgacattatggttcctcttcaattactaatttcgatgttttccgatggggtcaactctgtaaaggagctggcaaaccaaaggaagtctcgggtcagtgagctggcaggcaatctggcttctcgacgggtcagcgtggcttcagatcccggacggagggtgcagcataacatgctctcacctttccactcccctttccagtcgccatttagatcccccctcagaagtcccttcagatcccctttcaagaatttcggtcacccgggtggtaggacgatagatttcgattgcgaggatgacgagatgaacctaaattgctttatcctaatgttcgacctgctcctgaagcaaatggagctgcaagacgacgggatcactatggggttggagcactccctgagcaaagacatcattagcattattaataacgtgtttcaggcaccctgggggggatcacatacttgtcagaaagacgagaaggcaatcgaatgcaacctttgtcagagcagcatcttgtgttaccagttagcctgtgagctgcttgaaaggctggccccaaaggaggaaagccgtcttgtggaacctacggattcactagaagattctctcctgtcatctcgccctgagtttataatcggcccagagggagaggaggaggaaaatcccgctagtaagcacggagagaaccctgggaattgcaccgagccagtcgagcatgcagcagtcaaaaacgacacagagcgtaaattctgttatcagcagcttcccgtcacactcaggcttatatacaccattttccaagagatggccaagttcgaggaaccggacatactctttaatatgttgaactgcttgaaaatcctgtgccttcatggcgaatgcttatacatcgctcgcaaggatcatcctcaattcctcgcatacattcaagatcatatgcttatcgcctctctttggagagtggtcaaatctgagtttagccagctatcatcgctggcagttccattgttactgcacgcattgagcctgccccacggcgcagatattttctggacaatcatcaacggaaacttcaactccaaggactggaaaatgagatttgaggctgtggaaaaggtcgcggttatttgtagattcctggacatccactcagtgaccaagaaccatctcctgaagtacagtcttgcacacgccttctgctgttttctgaccgccgtggaagacgttaaccccgctgtcgcaactagagctggtcttctgctcgacacaataaaacgtcctgccctccaagggctttgtttgtgtctcgactttcagttcgatactgttgtgaaggatcgacccaccatcctgtcaaagctgctgctgctgcactttctgaagcaggatatacccgctttaagttgggagttcttcgttaatcggttcgaaacactttcattagaggcccaactccacctggactgcaacaaagaattcccgttcccaactacaatcaccgcggtccggaccaacgtggcgaacctgtctgacgcagcactgtggaagataaagagggctcgctttgcgcgtaatcgccaaaaatctgttcggtctttaagggattctgtgaaaggccctgtcgagagtaaacgtgccctgagtctacccgaaaccctcacttcaaaaatccccatgagactcacgagacacgaacaatcagcacccgctctgggtgggacacccgaacagacccccggacagcagagcccggagaacgacaacaccatcaaggatttgctgccagaggacgcagggatcgaccatcagactgtccaccagctgattacagtgttgatgaagttcatggccaaggacgaaagctcagccgaatcggatatttctagcgctaaagcctttaatactgtaaaacgacacctatacgttctgctgggctatgatcagcaagagggctgcttcatgattgccccacaaaagatgcgcctgagtacctgctttaacgcgttcatcgccggtattgcccaggtcatggactataatattaatcttggaaaacatctgctgccattggtagtgcaggtgctgaagtattgtagttgccctcagctgaggcactacttccagcaaccccctcgttgttcactgtggtcactcaaaccccatatacgccagatgtggctgaaagccctcctggtgatcctgtacaaatatccataccgagattgtgacatatcaaagatactgctccacctgatccacatcaccgtgaatactctaaacgcacaataccactcttgtaaaccacatgccactgccggacccttgtacagcgataattccaatatcagccgatactcagagaaagagaagggcgagattgaactggcagagtatagagagacaggagccctccaggactctttgctgcactgcgtcagagaggagtccatccctaagaaaaagctccgctcattcaaacaaaaatctcttgacattggcaatgccgactctctgctttttactctcgacgagcaccgcagaaagtcatgcatcgaccggtgtgacatcgaaaagcctccgactcaggcagcatacattgcccaaagacctaacgacccgggtaggtcacgacagaattctgcgacacggcctgataacagcgagatcccggagaaccctgccatggaaggattccctgacgcacgccgacccgtgatccccgaagtgcgtttgaactgtatggaaaccttcgaagtgaaggtggactcaccagtaaagccggctccgaaggaggacctagatctgatcgatttaagctccgactccacaagtggccctgagaaacactcaatcctgtctacttcggattctgattctctcgtcttcgagcccttgcctccactgcggatcgtggaatcagatgaggaggaggagacgatgaaccagggtgacgacgggccaagtgggaaaaatgctgcctcatctccttccgtcccttcccacccttctgttttgagtttgagtacagcgcctttagtgcaggtgagcgtagaagattgttccaaagatttctcctctaaagatagcggaaacaaccagtccgccggtaataccgactctgcccttatcaccctcgaggatcccatggatgccgaaggctcctcaaaacccgaggagctgccagaattctcctgcggcagccctcttacgctcaagcagaagagggatcttttgcagaagtcattcgccctccctgaaatgtcgcttgacgatcacccagaccctggcacagaaggagagaaaccaggtgagctgatgccttcctccggggctaagactgtactcctgaaagttccagaggatgccgagaaccccactgagtctgaaaagcctgacacaagcgcagagtcagataccgaacagaaccccgagagaaaggtggaggaggacggcgcagaggaatctgaatttaaaatccaaatagtgccaagacagcgcaagcagcgcaagatcgctgtgtcagccatacagagagagtacctggatatttcctttaatatactcgataagctgggcgagcaaaaggatcccgatccttccacaaagggactatctaccctagagatgcctcgggagtcgtcatctgcccctacgttggacgctggtgttccagaaacgagttcccacagtagtatctcgacccaatatcgtcagatgaagcggggtagccttggcgtgctaacaatgtctcagctgatgaagcggcagctggagcatcagtctagtgcaccccacaacatctccaactgggacaccgaacagatccaacccggaaaaagacagtgcaatgtgcccacatgcctgaatcctgacctggagggacagcccctccgaatgcggggagccacaaaatcatcgctcctgagcgcaccttctatagtctcgatgttcgtcccggctcccgaggagttcaccgacgagcagcccacagtaatgacagataagtgtcatgactgcggagctatacttgaggagtacgacgaagagacactgggcttggccatcgtggttctgtctaccttcatccatttgagccctgacctggctgccccactgctgttggatattatgcagagcgtgggcagactcgccagctccacgactttctcgaatcaggccgaatcaatgatggtccccggaaacgccgctggagtcgccaaacagtttctgcgatgtatctttcaccagctagctcctaatggcatatttccccagttgttccagtccaccataaaagacgggacatttcttcgaaccctggcctcgagcctcatggactttaatgagcttagtagcatcgcggctttgtcccagttactggaaggacttaacaacaagaaaaacttgcctgccggaggggctatgatacgctgcctggagaatattgccacttttatggaagccctccctatggacagtccatcgagtctgtggacaacgatctccaatcagttccagacattctttgcaaaactgccttgcgtgttgcctcttaagtgctcgttggactcgtcattacgcattatgatatgtttgctgaagataccaagcacaaacgccacacgctccctgctggagcccttttcaaagctcctctcctttgtcatccagaacgctgtgttcacgctggcatacctcgtcgaactctgcggcctgtgttacagagcctttactaaggagagagacaagttttatttgagtagaagcgtggtgttagagcttctccaggccctgaagctaaagagccctcttccagatacgaatttgctcctgctggttcagttcatctgtgccgatgcaggaacaaagctggctgaaagcaccatcctgagtaaacaaatgattgcctctgtccctggctgtggaaccgccgctatggagtgcgtccgccaatacatcaatgaggtgctggactttatggccgatatgcacactctcaccaagctgaaatcccacatgaagacctgcagtcagcctttacacgaggacactttcgggggacacctgaaagtgggcctggcccagattgccgcaatggacatttcccggggaaatcatagagacaacaaagccgttattaggtacctcccctggctgtatcaccccccatcggctatgcaacaaggtcctaaggagtttatcgagtgtgtaagtcacatccggcttctgtcttggctgttgctgggcagcctgacacacaacgcagtttgtcccaacgctagcagcccctgtctccctattccattggacgccggttctcacgtggccgatcacttgattgtcatcctgataggattcccagaacagtctaagacatcagttcttcatatgtgctccctgtttcacgcctttattttcgctcagttatggaccgtctactgcgagcagtctgctgtcgctaccaatctgcaaaaccaaaatgaattcagctttaccgccattctgaccgccctggaattctggagtcgcgtgacgccttccatcctgcaacttatggcacacaataaagttatggtagagatggtgtgtctccatgtgatatccctaatggaagcactccaggaatgcaactcgacaatcttcgtgaaactgattcctatgtggctgccaatgatccagtccaacataaaacatctgagcgccggacttcagctgcgactacaggccatacagaaccacgtcaaccaccacagtctgagaaccttgcccggttccggccagagcagtgcaggcttagcagccctcagaaaatggctacagtgcacgcaatttaagatggctcaggtcgaaatccagtcatctgaagccgcatcccagttttaccccctgta

SEQ ID NO: 343964 - DNA, 8413 bp, Artificial Sequence
  derived and/or modified sequence
atgaattctaagcgccacaaaattgcttccaagatccggtacttgcaggaatatcataaccgggttctccacaacatttatcctgtaccatcaggaacagatattgcaaacaccttgaaatacttttctcagaccttgttaagcattttgtcccgcacagggaagaaggaaaaccaagatgcctccaatttgacagtgcccatgaccatgtgtctttttcctgtgccattcccactcaccccatctctaagaccgcaggtcagttccatcaaccctactgttactcgctccctcctttacagcgtcctgcgagatgctccctcagaacgcggcccgcaaagtcgtgatgctcagttgtcagactacccttctttggactaccaaggcctctacgtgactttggtgaccctcctggatctagttcctttactacagcacggccaacacgatcttggacagtcgatattttatacaactacatgtttgctaccttttctcaatgatgatattctgagtactttgccctacacgatgatatcaacgttggctacctttcctccatttctgcacaaggatatcattgaatatcttagcacatcttttctaccaatggctatattgggctcctcaaggagagaaggtgtacctgcccatgttaacctctctgcatcatccatgctaatgattgcaatgcagtacacatccaatccagtgtatcattgtcaattactggaatgcctcatgaaatataaacaagaagtctggaaagatcttttgtatgtgattgcgtatgggccttcacaagtgaagcctccagctgtgcaaatgcttttccactactggcccaatttaaaacctcctggggcaataagcgagtacagggggttgcagtacacagcttggaatcccatccactgccagcacattgaatgccacaatgcaattaacaaaccagctgtgaagatgtgtatagacccttccctgtcagtagcgttgggtgataaaccacccccgttgtatctctgtgaagaatgcagcgagaggattgcaggggaccacagtgagtggctgattgatgttcttctgccacaagctgaaatatctgctatatgtcagaaaaagaactgcagttcccacgttagaagagcagttgtcacctgcttctcagcagggtgctgtggtcgtcacggaaacaggcctgttcggtactgcaagaggtgccactcaaatcatcacagtaatgaagtgggggccgctgcggagactcacctctatcagacctctcctccgcccatcaacacgcgggaatgcggcgctgaggagctggtctgcgccgtggaagccgtgatcagcttgttgaaagaagccgagttccatgctgagcagcgagaacatgagctgaaccggcggcggcagctgggcctctcctcttcccaccattccctggataatgctgactttgataacaaggacgatgataaacacgatcagaggctgctcagtcaattcggaatatggttcttagtgagcctctgcacacccagtgagaacacgcctacagaaagcttggcccggctggtggccatggtgtttcagtggtttcactccactgcgtatatgatggatgatgaagtgggaagtctggtggaaaagctgaagcctcagtttgtcaccaaatggctgaagaccgtatgtgatgttcgcttcgatgtcatggtcatgtgccttcttcctaaacccatggaatttgccagggttggtggctactgggataagtcctgtagcacagtgactcagctgaaggaaggtctcaaccgaatcctctgcctgatcccctataatgtgatcaatcaatctgtctgggagtgtattatgccggaatggctggaagccatcagaacagaagtcccagataatcagttaaaagaattcagggaagtattaagcaaaatgtttgacattgaactctgtcctctgcctttctcaatggaggagatgtttggttttattagttgtcggtttacaggatacccctcctctgtgcaggagcaagctttactgtggcttcatgtattatcggagttagatatcatggttccacttcaactactaataagtatgttttctgatggagttaattcagtcaaagagctggcaaatcaaagaaaatcaagagtcagtgaactggcagggaaccttgcatctcgaagggtgagtgttgcctctgatcctggccgacgagttcagcacaatatgcttagtccatttcatagtcctttccagagtccgtttcggagtcctttgcgtagtccgtttcgtagccctttcaagaattttggacacccaggaggaaggactattgactttgattgtgaagatgatgaaatgaatctaaattgtttcatcctcatgtttgatcttctcctgaagcagatggagttacaagatgatggaatcacgatgggtttagagcacagcttatcaaaggacattatttctattataaacaatgtcttccaagccccctgggggggatcccacacctgccagaaggacgaaaaagcaatcgagtgcaacttatgtcagtctagtatcctctgctatcagcttgcttgtgaactcctggagagactagctcctaaagaagaaagccggctggtggagcccacagacagcctggaggatagcctcctttcttccagaccagagtttatcataggccctgaaggggaggaggaggagaatcctgcaagcaagcatggggagaacccaggcaactgcaccgagcccgtggaacatgctgcagtaaagaatgataccgaaagaaaattttgctaccaacagcttccggtaacattgagactaatatataccattttccaggaaatggctaagtttgaagagccagacattctttttaatatgctcaattgcctgaagattctctgtctgcatggagaatgtttatacattgccagaaaagatcaccctcaatttttagcctacattcaggaccacatgttgattgcaagcctgtggagggtcgtcaaatccgagttctctcagctgtcttccctggcagtccctcttctcctccatgccctgtcacttcctcatggtgctgacatcttctggacaatcataaatggcaatttcaacagcaaagactggaagatgaggtttgaagcagtggaaaaagttgctgtaatttgtagatttctggatattcactcagtaaccaaaaaccacctgctgaagtactccctggcacatgccttctgctgcttcctgacagcagtggaggatgtcaaccccgcagtggctaccagagctggtctcctgcttgacaccataaagaggccagcattgcagggtctatgtctttgtcttgacttccagtttgatactgtggttaaagacagacccacaattttgagcaagcttttactcttgcactttcttaagcaggatattcctgctctgagctgggagttctttgtcaatagatttgagacgctttctttggaagcccagctacatttggattgtaacaaggaatttccttttcctacaaccatcactgctgtgaggaccaatgttgctaacctcagcgatgcagccttatggaagatcaagagagctcgctttgcaagaaaccgccagaagagtgtacgttccctgagggacagcgtgaaagggcctgtggaatccaagagggcgctctccctccctgagaccctgacctccaaaattcctatgaggttgaccaggcatgagcagtctgctccagctctcggtgggacacccgaacagacgccaggacaacaatctcctgagaatgacaacaccatcaaggacctgctcccagaagacgctgggatcgaccaccagacagttcaccagctgattacagtgctcatgaagttcatggccaaggatgaaagcagcgctgagtcagacatcagcagtgcaaaggccttcaacacggtcaagcgacacctgtacgtcttactcggctatgaccagcaggaaggttgcttcatgattgcacctcaaaaaatgcgcctgtcaacttgctttaatgcattcattgcaggaattgcccaagttatggactataacattaacttgggaaaacaccttctccccttagtggttcaggtgctcaaatactgctcttgtcctcaactccggcattatttccaacagccgcctcgttgctccctctggtccctaaagcctcacatccggcagatgtggttgaaggccttgcttgtcatcctttacaagtatccataccgagactgtgatatcagcaagatcctgctgcatctgattcacataacagtcaatacactcaatgcgcagtatcatagctgcaagccccatgccacggcaggacctttgtacagtgacaacagtaacataagcagatacagcgaaaaagaaaaaggtgaaatagaactggctgaatatagagagacgggtgcattacaagacagccttctccactgtgtgagagaagaaagcattccgaaaaaaaagctacgctctttcaaacaaaaatctcttgatatagggaatgcagactcgcttttgtttacattagacgaacatcgtaggaagtcgtgcatagatcggtgtgacatagagaagcctccgacccaagctgcgtatatcgcacaaagaccaaacgaccctggacgttctagacagaactctgctacgaggcctgacaatagtgaaatccccgagaacccagctatggaagggtttccagatgctcgaaggcctgtcataccagaggttaggttaaactgtatggagactttcgaggtgaaagttgactcgccggtaaagcctgctcctaaagaggatttagatctgatagatctatcctcagattcaacctcggggcctgaaaaacactctatactctcaacctccgacagcgactctcttgtatttgagcctcttccccctctcagaatagtcgagagtgacgaagaagaggagacgatgaaccaaggcgatgacggcccctccggtaaaaatgctgcctcttctccctccgtccccagccatccctccgtcctcagcctgagcacagctccgcttgtacaagtaagtgtggaggattgttccaaagacttttcttctaaggactcaggaaataatcagtcagcagggaacactgactctgccctcatcactctggaagaccctatggacgccgaaggatcctcaaagccagaggagctgccagagttctcctgcggtagcccactgacgctgaagcaaaaacgagacctccttcagaagtcgtttgctctccccgagatgtcgctggatgatcaccctgacccgggcactgagggggagaagcctggggagctgatgccaagttcaggggcaaaaaccgtcctcctcaaagttcccgaagatgcagagaaccccacagaaagtgagaagcctgataccagtgcagaatctgatacagaacagaatcctgaaaggaaggtggaagaggatggagctgaggaatccgaatttaagattcagattgttcccaggcagaggaagcagaggaagattgctgtcagtgctatccagagagagtacctcgacatctccttcaacattctggacaaactgggagaacagaaagatccagatccttctactaaaggactttcaactttggaaatgccacgagaatcttcatctgcccctacgttagatgcaggtgtgccggaaacaagtagccattcctcaatatcaactcagtataggcagatgaaaaggggatccctgggagttctgacaatgagccagttaatgaagcggcagctggagcatcagtctagcgccccccataacatcagcaactgggacactgaacagatacagcctgggaaacgccagtgtaacgtgccaacgtgcctaaaccctgacctggagggacagccattgaggatgagaggtgccaccaaatccagcctgctatcagcaccaagcatagtcagtatgtttgtgcctgcacctgaagagttcactgacgagcagccgacggtgatgacggacaaatgccatgactgtggggccattcttgaagaatacgatgaagagacacttgggctagccatcgtggtcctctccacattcattcacttaagcccagacctggcagccccgctgctgctggatatcatgcagtctgtgggaagattggcatccagtactaccttttctaatcaagcagaaagcatgatggttcccggcaatgcggcgggggtggccaagcagttcctgcgctgcatcttccatcagttggcccccaacggcatcttcccgcagctgttccaaagcacgatcaaagatgggacttttttacggaccttagcctcgtctctgatggacttcaatgagctgagctccatcgcagctctcagtcagctcctagagggtctaaataacaaaaagaatttaccagcagggggtgctatgattcgctgtttggaaaacattgcaaccttcatggaagctttgcctatggattctcctagtagcctctggaccacaattagcaaccagtttcagacattttttgccaagctgccttgtgttttacctctgaagtgttctttagattccagtttaagaattatgatttgcctcttgaagatcccttctaccaatgctacaaggagtttgttggaaccattttcaaaactgctcagctttgtaattcagaatgccgtcttcactctggcctacctggtggagctgtgtggcttatgttaccgagctttcactaaggaacgagataaattctacttgtctcgtagtgttgttctagaacttctgcaggccctaaagctcaaatctcctttaccagatacaaaccttcttctgcttgttcagtttatttgtgcagatgctggaaccaaactagctgagtcaacaatcctgagcaagcagatgatagcctctgtacctggatgtgggactgcagcgatggagtgtgtgaggcagtacatcaacgaagtgctggatttcatggcagacatgcacacgctgaccaaactgaagagccacatgaagacatgttcccagcctctgcatgaagatacctttgggggacatctcaaagtggggctggcccagattgcagccatggacatctcacggggcaaccacagagataacaaagctgtgatccgctatctgccttggctttatcatcccccctctgcaatgcagcaaggacctaaagaattcattgagtgtgtctcccatatccgactgttgtcctggctgctgctgggttccctcactcacaatgcagtgtgcccaaatgcctcctctccctgcctgcccattcctctggatgcaggctcccacgttgcagaccatcttattgttatcctgattggatttccagagcaatcaaagacctccgtgctgcacatgtgctccctcttccacgcgttcatctttgctcagctgtggacagtttattgcgagcaaagtgccgtcgctacaaatctccaaaatcagaatgaattcagcttcacggcgatactgacagcactagaattttggagtagggtgacacccagcatccttcagctaatggcccataacaaagtgatggtagaaatggtgtgtctccatgtgattagtttaatggaggcattgcaggaatgcaattcgaccatttttgtcaagctgatacctatgtggttgccaatgattcagtcaaatatcaagcacttatctgcgggactccagcttcgcctccaggctattcagaaccacgtgaaccaccacagcctaaggacgctgccgggctcgggccagagcagtgctggcctggcagccctccgaaagtggttgcagtgcactcagttcaaaatggcccaggtggagatccagtcctcggaagcagcctctcaattttatcctctatgagtggactcctcggcgctcagtgtcaacactctggtttagcaataatgggtttaaaaacaaacaatttgatccaagcaggttggggaacatattggtactgtacattctctttctagtttagtaaaagatgtgcaaaggccagagagggccgaaaatgaagctttcttgctacacatatttctgatgactccttgggctatctgattaagtgtttccttacattattttttaaaaaccaaatcatttttctttaactaacttctattttttttaagaaaaaaaaatagactggtgggtactcacagaaaagttgtataagtccccctgttgctatttttgatgatagagaataaatagggtttttgaaacctttgtagtgttttttcttaaaatccactcttggcaatgcaataaaaaaaaccgtcaccataagccagtg

SEQ ID NO: 343965 - DNA, 9100 bp, Artificial Sequence
  derived and/or modified sequence
gtccgaatggtagcgacacgggcctaagggagggggaaagcgagggggtggggggtggggggtatgcactcttttcctcgcaacatcgctggcggagcgagggagctcacacgacacagattttggggcaaagcctttccaactggacagcaccatgtccaccaaagcggagcagtttgcttccaagatccggtacttgcaggaatatcataaccgggttctccacaacatttatcctgtaccatcaggaacagatattgcaaacaccttgaaatacttttctcagaccttgttaagcattttgtcccgcacagggaagaaggaaaaccaagatgcctccaatttgacagtgcccatgaccatgtgtctttttcctgtgccattcccactcaccccatctctaagaccgcaggtcagttccatcaaccctactgttactcgctccctcctttacagcgtcctgcgagatgctccctcagaacgcggcccgcaaagtcgtgatgctcagttgtcagactacccttctttggactaccaaggcctctacgtgactttggtgaccctcctggatctagttcctttactacagcacggccaacacgatcttggacagtcgatattttatacaactacatgtttgctaccttttctcaatgatgatattctgagtactttgccctacacgatgatatcaacgttggctacctttcctccatttctgcacaaggatatcattgaatatcttagcacatcttttctaccaatggctatattgggctcctcaaggagagaaggtgtacctgcccatgttaacctctctgcatcatccatgctaatgattgcaatgcagtacacatccaatccagtgtatcattgtcaattactggaatgcctcatgaaatataaacaagaagtctggaaagatcttttgtatgtgattgcgtatgggccttcacaagtgaagcctccagctgtgcaaatgcttttccactactggcccaatttaaaacctcctggggcaataagcgagtacagggggttgcagtacacagcttggaatcccatccactgccagcacattgaatgccacaatgcaattaacaaaccagctgtgaagatgtgtatagacccttccctgtcagtagcgttgggtgataaaccacccccgttgtatctctgtgaagaatgcagcgagaggattgcaggggaccacagtgagtggctgattgatgttcttctgccacaagctgaaatatctgctatatgtcagaaaaagaactgcagttcccacgttagaagagcagttgtcacctgcttctcagcagggtgctgtggtcgtcacggaaacaggcctgttcggtactgcaagaggtgccactcaaatcatcacagtaatgaagtgggggccgctgcggagactcacctctatcagacctctcctccgcccatcaacacgcgggaatgcggcgctgaggagctggtctgcgccgtggaagccgtgatcagcttgttgaaagaagccgagttccatgctgagcagcgagaacatgagctgaaccggcggcggcagctgggcctctcctcttcccaccattccctggataatgctgactttgataacaaggacgatgataaacacgatcagaggctgctcagtcaattcggaatatggttcttagtgagcctctgcacacccagtgagaacacgcctacagaaagcttggcccggctggtggccatggtgtttcagtggtttcactccactgcgtatatgatggatgatgaagtgggaagtctggtggaaaagctgaagcctcagtttgtcaccaaatggctgaagaccgtatgtgatgttcgcttcgatgtcatggtcatgtgccttcttcctaaacccatggaatttgccagggttggtggctactgggataagtcctgtagcacagtgactcagctgaaggaaggtctcaaccgaatcctctgcctgatcccctataatgtgatcaatcaatctgtctgggagtgtattatgccggaatggctggaagccatcagaacagaagtcccagataatcagttaaaagaattcagggaagtattaagcaaaatgtttgacattgaactctgtcctctgcctttctcaatggaggagatgtttggttttattagttgtcggtttacaggatacccctcctctgtgcaggagcaagctttactgtggcttcatgtattatcggagttagatatcatggttccacttcaactactaataagtatgttttctgatggagttaattcagtcaaagagctggcaaatcaaagaaaatcaagagtcagtgaactggcagggaaccttgcatctcgaagggtgagtgttgcctctgatcctggccgacgagttcagcacaatatgcttagtccatttcatagtcctttccagagtccgtttcggagtcctttgcgtagtccgtttcgtagccctttcaagaattttggacacccaggaggaaggactattgactttgattgtgaagatgatgaaatgaatctaaattgtttcatcctcatgtttgatcttctcctgaagcagatggagttacaagatgatggaatcacgatgggtttagagcacagcttatcaaaggacattatttctattataaacaatgtcttccaagccccctgggggggatcccacacctgccagaaggacgaaaaagcaatcgagtgcaacttatgtcagtctagtatcctctgctatcagcttgcttgtgaactcctggagagactagctcctaaagaagaaagccggctggtggagcccacagacagcctggaggatagcctcctttcttccagaccagagtttatcataggccctgaaggggaggaggaggagaatcctgcaagcaagcatggggagaacccaggcaactgcaccgagcccgtggaacatgctgcagtaaagaatgataccgaaagaaaattttgctaccaacagcttccggtaacattgagactaatatataccattttccaggaaatggctaagtttgaagagccagacattctttttaatatgctcaattgcctgaagattctctgtctgcatggagaatgtttatacattgccagaaaagatcaccctcaatttttagcctacattcaggaccacatgttgattgcaagcctgtggagggtcgtcaaatccgagttctctcagctgtcttccctggcagtccctcttctcctccatgccctgtcacttcctcatggtgctgacatcttctggacaatcataaatggcaatttcaacagcaaagactggaagatgaggtttgaagcagtggaaaaagttgctgtaatttgtagatttctggatattcactcagtaaccaaaaaccacctgctgaagtactccctggcacatgccttctgctgcttcctgacagcagtggaggatgtcaaccccgcagtggctaccagagctggtctcctgcttgacaccataaagaggccagcattgcagggtctatgtctttgtcttgacttccagtttgatactgtggttaaagacagacccacaattttgagcaagcttttactcttgcactttcttaagcaggatattcctgctctgagctgggagttctttgtcaatagatttgagacgctttctttggaagcccagctacatttggattgtaacaaggaatttccttttcctacaaccatcactgctgtgaggaccaatgttgctaacctcagcgatgcagccttatggaagatcaagagagctcgctttgcaagaaaccgccagaagagtgtacgttccctgagggacagcgtgaaagggcctgtggaatccaagagggcgctctccctccctgagaccctgacctccaaaattcctatgaggttgaccaggcatgagcagtctgctccagctctcggtgggacacccgaacagacgccaggacaacaatctcctgagaatgacaacaccatcaaggacctgctcccagaagacgctgggatcgaccaccagacagttcaccagctgattacagtgctcatgaagttcatggccaaggatgaaagcagcgctgagtcagacatcagcagtgcaaaggccttcaacacggtcaagcgacacctgtacgtcttactcggctatgaccagcaggaaggttgcttcatgattgcacctcaaaaaatgcgcctgtcaacttgctttaatgcattcattgcaggaattgcccaagttatggactataacattaacttgggaaaacaccttctccccttagtggttcaggtgctcaaatactgctcttgtcctcaactccggcattatttccaacagccgcctcgttgctccctctggtccctaaagcctcacatccggcagatgtggttgaaggccttgcttgtcatcctttacaagtatccataccgagactgtgatatcagcaagatcctgctgcatctgattcacataacagtcaatacactcaatgcgcagtatcatagctgcaagccccatgccacggcaggacctttgtacagtgacaacagtaacataagcagatacagcgaaaaagaaaaaggtgaaatagaactggctgaatatagagagacgggtgcattacaagacagccttctccactgtgtgagagaagaaagcattccgaaaaaaaagctacgctctttcaaacaaaaatctcttgatatagggaatgcagactcgcttttgtttacattagacgaacatcgtaggaagtcgtgcatagatcggtgtgacatagagaagcctccgacccaagctgcgtatatcgcacaaagaccaaacgaccctggacgttctagacagaactctgctacgaggcctgacaatagtgaaatccccgagaacccagctatggaagggtttccagatgctcgaaggcctgtcataccagaggttaggttaaactgtatggagactttcgaggtgaaagttgactcgccggtaaagcctgctcctaaagaggatttagatctgatagatctatcctcagattcaacctcggggcctgaaaaacactctatactctcaacctccgacagcgactctcttgtatttgagcctcttccccctctcagaatagtcgagagtgacgaagaagaggagacgatgaaccaaggcgatgacggcccctccggtaaaaatgctgcctcttctccctccgtccccagccatccctccgtcctcagcctgagcacagctccgcttgtacaagtaagtgtggaggattgttccaaagacttttcttctaaggactcaggaaataatcagtcagcagggaacactgactctgccctcatcactctggaagaccctatggacgccgaaggatcctcaaagccagaggagctgccagagttctcctgcggtagcccactgacgctgaagcaaaaacgagacctccttcagaagtcgtttgctctccccgagatgtcgctggatgatcaccctgacccgggcactgagggggagaagcctggggagctgatgccaagttcaggggcaaaaaccgtcctcctcaaagttcccgaagatgcagagaaccccacagaaagtgagaagcctgataccagtgcagaatctgatacagaacagaatcctgaaaggaaggtggaagaggatggagctgaggaatccgaatttaagattcagattgttcccaggcagaggaagcagaggaagattgctgtcagtgctatccagagagagtacctcgacatctccttcaacattctggacaaactgggagaacagaaagatccagatccttctactaaaggactttcaactttggaaatgccacgagaatcttcatctgcccctacgttagatgcaggtgtgccggaaacaagtagccattcctcaatatcaactcagtataggcagatgaaaaggggatccctgggagttctgacaatgagccagttaatgaagcggcagctggagcatcagtctagcgccccccataacatcagcaactgggacactgaacagatacagcctgggaaacgccagtgtaacgtgccaacgtgcctaaaccctgacctggagggacagccattgaggatgagaggtgccaccaaatccagcctgctatcagcaccaagcatagtcagtatgtttgtgcctgcacctgaagagttcactgacgagcagccgacggtgatgacggacaaatgccatgactgtggggccattcttgaagaatacgatgaagagacacttgggctagccatcgtggtcctctccacattcattcacttaagcccagacctggcagccccgctgctgctggatatcatgcagtctgtgggaagattggcatccagtactaccttttctaatcaagcagaaagcatgatggttcccggcaatgcggcgggggtggccaagcagttcctgcgctgcatcttccatcagttggcccccaacggcatcttcccgcagctgttccaaagcacgatcaaagatgggacttttttacggaccttagcctcgtctctgatggacttcaatgagctgagctccatcgcagctctcagtcagctcctagagggtctaaataacaaaaagaatttaccagcagggggtgctatgattcgctgtttggaaaacattgcaaccttcatggaagctttgcctatggattctcctagtagcctctggaccacaattagcaaccagtttcagacattttttgccaagctgccttgtgttttacctctgaagtgttctttagattccagtttaagaattatgatttgcctcttgaagatcccttctaccaatgctacaaggagtttgttggaaccattttcaaaactgctcagctttgtaattcagaatgccgtcttcactctggcctacctggtggagctgtgtggcttatgttaccgagctttcactaaggaacgagataaattctacttgtctcgtagtgttgttctagaacttctgcaggccctaaagctcaaatctcctttaccagatacaaaccttcttctgcttgttcagtttatttgtgcagatgctggaaccaaactagctgagtcaacaatcctgagcaagcagatgatagcctctgtacctggatgtgggactgcagcgatggagtgtgtgaggcagtacatcaacgaagtgctggatttcatggcagacatgcacacgctgaccaaactgaagagccacatgaagacatgttcccagcctctgcatgaagatacctttgggggacatctcaaagtggggctggcccagattgcagccatggacatctcacggggcaaccacagagataacaaagctgtgatccgctatctgccttggctttatcatcccccctctgcaatgcagcaaggacctaaagaattcattgagtgtgtctcccatatccgactgttgtcctggctgctgctgggttccctcactcacaatgcagtgtgcccaaatgcctcctctccctgcctgcccattcctctggatgcaggctcccacgttgcagaccatcttattgttatcctgattggatttccagagcaatcaaagacctccgtgctgcacatgtgctccctcttccacgcgttcatctttgctcagctgtggacagtttattgcgagcaaagtgccgtcgctacaaatctccaaaatcagaatgaattcagcttcacggcgatactgacagcactagaattttggagtagggtgacacccagcatccttcagctaatggcccataacaaagtgatggtagaaatggtgtgtctccatgtgattagtttaatggaggcattgcaggaatgcaattcgaccatttttgtcaagctgatacctatgtggttgccaatgattcagtcaaatatcaagcacttatctgcgggactccagcttcgcctccaggctattcagaaccacgtgaaccaccacagcctaaggacgctgccgggctcgggccagagcagtgctggcctggcagccctccgaaagtggttgcagtgcactcagttcaaaatggcccaggtggagatccagtcctcggaagcagcctctcaattttatcctctatgagtggactcctcggcgctcagtgtcaacactctggtttagcaataatgggtttaaaaacaaacaatttgatccaagcaggttggggaacatattggtactgtacattctctttctagtttagtaaaagatgtgcaaaggccagagagggccgaaaatgaagctttcttgctacacatatttctgatgactccttgggctatctgattaagtgtttccttacattattttttaaaaaccaaatcatttttctttaactaacttctattttttttaagaaaaaaaaatagactggtgggtactcacagaaaagttgtataagtccccctgttgctatttttgatgatagagaataaatagggtttttgaaacctttgtagtgttttttcttaaaatccactcttggcaatgcaataaaaaaaaccgtcaccataagccagtgacacctgactgaagctttttgtctttatcctgggaaaagtggcagcttgcaaggaacattacaaagtgcacttagaaattaggtggttaaactgtgccaattgttttcgttgttttataatatcattttccaaaactgtccagtaagttttattatttttaaaactagtttttcaactcattagttctaggctgtactctcttgtaagctttatgataaccactttagttttgtgaataataaattttattcttttgttaatacttgtatacaatttaattgaaaactgtagcttgcacactggaccagatgagtccctcactggcacagtgccctgcacctggagtgatgtttcataaaacggaattttaatagtgtaagagcaccaagatttctctgcacctatacctagcgttggactgtgcattccaaatgaaattcctcctctttatccctgtaatgcactgactaacagaagacttactacacatttaaactgtatattgacatgctattaaatgcgttttttatta

SEQ ID NO: 343966 - DNA, 8400 bp, Artificial Sequence
  derived and/or modified sequence
atttttgctcgtcggctgggagccgggcgtcgggtcgctgggagtttgcctcttgtggcagcatcctgcttagtccagcgaattgtgacacattattaaatgtatcagaatataagaactgtgtcactactacgtcaccagatggccatttccacgaattcatgtttccgttcggcggccggcgtccctcgggtggtcgcatgcaatgagtgcatctttctcgagaacaactcttccgcggaaagtcattgctgacagtcctggcattccggtggctgcttcttggcagtgagcacttgtctatcttgcttccaagatccggtacttgcaggaatatcataaccgggttctccacaacatttatcctgtaccatcaggaacagatattgcaaacaccttgaaatacttttctcagaccttgttaagcgtcctgcgagatgctccctcagaacgcggcccgcaaagtcgtgatgctcagttgtcagactacccttctttggactaccaaggcctctacgtgactttggtgaccctcctggatctagttcctttactacagcacggccaacacgatcttggacagtcgatattttatacaactacatgtttgctaccttttctcaatgatgatattctgagtactttgccctacacgatgatatcaacgttggctacctttcctccatttctgcacaaggatatcattgaatatcttagcacatcttttctaccaatggctatattgggctcctcaaggagagaaggtgtacctgcccatgttaacctctctgcatcatccatgctaatgattgcaatgcagtacacatccaatccagtgtatcattgtcaattactggaatgcctcatgaaatataaacaagaagtctggaaagatcttttgtatgtgattgcgtatgggccttcacaagtgaagcctccagctgtgcaaatgcttttccactactggcccaatttaaaacctcctggggcaataagcgagtacagggggttgcagtacacagcttggaatcccatccactgccagcacattgaatgccacaatgcaattaacaaaccagctgtgaagatgtgtatagacccttccctgtcagtagcgttgggtgataaaccacccccgttgtatctctgtgaagaatgcagcgagaggattgcaggggaccacagtgagtggctgattgatgttcttctgccacaagctgaaatatctgctatatgtcagaaaaagaactgcagttcccacgttagaagagcagttgtcacctgcttctcagcagggtgctgtggtcgtcacggaaacaggcctgttcggtactgcaagaggtgccactcaaatcatcacagtaatgaagtgggggccgctgcggagactcacctctatcagacctctcctccgcccatcaacacgcgggaatgcggcgctgaggagctggtctgcgccgtggaagccgtgatcagcttgttgaaagaagccgagttccatgctgagcagcgagaacatgagctgaaccggcggcggcagctgggcctctcctcttcccaccattccctggataatgctgactttgataacaaggacgatgataaacacgatcagaggctgctcagtcaattcggaatatggttcttagtgagcctctgcacacccagtgagaacacgcctacagaaagcttggcccggctggtggccatggtgtttcagtggtttcactccactgcgtatatgatggatgatgaagtgggaagtctggtggaaaagctgaagcctcagtttgtcaccaaatggctgaagaccgtatgtgatgttcgcttcgatgtcatggtcatgtgccttcttcctaaacccatggaatttgccagggttggtggctactgggataagtcctgtagcacagtgactcagctgaaggaaggtctcaaccgaatcctctgcctgatcccctataatgtgatcaatcaatctgtctgggagtgtattatgccggaatggctggaagccatcagaacagaagtcccagataatcagttaaaagaattcagggaagtattaagcaaaatgtttgacattgaactctgtcctctgcctttctcaatggaggagatgtttggttttattagttgtcggtttacaggatacccctcctctgtgcaggagcaagctttactgtggcttcatgtattatcggagttagatatcatggttccacttcaactactaataagtatgttttctgatggagttaattcagtcaaagagctggcaaatcaaagaaaatcaagagtcagtgaactggcagggaaccttgcatctcgaagggtgagtgttgcctctgatcctggccgacgagttcagcacaatatgcttagtccatttcatagtcctttccagagtccgtttcggagtcctttgcgtagtccgtttcgtagccctttcaagaattttggacacccaggaggaaggactattgactttgattgtgaagatgatgaaatgaatctaaattgtttcatcctcatgtttgatcttctcctgaagcagatggagttacaagatgatggaatcacgatgggtttagagcacagcttatcaaaggacattatttctattataaacaatgtcttccaagccccctgggggggatcccacacctgccagaaggacgaaaaagcaatcgagtgcaacttatgtcagtctagtatcctctgctatcagcttgcttgtgaactcctggagagactagctcctaaagaagaaagccggctggtggagcccacagacagcctggaggatagcctcctttcttccagaccagagtttatcataggccctgaaggggaggaggaggagaatcctgcaagcaagcatggggagaacccaggcaactgcaccgagcccgtggaacatgctgcagtaaagaatgataccgaaagaaaattttgctaccaacagcttccggtaacattgagactaatatataccattttccaggaaatggctaagtttgaagagccagacattctttttaatatgctcaattgcctgaagattctctgtctgcatggagaatgtttatacattgccagaaaagatcaccctcaatttttagcctacattcaggaccacatgttgattgcaagcctgtggagggtcgtcaaatccgagttctctcagctgtcttccctggcagtccctcttctcctccatgccctgtcacttcctcatggtgctgacatcttctggacaatcataaatggcaatttcaacagcaaagactggaagatgaggtttgaagcagtggaaaaagttgctgtaatttgtagatttctggatattcactcagtaaccaaaaaccacctgctgaagtactccctggcacatgccttctgctgcttcctgacagcagtggaggatgtcaaccccgcagtggctaccagagctggtctcctgcttgacaccataaagaggccagcattgcagggtctatgtctttgtcttgacttccagtttgatactgtggttaaagacagacccacaattttgagcaagcttttactcttgcactttcttaagcaggatattcctgctctgagctgggagttctttgtcaatagatttgagacgctttctttggaagcccagctacatttggattgtaacaaggaatttccttttcctacaaccatcactgctgtgaggaccaatgttgctaacctcagcgatgcagccttatggaagatcaagagagctcgctttgcaagaaaccgccagaagagtgtacgttccctgagggacagcgtgaaagggcctgtggaatccaagagggcgctctccctccctgagaccctgacctccaaaattcgacaacaatctcctgagaatgacaacaccatcaaggacctgctcccagaagacgctgggatcgaccaccagacagttcaccagctgattacagtgctcatgaagttcatggccaaggatgaaagcagcgctgagtcagacatcagcagtgcaaaggccttcaacacggtcaagcgacacctgtacgtcttactcggctatgaccagcaggaaggttgcttcatgattgcacctcaaaaaatgcgcctgtcaacttgctttaatgcattcattgcaggaattgcccaagttatggactataacattaacttgggaaaacaccttctccccttagtggttcaggtgctcaaatactgctcttgtcctcaactccggcattatttccaacagccgcctcgttgctccctctggtccctaaagcctcacatccggcagatgtggttgaaggccttgcttgtcatcctttacaagtatccataccgagactgtgatatcagcaagatcctgctgcatctgattcacataacagtcaatacactcaatgcgcagtatcatagctgcaagccccatgccacggcaggacctttgtacagtgacaacagtaacataagcagatacagcgaaaaagaaaaaggtgaaatagaactggctgaatatagagagacgggtgcattacaagacagccttctccactgtgtgagagaagaaagcattccgaaaaaaaagctacgctctttcaaacaaaaatctcttgatatagggaatgcagactcgcttttgtttacattagacgaacatcgtaggaagtcgtgcatagatcggtgtgacatagagaagcctccgacccaagctgcgtatatcgcacaaagaccaaacgaccctggacgttctagacagaactctgctacgaggcctgacaatagtgaaatccccgagaacccagctatggaagggtttccagatgctcgaaggcctgtcataccagaggttaggttaaactgtatggagactttcgaggtgaaagttgactcgccggtaaagcctgctcctaaagaggatttagatctgatagatctatcctcagattcaacctcggggcctgaaaaacactctatactctcaacctccgacagcgactctcttgtatttgagcctcttccccctctcagaatagtcgagagtgacgaagaagaggagacgatgaaccaaggcgatgacggcccctccggtaaaaatgctgcctcttctccctccgtccccagccatccctccgtcctcagcctgagcacagctccgcttgtacaagtaagtgtggaggattgttccaaagacttttcttctaaggactcaggaaataatcagtcagcagggaacactgactctgccctcatcactctggaagaccctatggacgccgaaggatcctcaaagccagaggagctgccagagttctcctgcggtagcccactgacgctgaagcaaaaacgagacctccttcagaagtcgtttgctctccccgagatgtcgctggatgatcaccctgacccgggcactgagggggagaagcctggggagctgatgccaagttcaggggcaaaaaccgtcctcctcaaagttcccgaagatgcagagaaccccacagaaagtgagaagcctgataccagtgcagaatctgatacagaacagaatcctgaaaggaaggtggaagaggatggagctgaggaatccgaatttaagattcagattgttcccaggcagaggaagcagaggaagattgctgtcagtgctatccagagagagtacctcgacatctccttcaacattctggacaaactgggagaacagaaagatccagatccttctactaaaggactttcaactttggaaatgccacgagaatcttcatctgcccctacgttagatgcaggtgtgccggaaacaagtagccattcctcaatatcaactcagtataggcagatgaaaaggggatccctgggagttctgacaatgagccagttaatgaagcggcagctggagcatcagtctagcgccccccataacatcagcaactgggacactgaacagatacagcctgggaaacgccagtgtaacgtgccaacgtgcctaaaccctgacctggagggacagccattgaggatgagaggtgccaccaaatccagcctgctatcagcaccaagcatagtcagtatgtttgtgcctgcacctgaagagttcactgacgagcagccgacggtgatgacggacaaatgccatgactgtggggccattcttgaagaatacgatgaagagacacttgggctagccatcgtggtcctctccacattcattcacttaagcccagacctggcagccccgctgctgctggatatcatgcagtctgtgggaagattggcatccagtactaccttttctaatcaagcagaaagcatgatggttcccggcaatgcggcgggggtggccaagcagttcctgcgctgcatcttccatcagttggcccccaacggcatcttcccgcagctgttccaaagcacgatcaaagatgggacttttttacggaccttagcctcgtctctgatggacttcaatgagctgagctccatcgcagctctcagtcagctcctagagggtctaaataacaaaaagaatttaccagcagggggtgctatgattcgctgtttggaaaacattgcaaccttcatggaagctttgcctatggattctcctagtagcctctggaccacaattagcaaccagtttcagacattttttgccaagctgccttgtgttttacctctgaagtgttctttagattccagtttaagaattatgatttgcctcttgaagatcccttctaccaatgctacaaggagtttgttggaaccattttcaaaactgctcagctttgtaattcagaatgccgtcttcactctggcctacctggtggagctgtgtggcttatgttaccgagctttcactaaggaacgagataaattctacttgtctcgtagtgttgttctagaacttctgcaggccctaaagctcaaatctcctttaccagatacaaaccttcttctgcttgttcagtttatttgtgcagatgctggaaccaaactagctgagtcaacaatcctgagcaagcagatgatagcctctgtacctggatgtgggactgcagcgatggagtgtgtgaggcagtacatcaacgaagtgctggatttcatggcagacatgcacacgctgaccaaactgaagagccacatgaagacatgttcccagcctctgcatgaagatacctttgggggacatctcaaagtggggctggcccagattgcagccatggacatctcacggggcaaccacagagataacaaagctgtgatccgctatctgccttggctttatcatcccccctctgcaatgcagcaaggacctaaagaattcattgagtgtgtctcccatatccgactgttgtcctggctgctgctgggttccctcactcacaatgcagtgtgcccaaatgcctcctctccctgcctgcccattcctctggatgcaggctcccacgttgcagaccatcttattgttatcctgattggatttccagagcaatcaaagacctccgtgctgcacatgtgctccctcttccacgcgttcatctttgctcagctgtggacagtttattgcgagcaaagtgccgtcgctacaaatctccaaaatcagaatgaattcagcttcacggcgatactgacagcactagaattttggagtagggtgacacccagcatccttcagctaatggcccataacaaagtgatggtagaaatggtgtgtctccatgtgattagtttaatggaggcattgcaggaatgcaattcgaccatttttgtcaagctgatacctatgtggttgccaatgattcagtcaaatatcaagcacttatctgcgggactccagcttcgcctccaggctattcagaaccacgtgaaccaccacagcctaaggacgctgccgggctcgggccagagcagtgctggcctggcagccctccgaaagtggttgcagtgcactcagttcaaaatggcccaggtggagatccagtcctcggaagcagcctctcaattttatcctctatgagtggactcctcggcgctcagtgtcaacactctggtttagcaataatgggtttaaaaacaaacaatttgatccaagcaggttggggaacatattggtactgtacattctctttctagtttagtaaaagatgtgcaaaggccagagagggccgaaaatgaagctttcttgctacacatatttctgatgactccttgggctatctgattaagtgtttccttacattattttttaaaaaccaaatcatttttctttaactaacttctattttttttaagaaaaaaaaatagactggtgggtactcacagaaaagttgtataagtccccctgttgctatttttgatgatagagaataaatagggtttttgaaa

SEQ ID NO: 343967 - protein, 43 aa, Artificial Sequence
  derived and/or modified sequence
RFRPPIRRPPIRPPFRPPFRPPVRPPIRPPFRPPFRPPIGPFP

SEQ ID NO: 343968 - protein, 42 aa, Artificial Sequence
  derived and/or modified sequence
RFRPPIRRPPIRPPFYPPFRPPIRPPIFPPIRPPFRPPLRFP

SEQ ID NO: 343969 - protein, 46 aa, Artificial Sequence
  derived and/or modified sequence
RFRPPIRRPPIRPPFNPPFRPPVRPPFRPPFRPPFRPPIGPFPGRR

SEQ ID NO: 343970 - protein, 406 aa, Artificial Sequence
  derived and/or modified sequence
MVHCAGCKRPILDRFLLNVLDRAWHVKCVQCCECKCNLTEKCFSREGKLYCKNDFFRCFGTKCAGCAQGISPSDLVRRARSKVFHLNCFTCMMCNKQLSTGEELYIIDENKFVCKEDYLSNSSVAKENSLHSATTGSDPSLSPDSQDPSQDDAKDSESANVSDKEAGSNENDDQNLGAKRRGPRTTIKAKQLETLKAAFAATPKPTRHIREQLAQETGLNMRVIQVWFQNRRSKERRMKQLSALGARRHAFFRSPRRMRPLVDRLEPGELIPNGPFSFYGDYQSEYYGPGGNYDFFPQGPPSSQAQTPVDLPFVPSSGPSGTPLGGLEHPLPGHHPSSEAQRFTDILAHPPGDSPSPEPSLPGPLHSMSAEVFGPSPPFSSLSVNGGASYGNHLSHPPEMNEAAVW

SEQ ID NO: 343971 - DNA, 2283 bp, Artificial Sequence
  derived and/or modified sequence
cggccgcgagttgtgactggagccacgatgcacggccaggcgcggtgagaagccagcccgtagtgcctcccgaaggagcccgggcgcagggagggtcgccctgaggacacggaggccgccaggcaggccaagggccgaggtgactgggctggggcggtagggaaggagcgagtgcgcctggctgcctccgcacggagttgtccctctctgttttcgattgacacaaacacttctccaaaagcggggaaacctaagcaacaacagcaatcaacaccaagatcttcctcctaccctcccctctttcccttctcccgcggtcggccctcgccccctcccccaggcccagcgcgggcgctcggcgcgtccagacccgcggcgcgatgccggcagtttaggatccaaagcttctctgctccttttgttctttccttcccttttttaaaaaaagaggggggaaatcccagtggtgggcagcctggcacgcacacagtcgccctcataccccgacaaaagcagatgcactttgacttctgacagctctacctcaagccccggagaactcagcggcgctttcctcgcaacccgagctcggcgagtcgtcgtcttcttcttctccgtttttatttatttatttccgttcccgccgccgttctcgctgaccttcactcctccgcgggctctgagcagaagggtcgcattctctcccgcctgagacttcttttcctcgccccgggagctcaggcggcgccgctccagcccggggccccgggactccccggctgcacacttcactgagacgcccccccaggccccgatcagcctcgtttcctccaccctactttgatttcctggtgcgagttttggcttgcacggccgagtgtgtgtcctctttttggagagactggggagctcgtgccgattgtcttcaggagtcatcccctgggctctactttgcccctctctctctctgggcctcatcagaccaaaccaaagaccatggttcactgtgccggctgcaaaaggcccatcctggaccgctttctcttgaacgtgctggacagggcctggcacgtcaagtgcgtccagtgctgtgaatgtaaatgcaacctgaccgagaagtgcttctccagggaaggcaaactctactgcaagaacgacttcttccggtgtttcggtaccaaatgcgcaggctgcgctcagggcatctcccctagcgacctggtgcggagagcgcggagcaaagtgtttcacctgaactgcttcacctgcatgatgtgtaacaagcagctctccactggcgaggaactctacatcatcgacgagaataagttcgtctgcaaagaggattacctaagtaacagcagtgttgccaaagagaacagccttcactcggccaccacgggcagtgaccccagtttgtctccggattcccaagacccgtcgcaggacgacgccaaggactcggagagcgccaacgtgtcggacaaggaagcgggtagcaacgagaatgacgaccagaacctgggcgccaagcggcggggaccgcgcaccaccatcaaagccaagcagctggagacgctgaaggccgccttcgctgctacacccaagcccacccgccacatccgcgagcagctggcgcaggagaccggcctcaacatgcgcgtcattcaggtctggttccagaaccggcgctccaaggagcggaggatgaagcagctgagcgccctgggcgcccggcgccacgccttcttccgcagtccgcgccggatgcggccgctggtggaccgcctggagccgggcgagctcatccccaatggtcccttctccttctacggagattaccagagcgagtactacgggcccgggggcaactacgacttcttcccgcaaggccccccgtcctcgcaggcccagacaccagtggacctacccttcgtgccgtcatctgggccgtccgggacgcccctgggtggcctggagcacccgctgccgggccaccacccgtcgagcgaggcgcagcggtttaccgacatcctggcgcacccacccggggactcgcccagccccgagcccagcctgcccgggcctctgcactccatgtcggccgaggtcttcggacccagcccgcccttctcgtcgctgtcggtcaacggtggggcgagctacggaaaccacctgtcccacccccccgaaatgaacgaggcggccgtgtggtagcggggtctcgcacggtctgcggagttcgtggttgtacagaaatgaacctttatttaagaaaaatag

SEQ ID NO: 343972 - DNA, 1221 bp, Artificial Sequence
  derived and/or modified sequence
atggtgcactgtgccgggtgtaagcggcccatcctcgatcggttccttttaaacgttcttgacagggcgtggcacgtcaagtgtgtgcaatgttgtgagtgcaaatgtaacctgactgagaagtgtttctctagggagggcaagctctactgcaaaaatgatttttttaggtgcttcgggaccaaatgtgcaggctgcgctcaggggatcagtcccagcgatcttgtgcgccgggctcggtccaaggtctttcaccttaactgcttcacatgtatgatgtgtaacaagcaactgtcgacaggcgaggaactctacatcattgacgaaaacaaattcgtctgcaaggaggattacctgagcaacagctccgtggctaaggagaacagcctccactctgcaaccaccggaagcgacccctccctgagcccggatagccaggacccgtcccaggatgatgctaaggactccgagtccgctaatgtatctgacaaagaagcgggctcaaatgaaaatgacgatcagaatctaggtgctaagcggcgagggcctagaacgaccatcaaagctaaacagttagaaacacttaaggccgctttcgcagctacccccaagcctacaagacacattcgcgagcagctggcacaagagacgggtctcaacatgcgcgtgatccaagtttggtttcagaatcgtcgctcgaaggaaaggcggatgaagcagctgtcggctctgggagctaggcggcatgcttttttcagaagtcctcgacgaatgagaccccttgtcgacaggttagagccaggagagctgattcccaacgggcctttctcattttacggcgattatcagtccgagtattacgggcccggcgggaactacgacttcttccctcagggccctccaagcagtcaggcgcaaacccccgtggatttgccattcgtccctagcagtggaccctctggaactccccttggcggattggaacaccccttacctggccatcatccttcaagcgaggcccagcggtttacagacatcctggcccaccctccaggagacagtccatcacctgagccttccctgcctggacctctgcactcgatgtcagctgaggtgtttggccccagccctccgttctcttctctgtcagttaatggtggcgcttcttacggaaaccacctcagtcacccccccgagatgaatgaagctgccgtttggtag

SEQ ID NO: 343973 - DNA, 1221 bp, Artificial Sequence
  derived and/or modified sequence
atggtgcactgtgccggctgcaagaggcccatcctggaccgcttcctgctgaatgtgctggaccgggcctggcacgtgaagtgtgtgcagtgctgtgagtgcaagtgcaacctgacagagaagtgcttcagccgggagggcaagctgtactgcaagaatgacttcttccgctgcttcggcaccaagtgtgccggctgtgcccagggcatcagccccagcgacctggtgagaagagcccggagcaaggtgttccacctgaactgcttcacctgcatgatgtgcaacaagcagctgagcactggagaggagctgtacatcattgatgagaacaagtttgtgtgcaaggaggactacctgagcaacagctctgtggccaaggagaacagcctgcacagcgccaccactggaagtgaccccagcctgagcccagacagccaggaccccagccaggatgatgccaaggacagcgagagcgccaacgtgtctgacaaggaggccggcagcaatgaaaatgatgaccagaacctgggcgccaagaggcggggccccaggaccaccatcaaggccaagcagctggagaccctgaaggccgcctttgctgccacccccaagcccaccaggcacatccgggagcagctggcccaggagaccggcctgaacatgagggtcatccaggtgtggttccagaacagaagaagcaaggagaggaggatgaagcagctgagcgccctgggcgccaggagacatgccttcttccgcagccccaggaggatgaggcccctggtggaccggctggagcctggagagctgatccccaacggccccttctccttctatggagactaccagagcgagtactacggccctgggggcaactatgacttcttcccccagggcccccccagcagccaggcccagacccctgtggacctgccctttgtgcccagcagcggccccagcggcacccccctgggcggcctggagcaccccctgcccggccaccaccccagcagcgaggcccagcgcttcacagacatcctggcccaccccccaggggacagccccagccctgagcccagcctgcccggccccctgcacagcatgtctgctgaggtgtttggccccagcccccccttcagcagcctgtctgtgaatggaggagccagctatggcaaccacctgagccaccccccagagatgaatgaagctgctgtgtggtag

SEQ ID NO: 343974 - DNA, 3433 bp, Artificial Sequence
  derived and/or modified sequence
ccaagatcttcctcctaccctcccctctttcccttctcccgcggtcggccctcgccccctcccccaggcccagcgcgggcgctcggcgcgtccagacccgcggcgcgatgccggcagtttaggatccaaagcttctctgctccttttgttctttccttcccttttttaaaaaaagaggggggaaatcccagtggtgggcagcctggcacgcacacagtcgccctcataccccgacaaaagcagatgcactttgacttctgacagctctacctcaagccccggagaactcagcggcgctttcctcgcaacccgagctcggcgagtcgtcgtcttcttcttctccgtttttatttatttatttccgttcccgccgccgttctcgctgaccttcactcctccgcgggctctgagcagaagggtcgcattctctcccgcctgagacttcttttcctcgccccgggagctcaggcggcgccgctccagcccggggccccgggactccccggctgcacacttcactgagacgcccccccaggccccgatcagcctcgtttcctccaccctactttgatttcctggtgcgagttttggcttgcacggccgagtgtgtgtcctctttttggagagactggggagctcgtgccgattgtcttcaggagtcatcccctgggctctactttgcccctctctctctctgggcctcatcagaccaaaccaaagaccatggttcactgtgccggctgcaaaaggcccatcctggaccgctttctcttgaacgtgctggacagggcctggcacgtcaagtgcgtccagtgctgtgaatgtaaatgcaacctgaccgagaagtgcttctccagggaaggcaaactctactgcaagaacgacttcttccggtgtttcggtaccaaatgcgcaggctgcgctcagggcatctcccctagcgacctggtgcggagagcgcggagcaaagtgtttcacctgaactgcttcacctgcatgatgtgtaacaagcagctctccactggcgaggaactctacatcatcgacgagaataagttcgtctgcaaagaggattacctaagtaacagcagtgttgccaaagagaacagccttcactcggccaccacgggcagtgaccccagtttgtctccggattcccaagacccgtcgcaggacgacgccaaggactcggagagcgccaacgtgtcggacaaggaagcgggtagcaacgagaatgacgaccagaacctgggcgccaagcggcggggaccgcgcaccaccatcaaagccaagcagctggagacgctgaaggccgccttcgctgctacacccaagcccacccgccacatccgcgagcagctggcgcaggagaccggcctcaacatgcgcgtcattcaggtctggttccagaaccggcgctccaaggagcggaggatgaagcagctgagcgccctgggcgcccggcgccacgccttcttccgcagtccgcgccggatgcggccgctggtggaccgcctggagccgggcgagctcatccccaatggtcccttctccttctacggagattaccagagcgagtactacgggcccgggggcaactacgacttcttcccgcaaggccccccgtcctcgcaggcccagacaccagtggacctacccttcgtgccgtcatctgggccgtccgggacgcccctgggtggcctggagcacccgctgccgggccaccacccgtcgagcgaggcgcagcggtttaccgacatcctggcgcacccacccggggactcgcccagccccgagcccagcctgcccgggcctctgcactccatgtcggccgaggtcttcggacccagcccgcccttctcgtcgctgtcggtcaacggtggggcgagctacggaaaccacctgtcccacccccccgaaatgaacgaggcggccgtgtggtagcggggtctcgcacggtctgcggagttcgtggttgtacagaaatgaacctttatttaagaaaaatagaaaaaaaaaaaaacataaaaagcaagtccccacccccttcctccagcctcgagaaccattctccttctggggagaccggatggaaaagggggacacgaaataggatccaaatcggcctcgaggtgggactgggatccgcgcactggctgtcgacgtgcagaactggggctccccaaaggaaacgcagacctctccccaactcccacctggacccggatccgtagacagaccccgcgggcgtgtgcgcctggcaggcgggcggcgaaaagacgtccagggcagccgcgggtgcgcacagccgttggcgatgccaggagccgtggggagggaggccgtgagcacagccgggtgaaggaagtgaagcggcccagggcgctcccgggccagccaggagggttctagctctgggatatcccttattagtgttgtctcagagttcaacaacagcgacaaaaaactcttatagcttcagaaacgccgacctgccgtgcatcaggtgggactatatatatattttttgtctatctggatttttggtttttgtttttgccaaaattgcaaaattctaaatgtaaagccctccgtatcaactcttctaccttcgcaaaactacacatacacacatacacacgtacacggacacactcggtaagatggtctccagccagaccgctcagtaaaatgacttgaacatcagctgtacaagaaaagtattctaccttcacacacaaaaagttaaaaaaaaaaaaaaaagactattgaactaaaaacagtcaactgtttacgtataatgttaaattcaggagttcagtgttttactaatatatcctgttttgaaacctcttgttcgaaaacaaaatgttttgagcaatcaaccaaaattgttccttttcttttcctgtagatgttctgacagatttgcagggctttcggctcactgtgctagtatgtaaaaaggtgttgtttacacgaggcaaagagaaaacatgctattcagacagttgccaaatagaataattatagcacaaatactgtaaaggtgcctggcaccagcaacctgagaaagtgttaaaaaaaaaaaaaaaaaagtgttacaagatttaaaaaaaaacatctttgctaatttttttgtcctgttgaacattcatggaattgttaatatgacttatatagacccacacaggttttatttttgtgtctttaaaataaaagtccaaaatatttaaattttatggtcaaatatgcagtcaacagctgctactttttctttatatattaaatttctcatatgtcttttattgttctaataaacctaagcttgtgtgacctccagtgcatattagaccattcactgtatgaaagaaaacatgttgaataaatttgtgagtttttaataaaaatagaaaatctgatgtttagataa

SEQ ID NO: 343975 - DNA, 1221 bp, Artificial Sequence
  derived and/or modified sequence
atggtgcactgcgccggctgcaagcggcccatcctggaccggttcctgctgaacgtcctggacagggcttggcacgtcaagtgtgtgcagtgctgtgaatgcaaatgtaacttgacagagaagtgcttctcacgggagggcaagctgtactgtaagaacgacttcttcagatgcttcggcaccaaatgcgcgggctgtgctcagggcataagcccatctgatctcgtcaggcgcgcgcgaagtaaagtgttccacctgaactgcttcacgtgcatgatgtgcaacaagcagctgagcactggggaagagctgtacatcatagatgaaaataaatttgtctgcaaggaggactatctgtccaattcctccgtggccaaggaaaatagtctgcattcagccacaacaggtagcgatcccagcctgagtcccgattctcaggatccttctcaggacgatgctaaggatagcgagagtgctaacgtctctgacaaggaagcaggttccaatgagaatgatgaccagaatctcggagccaaaagacgtgggccccgcactacaatcaaagcaaaacaactggaaacattgaaagctgccttcgctgccacccccaaacccacaaggcacataagggaacagctggcccaggagacagggttgaacatgagggttattcaggtgtggttccagaaccggcgatccaaggagcggaggatgaagcagctgtctgcattaggcgcgcggagacacgccttcttccggtctcccaggcgaatgcggcctctcgtggatcggcttgagccaggcgaacttatacctaatggccccttttccttctatggggattaccaaagcgagtactacgggccgggcggaaactatgatttttttccccagggtcccccctcctctcaagcccagaccccagtcgatctcccatttgtaccctcctctggaccttccggtactcctctgggtggtctggaacatcctcttccagggcatcacccatcttctgaagcacaaaggttcactgacatcttggctcacccccctggggactctcctagccctgaaccttccttacctggacccctgcattcaatgagcgctgaggttttcggaccctcccccccctttagctcactgtctgttaatgggggtgcttcatacgggaaccatctctctcatccaccagagatgaacgaggctgctgtctggtag

SEQ ID NO: 343976 - DNA, 1221 bp, Artificial Sequence
  derived and/or modified sequence
atggtccactgcgccggttgtaagagaccgatactggaccggttccttttgaacgtcctggatcgcgcatggcatgtgaaatgcgtgcaatgttgcgagtgtaagtgtaacctcactgagaaatgtttctcccgagaaggtaagctttactgcaaaaatgacttttttaggtgctttggaactaagtgcgccggttgcgcacagggaatcagtccttctgatctggtgcgcagagcacgctctaaagtgttccatctcaactgtttcacctgcatgatgtgcaataagcagctgtcaaccggggaggagctgtacatcatcgacgagaacaaatttgtatgcaaggaggattatcttagtaactcaagtgttgccaaagaaaactctctccattcagcaactacaggcagtgacccctctctgagcccagactctcaggacccctcacaagatgacgcgaaagactccgaatctgctaacgtaagtgacaaggaggccggaagtaatgagaacgatgatcagaacttgggcgctaagcggcgtggcccaaggacaacaattaaggccaagcagctagagaccctcaaggccgcatttgcagcaaccccaaagccaactagacatatacgagagcagctggcccaagagactggcttgaatatgagagtgattcaagtttggtttcagaacaggagaagcaaggaaaggcggatgaagcagctgtccgctctgggcgcacgtcgacatgcttttttccggagtccaaggcgaatgcgcccactggttgaccggctggaaccaggcgagctcattccaaatgggcctttctctttttatggagattaccagtctgagtactacgggccaggcggtaattatgacttcttccctcaagggcctccttcatcccaggcgcaaacacccgtggatctaccatttgtaccttcatctgggccatcaggcaccccactcgggggtctggagcatcctctccccggtcaccatccatcctcagaggctcagagattcaccgatatcctcgctcacccacccggagactctccctcccccgagccgagcttgccgggtcctctccactccatgagtgccgaggtctttggcccaagtcccccattttcaagtctttcagtaaatggcggtgcctcatacgggaaccacctctctcatcctcccgagatgaacgaagcagccgtctggtag

SEQ ID NO: 343977 - DNA, 1221 bp, Artificial Sequence
  derived and/or modified sequence
atggtgcactgcgccggctgcaagagacccatcctggacagattcctgctgaacgtgctggacagagcctggcacgtgaagtgcgtgcagtgctgcgagtgcaagtgcaacctgaccgagaagtgcttcagcagagagggcaagctgtactgcaagaacgacttcttcagatgcttcggcaccaagtgcgccggctgcgcccagggcatcagccccagcgacctggtgagaagagccagaagcaaggtgttccacctgaactgcttcacctgcatgatgtgcaacaagcagctgagcaccggcgaggagctgtacatcatcgacgagaacaagttcgtgtgcaaggaggactacctgagcaacagcagcgtggccaaggagaacagcctgcacagcgccaccaccggcagcgaccccagcctgagccccgacagccaggaccccagccaggacgacgccaaggacagcgagagcgccaacgtgagcgacaaggaggccggcagcaacgagaacgacgaccagaacctgggcgccaagagaagaggccccagaaccaccatcaaggccaagcagctggagaccctgaaggccgccttcgccgccacccccaagcccaccagacacatcagagagcagctggcccaggagaccggcctgaacatgagagtgatccaggtgtggttccagaacagaagaagcaaggagagaagaatgaagcagctgagcgccctgggcgccagaagacacgccttcttcagaagccccagaagaatgagacccctggtggacagactggagcccggcgagctgatccccaacggccccttcagcttctacggcgactaccagagcgagtactacggccccggcggcaactacgacttcttcccccagggcccccccagcagccaggcccagacccccgtggacctgcccttcgtgcccagcagcggccccagcggcacccccctgggcggcctggagcaccccctgcccggccaccaccccagcagcgaggcccagagattcaccgacatcctggcccacccccccggcgacagccccagccccgagcccagcctgcccggccccctgcacagcatgagcgccgaggtgttcggccccagcccccccttcagcagcctgagcgtgaacggcggcgccagctacggcaaccacctgagccacccccccgagatgaacgaggccgccgtgtggtag

SEQ ID NO: 343978 - protein, 543 aa, Artificial Sequence
  derived and/or modified sequence
MEQSCEEEKEPEPQKNIQETKQVDDEDAELIFVGVEHVNEDAELIFVGVTSNSKPVVSNILNRVTPGSWSRRKKYDHLRKDTARKLQPKSHETVTSEAVTVLPASQLESRSTDSPIIIEPLSKPDYRNSSPQVVPNNSSELPSPLITFTDSLHHPVSTALSVGGINESPRVSKQLSTFEVNSINPKRAKLRDGIIEGNSSASFPSDTFHTMNTQQSTPSNNVHTSLSHVQNGAPFPAAFPKDNIHFKPINTNLDRENELAKTDILSLTSQNKTFDPKKENPIVLLSDFYYGQHKGEGQPEQKTHTTFKCLSCVKVLKNVKFMNHVKHHLEFEKQRNDSWENHTTCQHCHRQFPTPFQLQCHIENVHTAQEPSTVCKICELSFETDQVLLQHMKDHHKPGEMPYVCQVCHYRSSVFADVETHFRTCHENTKNLLCPFCLKIFKTATPYMCHYRGHWGKSAHQCSKCRLQFLTFKEKMEHKTQCHQMFKKPKQLEGLPPETKVTIQVSLEPLQPGSVDVASITVSTSDSEPSLPRSKSKISKKSH

SEQ ID NO: 343979 - DNA, 1632 bp, Artificial Sequence
  derived and/or modified sequence
atggagcagagctgcgaggaggagaaggagcccgagccccagaagaacatccaggagaccaagcaggtggacgacgaggacgccgagctgatcttcgtgggcgtggagcacgtgaacgaggacgccgagctgatcttcgtgggcgtgaccagcaacagcaagcccgtggtgagcaacatcctgaacagagtgacccccggcagctggagcagaagaaagaagtacgaccacctgagaaaggacaccgccagaaagctgcagcccaagagccacgagaccgtgaccagcgaggccgtgaccgtgctgcccgccagccagctggagagcagaagcaccgacagccccatcatcatcgagcccctgagcaagcccgactacagaaacagcagcccccaggtggtgcccaacaacagcagcgagctgcccagccccctgatcaccttcaccgacagcctgcaccaccccgtgagcaccgccctgagcgtgggcggcatcaacgagagccccagagtgagcaagcagctgagcaccttcgaggtgaacagcatcaaccccaagagagccaagctgagagacggcatcatcgagggcaacagcagcgccagcttccccagcgacaccttccacaccatgaacacccagcagagcacccccagcaacaacgtgcacaccagcctgagccacgtgcagaacggcgcccccttccccgccgccttccccaaggacaacatccacttcaagcccatcaacaccaacctggacagagagaacgagctggccaagaccgacatcctgagcctgaccagccagaacaagaccttcgaccccaagaaggagaaccccatcgtgctgctgagcgacttctactacggccagcacaagggcgagggccagcccgagcagaagacccacaccaccttcaagtgcctgagctgcgtgaaggtgctgaagaacgtgaagttcatgaaccacgtgaagcaccacctggagttcgagaagcagagaaacgacagctgggagaaccacaccacctgccagcactgccacagacagttccccacccccttccagctgcagtgccacatcgagaacgtgcacaccgcccaggagcccagcaccgtgtgcaagatctgcgagctgagcttcgagaccgaccaggtgctgctgcagcacatgaaggaccaccacaagcccggcgagatgccctacgtgtgccaggtgtgccactacagaagcagcgtgttcgccgacgtggagacccacttcagaacctgccacgagaacaccaagaacctgctgtgccccttctgcctgaagatcttcaagaccgccaccccctacatgtgccactacagaggccactggggcaagagcgcccaccagtgcagcaagtgcagactgcagttcctgaccttcaaggagaagatggagcacaagacccagtgccaccagatgttcaagaagcccaagcagctggagggcctgccccccgagaccaaggtgaccatccaggtgagcctggagcccctgcagcccggcagcgtggacgtggccagcatcaccgtgagcaccagcgacagcgagcccagcctgcccagaagcaagagcaagatcagcaagaagagccactag

SEQ ID NO: 343980 - DNA, 1632 bp, Artificial Sequence
  derived and/or modified sequence
atggaacagagttgcgaagaggaaaaggaaccagaaccgcaaaaaaatatacaggagaccaagcaagtggatgacgaggatgctgagcttatatttgtaggcgtcgaacacgtcaatgaggatgctgaactgatcttcgtaggggtgacatcgaactccaaaccggtcgtgagcaacattctgaaccgtgtaacacctgggagctggtcccggcggaaaaagtacgatcatctgcgcaaggacacagccaggaagctgcaacccaagtcgcacgagaccgtcaccagtgaggccgtgacagtactaccagcctcccagttggagagtcggtccactgactcccccattatcatagaacccctgagcaagccagactataggaactcctctccccaggtggtgccgaataacagttcagagttgccctccccactgattacatttactgatagcttgcaccacccagtgagcaccgctctgagtgttggcgggattaatgagtcgccacgggtgagtaagcagctgtctacatttgaggtcaatagcatcaaccccaaacgcgcaaaattgagggatggaatcatcgagggaaatagttctgccagcttcccctccgataccttccatactatgaacacccagcagtctactccatcaaacaatgtccacacctccctgtcacacgtccagaatggcgccccatttccggccgcattccccaaggacaacatccacttcaagcccattaacacaaatctggacagggagaatgaactcgccaagactgacatcctatccctcacttcacagaacaagaccttcgaccctaagaaagaaaaccccattgtgctgctttctgacttctactacggccagcacaaaggcgaagggcagcccgagcaaaagacacacacaactttcaaatgtctgtcctgcgtgaaagttcttaagaatgtgaagttcatgaatcacgtgaagcatcacctggagtttgaaaaacagagaaacgactcctgggagaatcatactacctgtcagcactgccacaggcagttccccactccgtttcaacttcagtgccatattgagaacgtccacacggcccaggagcccagtacagtatgcaagatctgcgagctgtccttcgagacagatcaggtcctgctgcagcacatgaaagatcaccataagccaggagaaatgccgtatgtgtgccaggtgtgccactacagaagctcagtgtttgccgatgtagagacacactttcgaacctgtcacgagaatactaagaacctgctttgtccgttctgcctgaaaatctttaagacggccaccccttacatgtgccattacagaggacactggggtaaatctgcccatcagtgcagtaaatgtagacttcagtttttaacgttcaaggagaagatggaacataaaacacagtgtcaccagatgtttaagaagccaaaacaactagagggcctgccaccagaaaccaaagtgactattcaggtttcactggagccgctgcaacccggaagcgttgatgtcgcgagcatcacggtgagtacctcggactctgaaccctcccttcccaggagcaaatccaagatatccaaaaaaagccactag

SEQ ID NO: 343981 - DNA, 1632 bp, Artificial Sequence
  derived and/or modified sequence
atggagcaatcatgcgaggaagagaaggagccggaaccacaaaaaaatatccaggaaacaaaacaagtagatgacgaagacgcagagctgatctttgttggtgttgagcacgttaacgaagatgcagaactaattttcgtgggcgtaacttccaattctaagccggtggtcagtaatatcctgaatagagttactcccggctcttggtctaggaggaaaaagtacgaccacctaaggaaggatactgcccggaaacttcagcccaagtcacacgaaacagtgacatcagaggccgtgactgtgcttccagcctcccaactggagagtaggagtaccgatagtcctatcattatcgaacccctgtccaagcctgattatcggaacagttccccccaggtagttcctaacaacagttccgagctgccttctccccttataacctttaccgatagtttacatcaccccgtgagtacggccctgtctgtgggtggcatcaacgaatccccaagggtgagcaagcagctcagtacttttgaagtcaattccattaatcccaaaagagctaaactgagagacggcattatcgaaggcaactcatccgcttccttccccagcgacacgttccacaccatgaatacacaacagtcaaccccctccaataacgtgcacacaagcctctctcacgtacagaacggagccccgttccccgcagccttcccgaaggataacatacatttcaagcccattaacactaacctagaccgtgagaacgaactcgccaagacagacatcctgtcactgacgagccagaataagacctttgaccccaagaaagagaatcctatcgtcctcctttctgatttctactatggccaacacaagggcgagggtcagcccgagcagaaaacacataccacatttaagtgcctcagttgtgtaaaggtactgaagaacgtgaagttcatgaaccacgttaaacaccacttagaatttgagaagcagcggaatgacagctgggaaaaccataccacttgtcagcattgccataggcaatttccaaccccgtttcagctgcagtgccacattgaaaatgtccacacagcgcaggaacccagcacggtgtgcaaaatttgtgaattgtcatttgaaaccgatcaggtcctcctgcagcacatgaaagaccatcacaaaccgggggaaatgccctatgtctgtcaagtgtgccattaccgcagttcagtcttcgcagacgtcgagacccattttagaacgtgtcacgaaaacaccaaaaacctactttgccctttctgtctgaaaatcttcaaaaccgccacaccttacatgtgccactacagggggcactggggaaaatccgcacatcagtgttcgaaatgccgcctacagttcctgacttttaaagagaagatggagcacaagactcagtgtcatcagatgtttaaaaaaccaaagcaactcgagggactgccccccgaaaccaaggtgaccattcaggtctcactggagcctttgcaacccgggagcgtggacgtggcgagcataacagtgtcaacttctgacagcgagccaagtttacccaggagtaaaagcaaaatttctaagaagtcacattag

SEQ ID NO: 343982 - DNA, 1632 bp, Artificial Sequence
  derived and/or modified sequence
atggagcagagctgtgaggaggagaaggagcctgagccccagaagaacatccaggagaccaagcaggtggatgatgaagatgctgagctgatctttgtgggcgtggagcacgtgaatgaagatgctgagctgatctttgtgggcgtgaccagcaacagcaagcctgtggtgagcaacatcctgaacagagtgaccccaggctcctggagcaggaggaagaagtatgaccacctgaggaaggacacagccaggaagctgcagcccaagagccatgaaacagtgaccagcgaggccgtgacagtgctgcctgccagccagctggagagccgcagcacagacagccccatcatcatcgagcccctgagcaagccagactacagaaacagcagcccccaggtggtgcccaacaacagcagcgagctgcccagccccctcatcaccttcacagacagcctgcaccaccctgtgtccacagccctgtctgtgggcggcatcaatgaaagcccccgggtgtccaagcagctgagcacctttgaggtgaacagcatcaaccccaagagggccaagctgagagatggcatcatcgagggcaacagcagcgccagcttccccagcgacaccttccacaccatgaacacccagcagagcacccccagcaacaacgtgcacaccagcctgagccacgtgcagaatggagcccccttccctgctgccttccccaaggacaacatccacttcaagcccatcaacaccaacctggaccgggagaatgagctggccaagacagacatcctgagcctgaccagccagaacaagacctttgaccccaagaaggagaaccccatcgtgctgctgagtgacttctactacggccagcacaagggggagggccagcctgagcagaagacccacaccaccttcaagtgcctgagctgtgtgaaggtgctgaagaatgtgaagttcatgaaccacgtgaagcaccacctggagtttgagaagcagagaaatgacagctgggagaaccacaccacctgccagcactgccaccggcagttccccacccccttccagctgcagtgccacattgaaaatgtgcacacagcccaggagcccagcacagtgtgcaagatctgtgagctgagctttgaaacagaccaggtgctgctgcagcacatgaaggaccaccacaagccaggagagatgccctacgtgtgccaggtgtgccactaccgcagctctgtgtttgctgatgtggagacccacttccgcacctgccacgagaacaccaagaacctgctgtgccccttctgcctgaagatcttcaagacagccaccccctacatgtgccactaccggggccactggggcaagagcgcccaccagtgcagcaagtgccgcctgcagttcctgaccttcaaggagaagatggagcacaagacccagtgccaccagatgttcaagaagcccaagcagctggagggcctgcccccagagaccaaggtgaccatccaggtgtccctggagcccctgcagcccggctctgtggatgtggccagcatcaccgtgtccaccagtgacagcgagcccagcctgcccaggagcaagagcaagatcagcaagaagagccactag

SEQ ID NO: 343983 - DNA, 1632 bp, Artificial Sequence
  derived and/or modified sequence
atggagcagagctgcgaggaggagaaggagcccgagccccagaagaacattcaggaaacaaaacaggtcgacgatgaggatgctgagctgatattcgtgggggtggagcacgttaacgaggatgcagaactgattttcgtgggcgtgactagcaactctaagccagtcgtgtccaatatcctaaaccgtgtgaccccagggtcctggtctcgtcgcaaaaagtacgaccacctaagaaaagacacggcccgcaagctccagcctaagagccacgagactgtcacctcagaggccgtgactgttctccccgcctcccagctggaatcaaggtccacagacagtccgataataattgaacctttatccaagcctgactacagaaactcttcccctcaggtcgtcccaaacaactcatcagaactccccagccctttgattactttcacagatagcttacaccacccggtgagcacagcactttccgtgggcggaatcaatgaaagtccccgagtctcaaaacaactgtctactttcgaggttaactctatcaatccaaagagagcaaagctgcgggatgggatcatagagggtaatagctccgcatccttcccttccgatacgttccacaccatgaatacccaacaatccacaccctccaacaacgtgcatactagccttagtcacgtgcaaaatggagccccgttcccggcagcctttcctaaggacaatattcatttcaaacctattaatactaatttagatagggaaaatgaattagctaagactgacattctctcccttacatcccagaacaagacattcgacccgaagaaggaaaatcccatcgtgctgctgtctgatttctactatggccagcacaaaggcgaggggcagcccgagcaaaagactcatacgacattcaagtgcctgagttgtgtaaaggtgcttaagaacgtgaaattcatgaatcacgtgaaacaccatctggaattcgagaagcagaggaatgactcatgggaaaaccatactacctgccagcattgtcacaggcagttccccactcctttccagctacagtgtcacatcgagaacgtacatacggctcaagagccatcgaccgtttgtaaaatctgtgagttgtccttcgagaccgatcaagtcttgctccagcatatgaaagaccaccacaagcccggagaaatgccatacgtctgtcaggtgtgtcactaccgctcttctgtgtttgctgacgtggagacccattttcggacatgccacgagaataccaaaaatttgctctgccctttttgtctcaaaatctttaagactgctacgccgtacatgtgtcactatagaggacactgggggaagagcgcacatcagtgctcaaagtgcaggctgcaattcctcacttttaaagagaagatggaacataagacccagtgccatcaaatgttcaagaagcccaaacagctggaggggctcccaccggagactaaagttactattcaggtgagtctcgagcccctccagccgggatctgtggatgttgcctctatcacggtgagcacatctgatagtgaaccctcgcttcctcggtcaaagagtaagatctctaaaaagtctcattag

SEQ ID NO: 343984 - DNA, 1632 bp, Artificial Sequence
  derived and/or modified sequence
atggagcagagctgcgaggaggagaaggagcccgagccccagaagaacatacaggagaccaaacaggtcgatgacgaggatgcagaattaatcttcgtgggggtcgagcacgtcaacgaagacgccgagcttattttcgtcggagtgacctccaacagcaagcctgtcgtctcaaatatcctgaatcgggtcactccaggatcatggtctaggcggaaaaaatacgaccatctgcgtaaagatacagctcgcaaactccagccaaaaagccacgagacagtcaccagcgaggcggtgacagtgctacctgccagccagcttgaatcccgaagcaccgacagtccaatcatcatcgagcctctgtccaagccagattaccggaactcaagtccacaggtggtgccaaataactcaagtgagctcccgagcccattgatcacattcacggatagcctccatcacccggtgagcaccgcgctgagcgtggggggcatcaacgaaagtccacgggtctcgaaacagttgagcacttttgaggtgaactcaattaacccgaaacgcgccaaattacgtgacggaatcatcgagggtaactcttctgcatcattcccttctgataccttccacactatgaatacgcagcaatctactccaagcaacaatgtgcacacctcactatcacatgtgcaaaacggcgccccgttccctgctgcgtttcctaaagataatattcactttaaacccatcaacacgaacctcgaccgtgaaaatgaactggccaaaactgacatcttatcgctaacgagtcaaaataagacattcgatcccaaaaaggaaaatccgattgttctgcttagcgatttctattacggtcagcacaaaggggagggccagccagagcagaaaacccacactacctttaagtgcttatcctgcgtcaaggtcctcaagaatgtgaagtttatgaatcatgttaaacaccacctcgaattcgaaaagcagcgcaatgactcctgggagaaccacaccacgtgccagcattgccacagacagtttcctaccccgttccagttgcaatgccacattgagaacgtccatacggcacaggaaccctctactgtttgcaaaatttgtgaactaagcttcgaaaccgaccaggtactgctgcagcatatgaaggatcaccataagcccggtgagatgccttacgtgtgccaggtttgccactacagatcttcagtgtttgcggatgtggagacacactttcgtacttgccacgagaacaccaaaaatctgctgtgccctttctgcctgaagattttcaagacagcgactccctatatgtgtcattaccggggacactggggcaagtctgcccatcagtgttccaaatgtagactgcagtttctaacattcaaggagaagatggagcataagacccaatgtcatcaaatgtttaaaaaaccaaaacagctcgagggactgccgcctgaaactaaggtaactatacaggtgtccctggagccccttcaacccggttctgtcgatgtggcctccatcaccgtgagcacctcagatagtgaaccttctctgccccgctcaaagagcaaaatcagcaagaagtcccattag

SEQ ID NO: 343985 - DNA, 1632 bp, Artificial Sequence
  derived and/or modified sequence
atggagcagtcatgcgaggaggaaaaggagccagagcctcagaagaatattcaggagacaaagcaagtagatgacgaagacgcagagctcatattcgttggagttgagcatgtcaatgaggatgccgagctcatttttgttggagtgacatcaaattcaaaacctgtagtgtctaatattctcaaccgggtgactcctgggagctggtcacgccgtaagaaatatgaccatttaaggaaggatacagctagaaagcttcagcccaaaagccacgagaccgtcacatctgaggctgtgaccgtactccctgcttcgcagttggaatcacgtagcactgattctcctataatcattgagcccctgtctaagccagattacagaaattctagcccccaagtcgtccccaacaactcatcagagctacctagtcctctcattacctttacagacagcctgcaccatcccgtttcaaccgcgctcagcgttggcggtatcaatgaatcccctagagtgagcaaacagctgtccacatttgaggtaaattcaataaaccctaaacgggcaaaacttagggacggcatcatagaggggaacagctccgctagtttcccttcagatacgttccatacaatgaatacccaacagagtacgccaagcaacaatgtgcatacctcacttagccacgtccaaaatggagcaccgtttccagccgcttttcccaaggataatattcacttcaagcccatcaacaccaacttggatagggaaaatgaactggcaaagacagatatcctgtcactgacttcccagaacaagactttcgatccgaaaaaagagaaccctatcgtgctgctgtcagacttttactacgggcagcataagggggagggtcagcctgaacagaaaacacacactacatttaaatgcctttcatgtgtcaaggtcctgaagaacgtgaaatttatgaaccacgtaaagcaccatctcgaatttgagaagcagcgcaatgatagctgggagaatcatacaacatgccagcattgccataggcagttccccacacccttccagcttcagtgccacattgagaacgtgcatacagcacaggagcctagcactgtgtgcaagatttgtgagcttagttttgaaaccgaccaggtactgttgcagcacatgaaagaccatcacaaacccggagagatgccctatgtgtgtcaagtctgtcactaccggagttctgtcttcgctgacgttgagacacactttcggacctgccacgaaaataccaaaaatctcctgtgccctttctgcctgaagatctttaaaaccgctacaccatatatgtgtcattataggggtcattggggaaagagcgcccatcagtgtagtaaatgcagactgcagttcttaactttcaaggaaaagatggagcacaaaactcaatgtcaccagatgtttaagaaacccaagcagctcgagggccttccccctgaaaccaaggtgacaatccaagtgagcctcgaaccccttcaacctggctcggtcgatgtagcgtcaatcaccgtgtccacaagtgactcagagccatctttgcctcgcagtaaatctaagatatctaagaagtcacactag

SEQ ID NO: 343986 - DNA, 1632 bp, Artificial Sequence
  derived and/or modified sequence
atggagcagagctgcgaggaagaaaaagaacccgagccccagaagaatattcaggagacaaagcaagtggacgatgaggacgccgagcttatcttcgtgggcgtggagcacgtcaacgaggacgcagagcttatcttcgtgggcgtgacgtcaaactccaaaccagtcgtgagcaatatccttaaccgggtgacccccggaagttggagcaggcggaaaaaatatgatcatttaaggaaggacaccgccagaaaactccaaccgaaatcccacgagacggtaacatctgaggccgtgacagtgttacctgcttctcaactggagtcacgaagtactgattctcctatcataattgaacctctgagtaaaccagactacaggaattcgtctccacaagttgttcccaataatagctccgagctgccttccccactgattaccttcaccgattctctgcaccaccctgtcagtacagcgttgagtgttggaggaataaatgagtcaccaagggtgtccaaacagctgtcaacttttgaggtgaactccattaatccaaagcgagccaaattacgggacggtattattgagggaaatagcagcgcctcttttccctccgacacttttcacacaatgaatacacagcaaagtaccccaagcaataatgtgcacacctcacttagccacgtgcagaatggcgctccgttccccgcagcctttccaaaggacaatatacatttcaagcccatcaacacgaacctggatagagagaacgagctggctaaaactgatatcctcagcctcacatcccagaataaaacctttgatcccaagaaggaaaaccctatcgtcctgctgtcggacttttactacggccaacacaagggcgagggacaaccagagcaaaagacacatacgactttcaagtgcttatcatgtgtgaaagtgctaaaaaacgttaagttcatgaatcacgtgaagcatcatctggaattcgaaaaacagagaaacgatagctgggaaaaccataccacgtgccaacattgccacaggcaatttcccaccccatttcaactgcaatgccatatcgaaaatgtacatactgcccaagaacctagtaccgtttgtaaaatctgcgagctgtcatttgaaaccgaccaggtgttgttgcagcatatgaaagaccaccataagccaggtgagatgccctatgtctgccaggtgtgccactatagaagttcagtgttcgctgacgtagagactcatttccgcacatgccacgagaatactaaaaatcttctgtgtccattctgtctaaaaatttttaaaacagcaaccccttacatgtgtcactatagaggccattggggaaaaagtgcccaccagtgtagcaaatgccgcctgcagttcctcaccttcaaagaaaagatggagcacaaaacgcagtgtcaccagatgtttaaaaaacctaaacagctcgaaggcctccctcctgaaacgaaagtaactatccaggtgagtctcgagcctctgcaacctgggagcgtcgacgtggccagcattactgtgagcacttcagacagcgagccttctttgcctaggagcaagtccaaaatcagcaagaagtcccattag

SEQ ID NO: 343987 - DNA, 5726 bp, Artificial Sequence
  derived and/or modified sequence
aattataacagctggccttctggtgggcaaaccatcccctgatggactggaagcctaccccccaccccaagccctggctgcgacagctctggaaccctgactgcctgggtgcccctcagctctggaaccctgactgcctggatgctcctcagctctggaaccctgactgcttggataccccctcagctctggaaccctgactgcctggaaccgtgatccggaacccaagatcctttcaaggcctcaggggtattgctgctgccctcctccttctcaatttaaccccgcgtccagccgtcgccaccaggggcgtcagagcgcgcgcatgctcctagctcggagccgcgccgatctcgcgccggcacctggcagccaatcgcaggtctccactggacgcgcgcgtgtggaggcgtgcgcgtcggcggcgccgggggcctgaggaggcgtagtcgccgccggctgtgccccgggagcgcctccggggctggtgcgtggccggcagctcgcgaacagcagctgatccggactggatgtgaccttctgcctggaatagctcaagttcttaaaagttgcgttgtaataaacctgaggctgggaagttcaagatcaagatgctggacgatttggttccttagtgaaggctctcttcctggctggtggatgacagccttcttgctgtgttctcacatgacagaaagaggaagcaaggtggcagtttatataaaggaagcattgggacttgtggccccaccattcaggaataaaaaaattagaaaatggaacaatcatgtgaggaagagaaagagcctgaaccacagaagaacatacaagaaaccaaacaagtagatgacgaagatgctgagctcatctttgttggtgtggaacatgtaaatgaagatgctgagctaatctttgttggggtgacttcaaattcaaaaccagtcgtttcaaacattttgaacagagtcaccccgggttcatggtcaaggagaaaaaagtatgatcaccttagaaaagatactgctcgcaaattgcagcctaaaagtcatgagaccgttacatcagaagcagtgaccgtcctgccagcttcccaacttgaatcgagatcaacagatagtcctattattattgagcctttgtctaaacctgattatagaaatagttcaccacaagttgtgcctaataactcttcagaattaccttctcctttgattacattcacagattcattgcatcatccagtaagtacagcactttcagtaggaggtataaatgaaagtcctcgtgtatcaaagcaactttccactttcgaagtaaacagcataaatcccaaaagggctaaactcagggatggaattatagaaggaaattcttcagcttcgttcccttcagatacctttcatacaatgaatactcagcaaagtacaccctcaaataatgttcatacctcattaagccatgttcagaatggagcaccttttccagcagcttttccaaaggacaatatccatttcaagcctataaatacaaatcttgatagggaaaatgaattggcaaaaacagacattttgagtctaacaagtcaaaacaagacctttgatcccaagaaagaaaatcccattgtgttacttagtgacttttactatggacagcataaaggagaagggcagccggaacagaagactcacaccacctttaaatgcctcagctgcgtgaaagttctaaaaaatgttaagtttatgaatcacgtgaagcatcatttggaatttgagaagcagaggaacgacagctgggaaaaccacaccacctgccagcactgccaccggcagtttcccactcccttccagctacagtgtcacatcgaaaatgtccacactgcccaggagccctctactgtctgtaaaatctgtgaattgtcatttgaaacagatcaggtcctcttacaacacatgaaggaccatcataagcctggcgaaatgccctatgtgtgccaggtttgccattatagatcgtcggtctttgctgatgtagaaacacattttagaacgtgccatgaaaacacaaagaatttgctttgtcccttttgtctcaaaattttcaaaacagcaacaccatacatgtgtcattataggggccactggggaaagagtgcacaccagtgttccaagtgccggctacagtttttaactttcaaggagaaaatggagcacaagacccagtgtcatcaaatgtttaagaagcctaagcaactagaaggattacctcctgaaacaaaagttactattcaagtgtcactggaacctcttcagccaggatcagtggatgtagcatccataactgtgagcacatctgactctgaaccatcactccccaggtctaaaagcaaaatttcaaaaaagtcccattaattctagtttcagtaaatctaaagcaagtatttcaaaccaaattaaaaaacctcataaaacaaaaaatacaaaccatacattattcagtagcaccaaaaatagtgaaactagtggattatatatgactttttaaacaagattcaggatatatattatttgatctgaattttgaggtattattttaaaacatctggttttcatgttaactgtatctggcttaacacataaaaggtgtttgtgtgtgtgtgtgtgagagagaaaggtattaatttatttttttaattttaattttttttttttttactttagagacagggtctcactgttacccaggctggagtgcagtggcgtgatcctagctcactgcaaccttgaacttccaggctcaagcattcctccgcctcagcctttggagagtagctaggactacaggcgcagccaccacacccagctagttttttattttaattttttgtagcgatggaatcttgttatgtcgcccagggtggtctcgaactcctgaccttaggggagcctcctgcctcagcctccccaagtgctgggttgtgtgagtcactgcccctggcacctatttattgttttggtatttcatgttactcctaagcttgaaagctcttttttctatatacagaattcatagaatttttgaaatacttagttttctttacagctttttccatgcattcagcatttcatggttaactctagtcagactggaatggctttgttatgccctggcccacttgctgccgaattcccagaagtgcctctgctgtgctggcataaaataacctgaaaagattctgaaaagccaggatgtggaattgaaagagaagctgctgcgtgagcagagaccaagaaggcggaggttagttgagggagagcagtggttctttgttctagttgaaggataggcacacattcattctagtcttggggccaggtcaaaaggaacactgcttcagagtatctttacctacctgaaaacatccaaggaagccaaaccattcaaagtaaaatggttttgtttggtgaagggcccctgcagacatcaaacagccgtcatgtatcattggtttgaggtgaaatagcaataaaattaatagaatggtgcctggtactagctgacttcctgttctgtgatctaaaggtgaatttgattcattccctctcctctcccttctggctagccgttagtggagaatgaactggccatattctcagccacagctgtaaagcaagtttcccaaggggaagaagccctaatatctataatttgaactgtactggacccatagttttaactgaaaagggccaaacaagtggtgtctgtccagttcctggactgggctaaatttagttttcccactgttaagctggaatgaggactgtcccaacaacagtaggtacagtggacaaaaatagcccagggtgactgactgaatttaaacccataatggctttatatttttctgtgcatatatatcttaccctaattgaacatgtgaagcttgcaactttatgtcttgctttggacatgaatgtattacagcttgcagctattctgttaaatgtatagtttcccagttttttgacactaatgctgtttgggtcttacctgacacacaccagtgtgcaagaaatgtctctctaattcaataagttttaagacttagagttaatgtccttcatctgatctatcctatctaatctgtactatgggtgaatctttttcccttgctctccccaggggctgtttcacagtattctggagtaccttttgagtattggttcctgaacatcagcagtcttggctgcctctgtggactcccggagttgtctccctgcttgtgttctggtgccatcctttgttcctccacccctgaccaaggtgcccagcagcctgtcttcaccagtcaaggaatccgccatcttggctgtagacataggtctggagaaatctctccctttttccttgatttctttttaaaggtaccttatctctccccactcctttcttccctcctcaatctagttaaatttcctaagctttcacaaaaatccgggaagagataattaagagcttagcatccctcttagagtagaaggcagtacagataacaaagaagttgtgagtatattatctacattttagaaaattttctgactctagatccatagattctgttgtatttatttgccggacactcatttgattgatttgcaccttgaacactatactaggtcttttcagttacgttgcttgggttaagacactttgctaaaattacagcctgaatcctttctttagttgaagaaagggtatgtgtgtgcaagtgggtgtgtgtgtgccagtttttcttgtctcaggtagatactcccactgtgtataaatagatctacagacttttcatacttacctcccgtattctgtttctgtggtaaaaatatgaagtgttttagttgtatgttgagtgattggttggtattatcaacactgttgtttgcagtttcattaaagcatgctcttaaggagtacatatggtcattaattgccaactgtagattccagtgatctggcccctgcctacctccttcctctctttttcattctctgtcatgcttctccactgttttccccaatgacgcactattttgacacactggccttgctattccttaagcaaatcacattcttcccaatccaaagactttgcacatgctgttgtctttcttagaatgcccttcccctaggcctgcatggcttgctacctcacttaattgtttgacacttcctttggttcattgagcttcaaggctcttaaaatgccactgacaatgagatctccctttaaaaaaaaaaaaaaacttctacttttcctcttaaaggcactttactctctccccactcttttcttcctcttcaaagtatttaaatttcctaggttttcatgaaaaagctggaaagcgatcagcatcaagggctttgcttctgtcttagaattgagctagcttgagtcaatttctgtgcctgcaaccaaatgaaaattaatatagtgagttctttcaggagctttctctgtttttctattgatacctctatatatttttaaggcaatgtcactttgttttgtttacaaatatattgaatatgtcaagattactattttgttattgccctttgtgaatttccttgtctattttgctcgcttgttctttcaggtgaaatttattattttattaatgttgccaaaaattataagtaaaatatcaattatagtaataaaatgttttgtg

SEQ ID NO: 343988 - DNA, 4818 bp, Artificial Sequence
  derived and/or modified sequence
atcccctgatggactggaagcctaccccccaccccaagccctggctgcgacagctctggaaccctgactgcctgggtgcccctcagctctggaaccctgactgcctggatgctcctcagctctggaaccctgactgcttggataccccctcagctctggaaccctgactgcctggaaccgtgatccggaacccaagatcctttcaaggcctcaggggtattgctgctgccctcctccttctcaatttaaccccgcgtccagccgtcgccaccaggggcgtcagagcgcgcgcatgctcctagctcggagccgcgccgatctcgcgccggcacctggcagccaatcgcaggtctccactggacgcgcgcgtgtggaggcgtgcgcgtcggcggcgccgggggcctgaggaggcgtagtcgccgccggctgtgccccgggagcgcctccggggctggtgcgtggccggcagctcgcgaacagcagctgatccggactggatgtgaccttctgcctggaatagctcaagttcttaaaagttgcgttgtaataaacctgaggctgggaagttcaagatcaagatgctggacgatttggttccttagtgaaggctctcttcctggctggtggatgacagccttcttgctgtgttctcacatgacagaaagaggaagcaaggtggcagtttatataaaggaagcattgggacttgtggccccaccattcaggaataaaaaaattagaaaatggaacaatcatgtgaggaagagaaagagcctgaaccacagaagaacatacaagaaaccaaacaagtagatgacgaagatgctgagctcatctttgttggtgtggaacatgtaaatgaagatgctgagctaatctttgttggggtgacttcaaattcaaaaccagtcgtttcaaacattttgaacagagtcaccccgggttcatggtcaaggagaaaaaagtatgatcaccttagaaaagatactgctcgcaaattgcagcctaaaagtcatgagaccgttacatcagaagcagtgaccgtcctgccagcttcccaacttgaatcgagatcaacagatagtcctattattattgagcctttgtctaaacctgattatagaaatagttcaccacaagttgtgcctaataactcttcagaattaccttctcctttgattacattcacagattcattgcatcatccagtaagtacagcactttcagtaggaggtataaatgaaagtcctcgtgtatcaaagcaactttccactttcgaagtaaacagcataaatcccaaaagggctaaactcagggatggaattatagaaggaaattcttcagcttcgttcccttcagatacctttcatacaatgaatactcagcaaagtacaccctcaaataatgttcatacctcattaagccatgttcagaatggagcaccttttccagcagcttttccaaaggacaatatccatttcaagcctataaatacaaatcttgatagggaaaatgaattggcaaaaacagacattttgagtctaacaagtcaaaacaagacctttgatcccaagaaagaaaatcccattgtgttacttagtgacttttactatggacagcataaaggagaagggcagccggaacagaagactcacaccacctttaaatgcctcagctgcgtgaaagttctaaaaaatgttaagtttatgaatcacgtgaagcatcatttggaatttgagaagcagaggaacgacagctgggaaaaccacaccacctgccagcactgccaccggcagtttcccactcccttccagctacagtgtcacatcgaaaatgtccacactgcccaggagccctctactgtctgtaaaatctgtgaattgtcatttgaaacagatcaggtcctcttacaacacatgaaggaccatcataagcctggcgaaatgccctatgtgtgccaggtttgccattatagatcgtcggtctttgctgatgtagaaacacattttagaacgtgccatgaaaacacaaagaatttgctttgtcccttttgtctcaaaattttcaaaacagcaacaccatacatgtgtcattataggggccactggggaaagagtgcacaccagtgttccaagtgccggctacagtttttaactttcaaggagaaaatggagcacaagacccagtgtcatcaaatgtttaagaagcctaagcaactagaaggattacctcctgaaacaaaagttactattcaagtgtcactggaacctcttcagccaggatcagtggatgtagcatccataactgtgagcacatctgactctgaaccatcactccccaggtctaaaagcaaaatttcaaaaaagtcccattaattctagtttcagtaaatctaaagcaagtatttcaaaccaaattaaaaaacctcataaaacaaaaaatacaaaccatacattattcagtagcaccaaaaatagtgaaactagtggattatatatgactttttaaacaagattcaggatatatattatttgatctgaattttgaggtattattttaaaacatctggttttcatgttaactgtatctggcttaacacataaaaggtgtttgtgtgtgtgtgtgtgagagagaaaggtattaatttatttttttaattttaattttttttttttttactttagagacagggtctcactgttacccaggctggagtgcagtggcgtgatcctagctcactgcaaccttgaacttccaggctcaagcattcctccgcctcagcctttggagagtagctaggactacaggcgcagccaccacacccagctagttttttattttaattttttgtagcgatggaatcttgttatgtcgcccagggtggtctcgaactcctgaccttaggggagcctcctgcctcagcctccccaagtgctgggttgtgtgagtcactgcccctggcacctatttattgttttggtatttcatgttactcctaagcttgaaagctcttttttctatatacagaattcatagaatttttgaaatacttagttttctttacagctttttccatgcattcagcatttcatggttaactctagtcagactggaatggctttgttatgccctggcccacttgctgccgaattcccagaagtgcctctgctgtgctggcataaaataacctgaaaagattctgaaaagccaggatgtggaattgaaagagaagctgctgcgtgagcagagaccaagaaggcggaggggctgtttcacagtattctggagtaccttttgagtattggttcctgaacatcagcagtcttggctgcctctgtggactcccggagttgtctccctgcttgtgttctggtgccatcctttgttcctccacccctgaccaaggtgcccagcagcctgtcttcaccagtcaaggaatccgccatcttggctgtagacataggtctggagaaatctctccctttttccttgatttctttttaaaggtaccttatctctccccactcctttcttccctcctcaatctagttaaatttcctaagctttcacaaaaatccgggaagagataattaagagcttagcatccctcttagagtagaaggcagtacagataacaaagaagttgtgagtatattatctacattttagaaaattttctgactctagatccatagattctgttgtatttatttgccggacactcatttgattgatttgcaccttgaacactatactaggtcttttcagttacgttgcttgggttaagacactttgctaaaattacagcctgaatcctttctttagttgaagaaagggtatgtgtgtgcaagtgggtgtgtgtgtgccagtttttcttgtctcaggtagatactcccactgtgtataaatagatctacagacttttcatacttacctcccgtattctgtttctgtggtaaaaatatgaagtgttttagttgtatgttgagtgattggttggtattatcaacactgttgtttgcagtttcattaaagcatgctcttaaggagtacatatggtcattaattgccaactgtagattccagtgatctggcccctgcctacctccttcctctctttttcattctctgtcatgcttctccactgttttccccaatgacgcactattttgacacactggccttgctattccttaagcaaatcacattcttcccaatccaaagactttgcacatgctgttgtctttcttagaatgcccttcccctaggcctgcatggcttgctacctcacttaattgtttgacacttcctttggttcattgagcttcaaggctcttaaaatgccactgacaatgagatctccctttaaaaaaaaaaaaaaacttctacttttcctcttaaaggcactttactctctccccactcttttcttcctcttcaaagtatttaaatttcctaggttttcatgaaaaagctggaaagcgatcagcatcaagggctttgcttctgtcttagaattgagctagcttgagtcaatttctgtgcctgcaaccaaatgaaaattaatatagtgagttctttcaggagctttctctgtttttctattgatacctctatatatttttaaggcaatgtcactttgttttgtttacaaatatattgaatatgtcaagattactattttgttattgccctttgtgaatttccttgtctattttgctcgcttgttctttcaggtgaaatttattattttattaatgttgccaaaaattataagtaaaatatcaattatagtaataaaatgttttgtgaaaaaaa

SEQ ID NO: 343989 - DNA, 306 bp, Artificial Sequence
  derived and/or modified sequence
atgagtatgaccgacctgcttaatgccgaagacattaagaaggccgtgggtgcgttcagtgccaccgacagcttcgatcacaagaagtttttccagatggtcggcctgaagaaaaagagtgctgacgatgttaagaaggttttccacatgcttgataaggacaaaagtgggtttatcgaagaggacgaactggggtttatcctaaaagggtttagcccagatgccagggacctgtccgctaaggaaactaaaatgctgatggctgccggcgataaagatggagatgggaagattggcgtggactag

SEQ ID NO: 343990 - DNA, 306 bp, Artificial Sequence
  derived and/or modified sequence
atgtccatgacagacctgctgaatgctgaggacatcaagaaggctgtgggcgccttcagcgccacagacagctttgaccacaagaagttcttccagatggtgggcctgaagaagaagtctgcagatgatgtgaagaaggtgttccacatgctggacaaggacaagagcggcttcattgaagaagatgagctgggcttcatcctgaagggcttctccccagatgcccgggacctgagcgccaaggagaccaagatgctgatggctgctggggacaaggatggagatggcaagattggagtggactag

SEQ ID NO: 343991 - DNA, 306 bp, Artificial Sequence
  derived and/or modified sequence
atgagcatgaccgacctgctgaacgccgaggacatcaagaaggccgtcggagccttttcagccactgacagtttcgatcacaaaaaattctttcagatggtcgggctgaagaaaaagtctgccgacgacgtgaaaaaggtttttcatatgctagataaagacaaaagcggctttattgaagaggacgagttgggcttcatcctcaagggcttctcacccgacgcacgcgatctatcggctaaggaaacaaaaatgttgatggccgccggagacaaagatggcgacggaaagatcggggtggattag

SEQ ID NO: 343992 - DNA, 470 bp, Artificial Sequence
  derived and/or modified sequence
aggctgaggtaggagtggagagagaaagggagcagggcctaggaggtcctgaggtgcaggctggccgctgaaggttcaggatcttcccccacgcggcaggacatccgccaaggttcccagatctgagacggcgcacctcctgcgtgtccttgacggcagttgcaggatgtcgatgacagacttgctgaacgctgaggacatcaagaaggcggtgggagcctttagcgctaccgactccttcgaccacaaaaagttcttccaaatggtcggcctgaagaaaaagagtgcggatgatgtgaagaaggtgtttcacatgctggacaaggacaaaagtggcttcatcgaggaggatgagctgggattcatcctaaaaggcttctccccagatgccagagacctgtctgctaaagaaaccaagatgctgatggctgctggagacaaagatggggacggcaaaattggggttgacg

SEQ ID NO: 343993 - DNA, 306 bp, Artificial Sequence
  derived and/or modified sequence
atgtctatgaccgatctgcttaatgccgaggatatcaagaaggcagtgggagcattctcagctactgattcattcgaccataagaagttttttcaaatggtgggcttgaaaaaaaaatccgcggacgatgtgaaaaaagttttccacatgctggataaggacaagagcgggtttattgaggaggatgaattggggttcatcctgaaagggttttcacctgatgccagagacctcagtgccaaggagactaagatgctcatggctgctggcgataaggacggagacggtaagattggggtggactag

SEQ ID NO: 343994 - DNA, 306 bp, Artificial Sequence
  derived and/or modified sequence
atgagcatgaccgacctgctgaacgccgaggacatcaagaaggccgtgggcgccttcagcgccaccgacagcttcgaccacaagaagttcttccagatggtgggcctgaagaagaagagcgccgacgacgtgaagaaggtgttccacatgctggacaaggacaagagcggcttcatcgaggaggacgagctgggcttcatcctgaagggcttcagccccgacgccagagacctgagcgccaaggagaccaagatgctgatggccgccggcgacaaggacggcgacggcaagatcggcgtggactag

SEQ ID NO: 343995 - DNA, 81 bp, Artificial Sequence
  derived and/or modified sequence
tggagaagactggccaccgtggaggagagaaagaagatcgtggccagcagccacgccctgatgaccatgacccagctgtag

SEQ ID NO: 343996 - DNA, 81 bp, Artificial Sequence
  derived and/or modified sequence
tggaggagactggcgaccgtggaggaacgtaaaaaaattgttgcaagcagccatgccctgatgacaatgactcagctgtag

SEQ ID NO: 343997 - DNA, 81 bp, Artificial Sequence
  derived and/or modified sequence
tggaggcggctggccaccgtggaggagaggaagaagatcgtggccagcagccacgccctgatgaccatgacccagctgtag

SEQ ID NO: 343998 - DNA, 81 bp, Artificial Sequence
  derived and/or modified sequence
tggcggcggctggccaccgtggaggagcggaagaagatcgtggcctcgagtcacgccttgatgaccatgacccaactgtag

SEQ ID NO: 343999 - DNA, 81 bp, Artificial Sequence
  derived and/or modified sequence
tggcggagattagctaccgtagaagagcgtaagaaaattgtggccagttctcatgccctgatgactatgacccagctctag

SEQ ID NO: 344000 - DNA, 3442 bp, Artificial Sequence
  derived and/or modified sequence
atttggcacttatctttataggcacttggaagagaaaattaggaagttgtccgtagcttagccagttgatagtccaagatagatactagcatgagtgagcaagcaaaaaatcaaagcatctactcccagtgtcaaatcatcaattatttctgaggcactgtagccaagcccaagaagcgtgaattgggagggtgaatagttctagacagagcataggagccagtgtgtttcctccctgcagggagtgggtcctgaagagcagcatcctcattgccatggctgtttacacgtacctccgcctcatcgtggaccaccatgggactgcccagctccaggccctgcgacagaaggaagtagacttctgcatctcactgcttcgggaacggttcatggaatgtctgatgattggtcgggatctcgtaagactacttcagaatgttgctaggataccagaatttgaactgctttggaaagatattatccataatcctcaggccttgagtcctcagttcacaggtatcctacagcttcttcagtcaagaacatcccgaaaattcctagcatgtcgtctaaccccggacatggagactaaactcctcttcatgacatcccgggtgcgatttggtcaacaaaagcgataccaagattggttccagcgccagtacctgtcaactccagatagtcagtctctgcgctgtgacctcattcgctacatctgtggggtagtccacccttctaatgaagtactgagttcagatatcttgccccggtgggccatcattggttggctcctgacaacgtgcacgtcaaatgtcgctgcctccaatgccaagctggctttgttttatgactggctgttctttagtccagacaaggatagcattatgaacatagaaccagccatcctggtcatgcaccactccatgaagccccacccagccatcactgccacactcctggacttcatgtgccgcatcattcccaacttctatccaccattggagggccacgtgcggcagggtgtcttttcctccctcaaccacattgtggagaaacgggtcttggcacacctagctcccctgtttgacaaccctaagttggataaggagctgcgggcaatgctgagagagaagtttcctgagttctgcagctcaccctccccacctgtggaagtcaaaattgaggagccagtttccatggagatggacaaccatatgtcggataaggatgagagttgctatgacaatgcagaggcagccttcagtgacgatgaagaggatctcaacagcaaaggaaagaagagggagtttcgcttccaccctatcaaggagacagttgtggaggagccagttgatatcaccccttaccttgaccagttggatgagtccctgagggacaaagtactccagctacagaaggggagtgatacggaggcccagtgtgaggtcatgcaggaaattgtggaccaggtcctggaggaagactttgactcggagcagctgtctgtccttgcttcctgcctacaggagctcttcaaggcccactttcgaggggaggtcctgcctgaggagattactgaggagtccctggaggagtctgtaggaaagcctctgtacctaatatttaggaacctatgtcagatgcaggaagacaacagcagcttctctctacttctagaccttctctccgagctatatcagaagcagcccaagattggctaccacctgctctactacctgagggccagcaaagccgccgcagggaagatgaacctgtacgagtcatttgcccaggctacccagctgggcgatctgcacacctgcctgatgatggacatgaaggcctgccaggaggacgatgtgcggctcctgtgccacctcacgccctccatctacacagagtttccagatgaaaccttgaggagcggagagctgctgaacatgatcgtggctgttattgactctgcacagctccaggagctggtctgccacgtgatgatgggtaacctggttatgtttcgaaaagactcagttctcaacatactcattcagagcctagactgggagacctttgagcagtattgtgcctggcagctctttctggcccacaatattcccctggagaccataatccccatcctgcagcacctcaaatacaaggagcacccagaggccctgtcctgcctactgcttcaactccgaagagaaaagcccagcgaggagatggtgaagatggtgctgagccggccctgccatcctgacgaccagttcaccaccagcatcctgcggcactggtgcatgaaacatgacgagctgctggccgagcacatcaagtccctgctcatcaagaacaacagcctgcctcgcaagagacagagcctgaggagctctagcagcaagctggcccagctgactctggagcagatcctggagcacttggacaatctgcggctcaacctgaccaacaccaagcagaactgtatgccttccaccctcggcgtccagtgtagacggtgctgccctggcccagactatgcctggagccaggctgggggcaggggcaggacacccggggccacaacccacactcgggataaaacaacctgtgcgtgctgtttaataagctcccagacatctgattgtttttccttccctgctctcccttttcttcctctagtttttagccagacgccaattctccaggcgctgcagcatgtccaagcgagctgtgacgaagcccacaagatgaaattcagtgatctcttctccctggcggaggaatatgaggactcttccaccaagccacccaagagccggcgaaaagcagctctgtccagccctcgaagtcgaaagaatgccacacagccccccaatgccgaagaagagtcgggctccagcagtgcttcagaagaggaagacacgaaaccgaagcctaccaagcggaaacgaaaagggtcctctgcagtgggctctgacagtgactgaggccctgcattccccatcccacccccggctggactgccctctccttcttggtgattcaaaggttaatagaggctgaggagattgcaggggaaacacccttgctgcatccccaagctcccccggtggaaggaggagctttctcctctggctgagtttgagaagctgccatgcagcccctagccccttccctcctcctggggcctccagcccctcacactgctgttcccagtgatatttgggatctgactgaagccagaggctctgtaaaatcagaccatagtggaagtcctcagccccctggccccttccgcaatctcctcccccagtctcccaaagagccatttcaacagagaagggaaatgacaaaggggcagctggccagataagctaggatgagagcagagactcagtgtgtgggtgtcccttcctgcttccccttcaggtcttggtttgttctg

SEQ ID NO: 344001 - DNA, 2709 bp, Artificial Sequence
  derived and/or modified sequence
atggcggtgtacacctacttgagattaattgtggaccatcatggtacagcacagttgcaggccctccggcaaaaggaagttgatttttgcattagcctgcttagggagcggttcatggagtgcctgatgattggccgagacctggtgaggttgctccaaaatgtggcacgtatccctgagttcgagcttctgtggaaggatatcattcacaaccctcaagccctctcgcctcaattcaccggtatcctgcagttgcttcaatcacgtacttctaggaagtttcttgcttgtaggctaaccccggatatggagaccaagctcctgttcatgacatcccgtgttcgttttggccagcagaagcggtatcaagattggttccaaaggcaatacctaagcacacccgattctcagtcccttaggtgtgacctaatacgctatatttgcggagttgtccaccctagtaacgaggtcctctcgtcagacatcctgccgcggtgggccataatcggttggctgctgacaacctgtacgtcaaatgtggccgcatccaatgccaagctcgccctgttttacgactggcttttctttagcccagacaaagacagtatcatgaatatcgagccagcgatactggtgatgcaccattccatgaaacctcaccctgcgattacggctacattacttgacttcatgtgtagaataatacctaacttttatccaccattggaaggccacgtaagacagggcgttttctcttctctgaaccatatcgtcgagaagcgggtgctggctcacctcgcccccctattcgataatccaaagttagacaaggaattgcgcgccatgttacgagagaagttcccagaattctgcagctccccctctcccccagtggaggtgaaaatcgaggaacccgttagcatggagatggataatcacatgtctgacaaagatgagtcatgctacgataacgctgaggcagccttcagtgacgacgaggaggacttgaatagcaagggcaaaaaacgagagttccgtttccatcccatcaaggagaccgttgttgaggagcccgtcgacatcacaccctatctagaccaactcgatgaatcgctaagggataaggtccttcaactgcaaaagggtagcgataccgaagcacagtgtgaagtgatgcaagaaatcgtagaccaagtcctggaggaggactttgacagcgagcagctgagtgttctcgccagctgcctgcaggaactgttcaaagcccacttccgcggagaggtcctgccagaggagattaccgaggaaagcttagaagaatcagttggtaaaccactgtaccttatatttaggaacctgtgccagatgcaagaggacaatagctccttctccttactacttgacctcctgtcagagctctaccaaaaacaaccaaagatcggctatcacctgctatactatcttagggcttcgaaggctgccgctggtaagatgaatttatacgaaagtttcgcacaggctacacagctgggtgacctacatacctgcctgatgatggatatgaaggcttgccaagaagacgatgtgcgcttactctgccatttgaccccgtctatctatacagagttccctgatgagactcttcggagcggcgagctactgaacatgatagtggccgtcattgatagtgcacagctacaggaactggtgtgccacgtcatgatgggcaacctcgtgatgtttcgaaaggattccgtgctcaatatcctgattcagagtttagattgggagacattcgagcagtattgcgcatggcagctgtttttggcccacaacatacctttggaaactattatacccattctacagcatttgaagtataaggagcaccctgaggctctcagttgtctcctacttcagttgcgaagggagaaaccttccgaagaaatggtgaagatggttctatctcggccctgccatcccgatgaccagttcactacctccatactgagacattggtgcatgaagcatgatgaattactggccgagcacattaaaagtctgctgatcaaaaacaactcccttcccaggaagcggcagtctctgcggagtagcagctctaaattggcacagctgacattggagcagatattggagcatctcgataacctcaggctcaatttgactaataccaagcaaaattgcatgccatccaccttaggcgttcaatgccgcagatgctgtcccggacctgattacgcgtggtcccaagctggcggaagaggccgcacccccggcgctactacccacaccagagacaaaactacgtgcgcctgctgcctcataagttcacaaacctcagactgtttctctttcccagcccttccatttctaccactcgtattctcccagactccgatccttcaggccctccagcacgtgcaggctagttgtgatgaggcccacaaaatgaagttctccgacctgttctccctggccgaggaatacgaagacagctctactaaacccccaaagtcaaggcggaaggccgccctgtccagcccccggtcccgtaaaaacgccacgcagccacctaatgccgaggaggaatctggctcctcctcagcctccgaagaagaagacactaaaccgaagccaacaaaaagaaaaagaaaaggcagcagtgcagtcgggagtgattctgactag

SEQ ID NO: 344002 - DNA, 2709 bp, Artificial Sequence
  derived and/or modified sequence
atggcggtttatacctacctgaggttgattgtcgaccaccacggcaccgcccagttgcaggccctgcgccaaaaagaagtagacttctgtatctcactgcttcgggagcgcttcatggagtgtttaatgatcggccgcgacctggtccgtctcctccaaaatgtggctcggataccggagtttgaactgttgtggaaggatatcatacataatcctcaggccctctccccacagtttacaggtatccttcagctcctacaaagtcgcacaagccggaagttcctcgcttgtcgcctgacaccagatatggagacaaagttattattcatgacatctcgggtgagatttggtcagcagaagcggtatcaggattggttccagagacagtacttgtctaccccagatagtcagagtttgagatgtgacttgattaggtacatctgtggcgtggtccatccttctaatgaagtcttgagctcagacattcttccccgctgggccatcatcggatggctgttgaccacctgtaccagcaacgtggctgcctcgaatgctaagctcgccctgttttacgactggctcttcttttctccggacaaagacagcatcatgaacatcgaacccgccatcctggtcatgcaccactccatgaaaccacaccctgctataacggcaaccttgctggattttatgtgcagaattatcccgaatttttaccctccattagagggtcatgtacgccagggcgtgttctcatccttgaaccacatcgtggagaaaagagtgctggcccatctagcccctctcttcgataacccgaagctggacaaagagctaagggcaatgttgagggaaaaattccctgaattctgttcatcccccagcccaccggtggaggtcaaaattgaagagccagtatctatggagatggataaccacatgtctgacaaggatgagagctgttatgataatgccgaagctgcctttagcgatgacgaggaagacttaaatagtaaaggtaaaaagcgagaattcaggttccacccaatcaaagagacagtggtcgaagaacccgtcgatatcaccccttaccttgaccagctggatgagtcccttagagataaagtactgcagctgcagaaggggagtgacacggaggcacagtgcgaagtcatgcaggagatcgttgaccaggtcctagaggaggactttgactcggagcagctgtcagtgcttgcctcatgtctccaggagctgttcaaagcccattttaggggggaggtcttaccggaagagatcactgaagaatcccttgaagagtcggtgggtaagcctttgtacttaattttccggaacctgtgtcagatgcaggaagacaatagctccttttcattactgttggatctgttgtccgaactctaccaaaagcagccaaagattggctatcacctgctgtattacctcagagcatccaaagccgccgccgggaaaatgaatctgtatgaatccttcgctcaagctacacagctgggcgaccttcatacctgcctgatgatggatatgaaggcttgtcaggaggatgacgtgaggctgttatgtcatttgaccccttcaatttacaccgagttccccgacgaaacacttcgcagtggtgaactgttgaacatgattgtcgccgttattgacagtgctcaattgcaggagttagtctgccacgttatgatgggaaatttggtgatgttcagaaaggattctgttctgaatattcttattcagtccctagattgggagacattcgaacagtattgtgcatggcagctctttcttgcccacaatatacctcttgagaccattatacctatcctgcagcatttgaaatataaagagcatcctgaggcccttagttgcctcctgctgcagctgaggcgagagaagccctctgaagagatggttaaaatggtgttaagtcgcccctgccaccccgacgaccagtttaccacctccatattgaggcattggtgtatgaaacatgatgaactcttggctgaacacattaagagtcttctgatcaagaacaattctcttcctcgcaaaaggcagtccctccggtccagttccagcaagctggcccagctgaccttagaacaaatcctcgagcacctcgataaccttaggctgaacttgacaaacactaagcagaattgtatgccctctacgctaggtgtgcagtgcagacggtgttgtcctgggcctgattatgcctggtcacaggccgggggaagaggccggaccccaggggcaactacccacaccagggacaagactacatgtgcctgctgcctgatcagctcccagacatcggattgcttcagtttcccagctctcccatttttgccattggtgttttctcagactcccattctccaggcactgcaacacgtgcaagcatcttgtgacgaggctcataagatgaaatttagcgaccttttcagtctagctgaagagtacgaagatagcagcaccaagccccctaagtcccgacggaaagccgccttgtcttcccccagatctagaaaaaacgccacccaaccacccaacgccgaggaggaatccgggagctcatccgccagcgaggaggaagatacaaaacctaagcctactaagcggaagcgcaaggggagctccgccgttgggagcgactcagactag

SEQ ID NO: 344003 - DNA, 2709 bp, Artificial Sequence
  derived and/or modified sequence
atggctgtgtacacctacctgcggctcatcgtggaccaccacggcacagcccagctgcaggccctgcggcagaaggaggtggacttctgcatcagcctgctgcgggagcgcttcatggagtgcctgatgattggccgggacctggtgcggctgctgcagaatgtggcccgcatccctgagtttgagctgctgtggaaggacatcatccacaacccccaggccctgagcccccagttcaccggcatcctgcagctgctgcagagcaggaccagcaggaagttcctggcctgccgcctgaccccagacatggagaccaagctgctcttcatgaccagccgggtgcgcttcggccagcagaagcgctaccaggactggttccagaggcagtacctgagcaccccagacagccagagcctgcgctgtgacctgatccgctacatctgtggggtggtgcaccccagcaatgaggtgctgagcagtgacatcctgccccgctgggccatcatcggctggctgctgaccacctgcaccagcaatgtggccgccagcaatgccaagctggccctcttctatgactggctgttcttctccccagacaaggacagcatcatgaacatcgagcccgccatcctggtgatgcaccacagcatgaagccccacccagccatcacagccaccctgctggacttcatgtgccgcatcatccccaacttctacccacccctggagggccacgtgcggcagggcgtcttcagcagcctgaaccacatcgtggagaagagggtgctggcccacctggcccccctgtttgacaaccccaagctggacaaggagctgcgggccatgctgcgggagaagtttcctgagttctgcagcagccccagcccccctgtggaggtgaagattgaggagcctgtgtccatggagatggacaaccacatgtctgacaaggatgagagctgctatgacaatgctgaggccgccttcagtgatgatgaggaggacctgaacagcaagggcaagaagcgggagttccgcttccaccccatcaaggagaccgtggtggaggagcctgtggacatcaccccctacctggaccagctggatgagagcctgcgggacaaggtgctgcagctgcagaagggcagtgacacagaggcccagtgtgaggtgatgcaggagatcgtggaccaggtgctggaggaggactttgacagcgagcagctgtctgtgctggccagctgcctgcaggagctgttcaaggcccacttccggggggaggtgctgcctgaggagatcacagaggagagcctggaggagagcgtgggcaagcccctgtacctgatcttcaggaacctgtgccagatgcaggaggacaacagcagcttcagcctgctgctggacctgctgtctgagctgtaccagaagcagcccaagattggctaccacctgctgtactacctgcgggccagcaaggctgctgctgggaagatgaacctgtatgagagctttgcccaggccacccagctgggggacctgcacacctgcctgatgatggacatgaaggcctgccaggaggatgatgtgcggctgctgtgccacctgacccccagcatctacacagagttcccagatgagaccctgcggagcggggagctgctgaacatgattgtggccgtgattgattctgcccagctgcaggagctggtgtgccacgtgatgatgggcaacctggtgatgttcaggaaggacagcgtgctgaacatcctgatccagagcctggactgggagacctttgagcagtactgtgcctggcagctgttcctggcccacaacatccccctggagaccatcatccccatcctgcagcacctgaagtacaaggagcaccctgaggccctgagctgcctgctgctgcagctgcggcgggagaagcccagcgaggagatggtgaagatggtgctgagccggccctgccacccagatgaccagttcaccaccagcatcctgcggcactggtgcatgaagcatgatgagctgctggccgagcacatcaagagcctgctgatcaagaacaacagcctgcccaggaagaggcagagcctgcggagcagcagcagcaagctggcccagctgaccctggagcagatcctggagcacctggacaacctgcggctgaacctgaccaacaccaagcagaactgcatgcccagcaccctgggcgtgcagtgccgccgctgctgccccggccctgactatgcctggagccaggccggcggccggggccgcacccctggggccaccacccacacccgggacaagaccacctgtgcctgctgcctgatcagcagccagaccagtgactgcttctccttccctgccctgcccttcctgcccctggtgttcagccagacccccatcctgcaggccctgcagcacgtgcaggccagctgtgatgaggcccacaagatgaagttcagtgacctcttcagcctggccgaggagtatgaggacagcagcaccaagccacccaagagcaggaggaaggccgccctgagcagccccaggagcaggaagaatgccacccagcccccaaatgctgaggaggagagcggcagcagcagcgccagcgaggaggaggacaccaagcccaagcccaccaagaggaagaggaagggcagcagcgctgtgggcagtgacagcgactag

SEQ ID NO: 344004 - DNA, 2709 bp, Artificial Sequence
  derived and/or modified sequence
atggccgtgtacacctacctgcggctgatcgtggaccaccacggcacagcccagctgcaagccttgcgacagaaagaagttgacttttgcatctccttgctccgtgagcggttcatggaatgtttgatgataggcagggacctggtgcggctcctgcagaacgtggctcgcatccccgaattcgagctcctttggaaggacattattcacaacccccaagctctgagtccccaattcacaggtattttacaactgctgcagtccaggacctctagaaagttcttggcttgcagactgacaccggacatggagactaagcttctgttcatgacttccagggtcaggtttggacagcaaaaacggtatcaagactggttccaacggcagtatctgtccacacctgattcccaatcactgcggtgtgacctgatccgctatatctgcggagtggtgcatccatcaaacgaagtcctctcttcagatatattgcctcggtgggccatcatagggtggttgctgactacatgtacttcgaatgtagccgcatctaacgctaagctggcgctgttttatgattggctgttcttcagcccagacaaagactcaataatgaatatcgagccagccattctggtgatgcaccactccatgaagcctcacccagccatcacggctacattgttggacttcatgtgcaggattatccccaatttttatcccccactggaggggcatgtgcggcagggggtcttttcttctttaaatcatatagtggagaagcgtgttctggcgcatcttgccccactgttcgacaatccgaaattagataaggaactgcgggctatgctgcgcgaaaagttccctgaattctgtagctccccaagcccacccgtcgaagtgaagattgaggagcctgtgagcatggagatggacaaccatatgtcagataaggatgagtcttgctacgataatgctgaggccgcattctctgacgacgaggaggacctgaattcaaaagggaaaaagcgagagtttagattccatccaattaaagaaactgtagtggaagagcccgttgacatcactccgtatttggaccagctggatgaaagtctcagagataaagtccttcagttgcagaagggaagtgatacggaagctcaatgcgaggtgatgcaggagatagtggaccaggttcttgaagaagacttcgatagcgaacaactctctgtgcttgcctcatgcctgcaggaactgtttaaggctcacttccgcggagaagtgttacccgaggagatcacagaggagagcctcgaggaaagcgtgggcaagcctctgtacctgatctttagaaacttatgccagatgcaggaagacaacagttcttttagtctgctactggacctgctaagcgaattgtatcagaagcagcccaagattggctaccacctcttgtattacttaagggcctcaaaagccgccgcgggaaagatgaacctttacgaatctttcgcccaggcaactcagctaggcgacttgcacacgtgccttatgatggacatgaaagcttgtcaggaagacgacgtgcggttgctgtgtcatttgactcctagtatttatacggaattccccgacgaaactcttaggtccggtgaacttctgaatatgattgtagcagtgatcgacagtgcgcaactacaagaactggtgtgccatgtgatgatgggaaatctggtcatgtttagaaaagactccgtgctgaatatactcatccagagtttggactgggaaacgttcgagcaatactgtgcatggcagttattccttgcacataacatccctctggaaacaataatccctatactgcagcaccttaaatacaaagaacaccctgaagctctcagctgtctgctcctgcaattaagaagagaaaagcccagcgaggagatggttaagatggtcttatcccgcccatgccaccccgacgatcaatttaccacatccatcctgcgacattggtgtatgaaacacgatgaacttctggcagagcatatcaagtcactgttgattaagaacaactcccttcctcgcaaacggcaaagcctcagaagctcgtctagcaaactcgctcagttaacgttggagcagatactggaacacctggataacttgagactcaatctgacgaataccaaacagaattgtatgccttctacgttaggcgtacagtgtaggagatgctgtccaggcccagactacgcctggagtcaggccggcggtcgtggacgcacgcctggagcgaccactcacacaagagataagactacatgtgcctgttgcctcatatcatcccagacatccgattgcttttcctttccagccctaccctttcttccgttggtgttctcacaaactcccattcttcaggccctgcagcacgttcaggcctcctgtgatgaggcgcacaaaatgaaattcagcgacctgttttccctggctgaggagtatgaggatagctccactaaaccgcctaaatctaggaggaaagccgccttgtcatcccctcgatccagaaagaatgcaacacaacccccgaatgcagaggaggagtcaggctcttcctctgcgagcgaggaggaggacacaaagcccaagccgacaaaaaggaagcggaaaggctcttctgccgttggctctgacagcgattag

SEQ ID NO: 344005 - DNA, 2709 bp, Artificial Sequence
  derived and/or modified sequence
atggccgtgtacacctacctgcggctgatcgtggaccaccacggcacggctcagctccaggctctcagacagaaggaggtggacttttgcataagtctccttagagagcggtttatggaatgcttgatgatcgggagggacctcgtcagactgctccagaacgttgcacggattcctgaatttgaattactgtggaaggatatcatacataatccccaggcactgagcccccaatttaccgggattctgcagttactgcagagccgcacaagcagaaagttcctcgcctgtaggttaacccctgacatggagaccaagctgttattcatgactagtcgcgttcggttcggtcaacagaagcggtaccaagactggttccagcgacagtatctgagcacaccagactcccagagcctaaggtgcgatttaatccgctacatctgcggcgttgtgcatccatccaatgaagtgctttcttctgacattctacccagatgggctattattggatggctgttaaccacttgtacctccaacgtagcggcctccaacgctaagctggccctgttctatgactggctatttttttctcccgataaggacagcattatgaatatcgaaccagcaattctggttatgcatcatagtatgaaacctcaccccgccatcacggccaccctgttagacttcatgtgtcgcattatcccgaatttttaccctcccctggagggccacgtgagacagggcgtgttctcatctctcaaccatatcgtcgaaaaaagagtgttggcccatttagccccactcttcgacaatcccaaattggataaagagctgcgagctatgcttagagaaaaatttccagagttctgttcaagcccaagcccccccgtcgaggttaaaattgaggagccagtgtccatggaaatggacaaccatatgagcgacaaagacgaaagttgctacgacaatgccgaggcagcattctcagatgacgaagaagacttgaacagtaaaggcaagaagcgcgagtttcggtttcatcctatcaaggagaccgtggtggaggaacccgtggatatcaccccttaccttgatcagctagacgaaagtctgagggataaggtgctgcagttgcagaagggctcggacacagaggctcagtgcgaggtgatgcaggaaatcgtggatcaggtcctggaggaagactttgacagtgaacagttatcggtgctggccagttgtttacaagaactgttcaaggctcactttcggggggaggtcctcccggaagaaattaccgaggagagcttggaggagagcgtggggaaacctttgtatctgatctttcggaatttgtgtcagatgcaggaggataatagtagcttctcactgttactggacttactctccgaactctaccagaagcagccaaaaatcggctaccacctgctttattacctgcgggcctctaaggcagccgcaggcaagatgaatctgtacgagtctttcgctcaagccacccagttaggggatctccatacttgtttgatgatggacatgaaggcctgccaggaagacgatgtccgtctcctatgccatttgaccccctcaatctacactgagttcccagacgagactcttaggtcaggggaactgctgaatatgatagtcgcggtcatcgactctgctcaactgcaggagctggtgtgccacgtcatgatgggaaatctggtcatgtttcggaaggatagtgtgttaaacatcttgatacagtctttggactgggaaacctttgaacagtactgcgcttggcaactgttcctcgctcataacatccccctcgagaccatcattcccattcttcagcacttaaaatacaaagagcaccctgaggcactgtcatgcttactactgcagctgcgacgcgaaaagccgagtgaggaaatggtcaaaatggtcctatcccggccatgccatcctgatgatcagttcactacatcaatactccgccactggtgcatgaaacacgatgaactgttagcggagcacatcaaatctctgctcattaaaaacaactctctgcctagaaagaggcaaagcctgcgaagcagtagtagcaagctagcacaactcaccctcgagcagattctcgaacacctggataacctgcggctgaacctcaccaacaccaaacaaaactgcatgccctctaccctaggagtacagtgtagacggtgctgccccggcccagactatgcctggagccaggccggcggccgaggccgaacccccggcgctacaacccacacaagagacaaaacaacatgtgcatgctgcctcatcagctctcagacttcggactgtttcagtttccccgcactccctttcctgccactggttttctcacagacacctattcttcaagccctgcagcacgtgcaggcctcctgcgacgaggcccacaagatgaagtttagcgatctgtttagcctggcagaggaatatgaagacagctccaccaagccaccaaaatccagacgaaaggccgctctgtccagtccacggagtcgaaaaaatgctactcagccacccaacgctgaggaagagtcaggatcgtccagcgcatcggaggaagaggacaccaagccgaaacccaccaagagaaaaagaaaaggttccagtgccgtagggtccgactcggactag

SEQ ID NO: 344006 - DNA, 2709 bp, Artificial Sequence
  derived and/or modified sequence
atggctgtctatacctaccttagactcatcgtggaccaccacggcactgcacaattacaggccctgcggcagaaggaagtcgatttctgtatctcccttttgcgggaacgattcatggaatgccttatgatcggtcgcgacttggtacggctcctgcagaatgtagctcgcattcccgagttcgaactcctctggaaggacatcattcacaatccgcaagctctcagcccacagttcacgggcatccttcaattgttgcaaagcaggacatccagaaagttcttagcttgccgattgacacccgacatggaaactaagctgctcttcatgactagcagagtgcgatttggccagcagaaacgttaccaggactggtttcagagacagtatctctctacacccgattcgcagagcctgaggtgtgacctgatcagatacatttgcggggtcgtgcatccctccaacgaggtccttagctcagacatccttcccagatgggcaataattggatggcttctcacaacctgtacctccaacgtggccgcttccaatgccaagttggctcttttttatgactggttattcttcagcccagataaggattcaatcatgaatatcgaacccgctattcttgttatgcaccactcaatgaagccgcatccagcaatcaccgccaccctcctggacttcatgtgtagaattatccccaacttctacccccctctggaaggccatgtcaggcaaggtgtattctcttccctgaaccacatcgttgagaaacgggtcttggcacacctcgctccccttttcgacaacccaaaactggataaagagctgcgggcaatgcttcgagagaaattcccagaattctgtagttccccatctccgccagtcgaggtaaaaatcgaagagccagttagtatggagatggataatcatatgtctgacaaagacgaatcctgctacgacaacgctgaagctgccttcagcgatgacgaagaagacctcaactctaagggcaagaagagggagttccggtttcaccctatcaaggaaaccgtagttgaggagcccgtagatattacgccctatttagatcaactggatgagagtctaagagataaggtcctgcagctccagaaaggctcagacacagaggcccagtgcgaggttatgcaagagatagtggatcaggttctggaagaagacttcgatagtgaacaactgtcagtgcttgcatcctgcttacaggagctgttcaaggcccattttcgaggtgaagttctcccagaggagattaccgaggagagtcttgaagagagcgtcggcaagcccctgtaccttatttttcggaacctgtgccagatgcaggaagacaacagcagtttttctctgctccttgacctgctcagtgaactgtaccagaagcagcctaaaataggataccaccttctctactaccttcgcgcttccaaagcagcagccggaaagatgaatttgtacgaatcttttgctcaggcgacgcagttgggagatctgcacacatgcttgatgatggacatgaaggcttgtcaggaggacgatgtccggctgctctgccacctgacgccttcgatatacacagagtttccagatgagacactgagaagtggagagctcctgaatatgatcgttgccgtaatagatagtgcccagcttcaggaactggtttgccatgtgatgatgggtaatctggttatgttccgtaaagattccgtgctaaatatcctcatacaatctctggactgggagacgtttgaacagtactgtgcttggcagctgttccttgcccacaacatcccactagaaactattatacccatcttgcagcacttgaaatataaggagcatccagaggccctgagttgtttactgctccagctccgtcgggagaagccctctgaagagatggtgaagatggtcctgtcaagaccgtgccaccccgacgaccaattcacaaccagcatcctgcgccactggtgcatgaaacacgatgagttgctggccgagcacatcaaatccctgctcataaaaaacaattctctgcccagaaaaaggcagtctctgaggtcatcttccagtaagctcgctcagctgaccctggagcagattctcgaacatctggataacctcaggttgaatctgaccaacacaaagcaaaattgtatgccaagtaccctgggcgtccagtgtcggcgatgctgtccaggacctgattacgcgtggtcccaggctgggggacgcggacgtacccccggagccaccacccatacacgagataaaacaacatgtgcctgctgcctgatatctagccagaccagcgactgcttcagcttcccggctttgccattcctccccctggtcttctcgcagacacctatcctacaagcactgcagcacgttcaggcgtcttgtgacgaggcccacaagatgaagttctctgacctgtttagtctggcagaggagtatgaggacagttcaacgaagcctcctaagagtaggagaaaagccgctttgtccagcccgcgatcaaggaaaaatgcaacacagcccccaaacgccgaggaagaatctggctcatccagcgctagcgaggaggaggatacaaagcctaaaccgacaaagcggaagagaaaagggagctcggccgtcggaagtgactccgattag

SEQ ID NO: 344007 - DNA, 2709 bp, Artificial Sequence
  derived and/or modified sequence
atggcggtgtacacttatctacggctcattgttgatcaccacggcaccgcacaactgcaggccttgcggcagaaagaggtggacttctgcatctctctactgcgcgagcgcttcatggaatgcctcatgatcggtagagacttggtgagactgctgcagaacgtggcccgaattcctgagttcgagcttctttggaaggacatcattcataatccgcaggccctgtccccccagttcaccggcattctacagttactgcagtccagaacatctcggaaatttctggcctgtagactgaccccagatatggagaccaaacttctctttatgaccagtagggtgcgtttcggccaacaaaaacggtaccaagactggtttcagcggcaatacttaagtactcccgattctcagagcctccggtgtgatttaatcaggtacatatgcggtgtggtgcatcctagtaatgaggtgctcagctccgatatacttcccaggtgggctatcattggctggctgctcacaacatgtacaagtaacgttgctgcatctaacgctaagctcgcgctcttctatgactggcttttcttttccccggacaaggacagcatcatgaacattgagccagcaatcttggtgatgcatcactcaatgaagccacatcctgccatcacagctaccctgctcgatttcatgtgcaggattatccctaatttttatcccccactagaaggtcacgtccggcagggagtttttagcagtctgaaccatatcgtagagaagcgggttctggcgcacctggctcctctgttcgataacccgaagctggacaaagagttgcgcgcaatgctgagggagaagtttccggagttctgcagcagcccttcacctcccgtggaggtgaagatcgaagagcctgtgtcaatggaaatggacaaccacatgtctgataaggatgagagttgttacgacaatgccgaagcagccttttcagatgacgaggaagaccttaatagcaagggaaagaagcgagaatttaggttccatccaattaaagagaccgtggtggaagagcctgtcgatattacaccatacctggatcagctggacgagtccctgcgggacaaggtgttacagctacaaaagggtagcgataccgaagctcagtgtgaggtaatgcaggaaatcgttgatcaggttcttgaggaggattttgattccgaacaactatccgtccttgcgtcttgtctacaggagttgtttaaagcccacttccgtggcgaggtgctgcccgaggaaatcaccgaagagtcactggaagagagcgttggtaagccgctgtacctgatcttccgaaacctgtgtcagatgcaggaggataattcctccttctcactgctcctggatttgctcagcgaattgtaccagaaacagcctaaaatcggctatcatctgttgtactacctcagagccagcaaggcggcagcgggaaagatgaatctatacgaatcttttgcccaagctactcagcttggtgatttgcacacttgcctgatgatggatatgaaggcttgtcaggaggacgatgtgcgcctgctctgccatttgaccccatctatctacaccgagttccctgatgaaaccctgcggagtggggagctgctgaacatgattgtagctgttatcgacagcgcgcaactgcaagagctggtttgccacgtcatgatggggaacctggtcatgtttagaaaagactcagtcctgaacatcttgatacagagcctcgattgggagacgttcgagcagtattgcgcctggcagctgttcttggcccataacatcccactggagaccataattcccatccttcagcatctcaagtataaagaacatcccgaggctctgagctgcttgctgctgcagctacggagggaaaaaccttctgaagaaatggtgaaaatggtcctgtctcgcccatgccaccctgacgaccagttcactaccagcattctgaggcactggtgtatgaagcatgacgagttgctcgccgagcacataaagtctctcctcattaagaacaattcactccctaggaaaagacagtccctccggtccagttcctctaagctggcccagttgacccttgaacagattctcgaacatctggataatcttagactgaacctgactaataccaaacagaattgcatgcctagtactttaggtgtacaatgccgcagatgctgccccggacctgactatgcgtggagccaggccggaggacggggaaggacacccggtgccacaacccacacccgggacaagacgacatgtgcttgctgtctgatctcctcccagacatcagactgtttctcttttcctgctctgccttttctgcctctggtattctctcagacacccattctgcaggcattgcaacatgttcaggctagctgtgacgaggcccataaaatgaaattctccgacctgtttagccttgctgaggaatatgaggacagctcgactaaaccacctaagtctaggcgtaaagccgcacttagtagcccccgtagtagaaagaatgctacacagccccctaacgcggaagaggagagtggaagctcgtctgcctctgaggaagaggataccaagccaaaacccacaaaacgtaaaaggaagggctcctctgccgtgggcagcgactcggattag

SEQ ID NO: 344008 - DNA, 2709 bp, Artificial Sequence
  derived and/or modified sequence
atggccgtgtacacctacctgagactgatcgtggaccaccacggcaccgcccagctgcaggccctgagacagaaggaggtggacttctgcatcagcctgctgagagagagattcatggagtgcctgatgatcggcagagacctggtgagactgctgcagaacgtggccagaatccccgagttcgagctgctgtggaaggacatcatccacaacccccaggccctgagcccccagttcaccggcatcctgcagctgctgcagagcagaaccagcagaaagttcctggcctgcagactgacccccgacatggagaccaagctgctgttcatgaccagcagagtgagattcggccagcagaagagataccaggactggttccagagacagtacctgagcacccccgacagccagagcctgagatgcgacctgatcagatacatctgcggcgtggtgcaccccagcaacgaggtgctgagcagcgacatcctgcccagatgggccatcatcggctggctgctgaccacctgcaccagcaacgtggccgccagcaacgccaagctggccctgttctacgactggctgttcttcagccccgacaaggacagcatcatgaacatcgagcccgccatcctggtgatgcaccacagcatgaagccccaccccgccatcaccgccaccctgctggacttcatgtgcagaatcatccccaacttctacccccccctggagggccacgtgagacagggcgtgttcagcagcctgaaccacatcgtggagaagagagtgctggcccacctggcccccctgttcgacaaccccaagctggacaaggagctgagagccatgctgagagagaagttccccgagttctgcagcagccccagcccccccgtggaggtgaagatcgaggagcccgtgagcatggagatggacaaccacatgagcgacaaggacgagagctgctacgacaacgccgaggccgccttcagcgacgacgaggaggacctgaacagcaagggcaagaagagagagttcagattccaccccatcaaggagaccgtggtggaggagcccgtggacatcaccccctacctggaccagctggacgagagcctgagagacaaggtgctgcagctgcagaagggcagcgacaccgaggcccagtgcgaggtgatgcaggagatcgtggaccaggtgctggaggaggacttcgacagcgagcagctgagcgtgctggccagctgcctgcaggagctgttcaaggcccacttcagaggcgaggtgctgcccgaggagatcaccgaggagagcctggaggagagcgtgggcaagcccctgtacctgatcttcagaaacctgtgccagatgcaggaggacaacagcagcttcagcctgctgctggacctgctgagcgagctgtaccagaagcagcccaagatcggctaccacctgctgtactacctgagagccagcaaggccgccgccggcaagatgaacctgtacgagagcttcgcccaggccacccagctgggcgacctgcacacctgcctgatgatggacatgaaggcctgccaggaggacgacgtgagactgctgtgccacctgacccccagcatctacaccgagttccccgacgagaccctgagaagcggcgagctgctgaacatgatcgtggccgtgatcgacagcgcccagctgcaggagctggtgtgccacgtgatgatgggcaacctggtgatgttcagaaaggacagcgtgctgaacatcctgatccagagcctggactgggagaccttcgagcagtactgcgcctggcagctgttcctggcccacaacatccccctggagaccatcatccccatcctgcagcacctgaagtacaaggagcaccccgaggccctgagctgcctgctgctgcagctgagaagagagaagcccagcgaggagatggtgaagatggtgctgagcagaccctgccaccccgacgaccagttcaccaccagcatcctgagacactggtgcatgaagcacgacgagctgctggccgagcacatcaagagcctgctgatcaagaacaacagcctgcccagaaagagacagagcctgagaagcagcagcagcaagctggcccagctgaccctggagcagatcctggagcacctggacaacctgagactgaacctgaccaacaccaagcagaactgcatgcccagcaccctgggcgtgcagtgcagaagatgctgccccggccccgactacgcctggagccaggccggcggcagaggcagaacccccggcgccaccacccacaccagagacaagaccacctgcgcctgctgcctgatcagcagccagaccagcgactgcttcagcttccccgccctgcccttcctgcccctggtgttcagccagacccccatcctgcaggccctgcagcacgtgcaggccagctgcgacgaggcccacaagatgaagttcagcgacctgttcagcctggccgaggagtacgaggacagcagcaccaagccccccaagagcagaagaaaggccgccctgagcagccccagaagcagaaagaacgccacccagccccccaacgccgaggaggagagcggcagcagcagcgccagcgaggaggaggacaccaagcccaagcccaccaagagaaagagaaagggcagcagcgccgtgggcagcgacagcgactag

SEQ ID NO: 344009 - DNA, 1500 bp, Artificial Sequence
  derived and/or modified sequence
atgcctcatccgcgacgataccacagctctgagagggggtctcggggtagttacagagaacactaccgctctcgaaagcataaacgcaggaggtcgcgcagttggtcttctagttcggatcggactcggaggaggcgcagagaggattcttaccacgtgcggagcaggtcgagttatgatgataggtcttctgacagaagagtctacgatagacgatattgcgggagttataggagaaacgattactcccgagatcggggtgatgcatactacgacaccgactacaggcactcgtacgaatatcagcgtgagaactcctcatatcgatcacaacggtccagcaggcggaagcatcgacggcggcggagaaggagccgaacgttttcacgatcttccagtcaacattcctcacggcgggctaaatcggtggaagatgatgcggaagggcacctaatctaccatgttggagactggctccaagaaagatatgaaattgtttcaacactcggcgaggggacatttgggcgggtggtgcagtgcgtcgatcacaggcgggggggcgccagggttgctctcaaaattatcaagaacgtggagaagtacaaggaagccgccaggcttgaaatcaatgtgctggagaaaatcaatgaaaaagaccccgataacaaaaacctgtgcgttcagatgttcgattggtttgattaccatggccatatgtgtattagttttgagcttctcggcttaagcaccttcgatttcctgaaggataacaattacctgccgtatccaatccaccaggtgaggcacatggcgttccagctgtgccaagccgtcaaattcctacacgacaataaactcactcacaccgatctaaagcctgaaaacattctgtttgtcaatagcgattacgagttaacgtacaatctggaaaagaagagagacgagaggtcagtgaagtcaactgctgttagggtcgtcgatttcgggtccgccacatttgatcacgagcaccacagcactattgtctccacccggcactaccgagcccccgaggtcatcctcgaactgggctggtctcagccttgcgacgtttggagtataggatgtataatttttgagtactacgtcgggttcacactgtttcagacacacgacaacagagagcacttagccatgatggaaaggattctgggccctatccctagccggatgattcggaaaacgcggaagcagaaatacttttaccgtggcaggctagattgggatgagaacacgtcagccggccggtacgtgagagagaactgcaaacccctgcggagatatcttacatcagaagccgaggagcatcatcagttgttcgatctgattgaaagcatgctggagtacgaaccggccaaacggctcacactgggagaggcactccagcatcccttctttgcccgcctcagggctgagccccccaacaagctatgggactcatcacgggatatctctcgctag

SEQ ID NO: 344010 - DNA, 1500 bp, Artificial Sequence
  derived and/or modified sequence
atgccccacccccgcagatatcacagctctgagaggggatcacgaggatcttaccgcgagcactatcgatctcggaagcacaagcgcagacgaagtcgcagttggtcctcatcttccgaccggaccagaaggcgaagaagagaagattcatatcacgttagaagcagatccagctacgacgacaggagttccgataggcgtgtgtatgataggcggtactgtggttcataccgacgcaatgattattcccgtgacaggggtgatgcttattatgataccgactaccgccatagctatgagtaccagagggagaattcctcatatagatctcagcgctcttcccgccggaaacataggaggagaagaaggcggtcacgtacgttttctcgctcctctagtcaacattcctcccggcgcgcaaaatctgtggaagatgacgccgaaggacacctgatctatcacgtgggcgactggctacaggagcggtacgaaatcgtgagcacgctgggcgagggcaccttcggccgggtggtgcagtgcgtggaccaccgcagaggaggagctagagtagctttgaaaattattaaaaatgttgagaagtacaaggaggcagcaagactggagatcaacgtgctagagaagattaacgagaaagaccctgacaacaagaacctatgcgtccagatgtttgattggtttgactaccacggccatatgtgcattagcttcgaactccttggactgtctacatttgatttcctaaaggacaacaactatcttccataccccatccaccaggtccggcatatggcattccagctttgccaggcagtcaagtttttgcacgacaataaactaacacataccgatttaaagcctgaaaacatcttgtttgttaatagcgattacgagctgacctataatctggagaagaagcgcgacgagagatcagtgaagtctaccgccgtgcgcgtcgtggacttcggcagtgctacatttgaccacgaacaccattccaccatagtgtccacacgacactaccgtgcccccgaggttattctggagcttgggtggagccagccttgtgacgtctggagcattgggtgcatcatcttcgagtactacgttgggttcacactctttcagacgcacgacaaccgggagcatctggcaatgatggaaaggattctggggcctatcccaagtcggatgattagaaaaactcgcaaacagaagtacttttaccgcggtcgactggattgggacgagaacacctccgcaggccggtacgttcgggagaactgtaaacccctgcgaagatacctcacgtctgaagcagaagaacaccaccagctttttgatctgatcgaaagcatgctggaatatgagcccgccaagcggttaactctgggggaggccctccaacatccatttttcgctcgcctcagagccgaacccccgaacaagctgtgggatagttctcgcgatatttcacggtag

SEQ ID NO: 344011 - DNA, 1500 bp, Artificial Sequence
  derived and/or modified sequence
atgccccacccccggcgctaccacagcagcgagcggggcagccggggcagctaccgggagcactaccgcagcaggaagcacaagagaagaagaagccgctcctggagcagcagcagtgacaggaccaggagaagaagaagagaggacagctaccacgtgcgcagccgcagcagctatgatgacaggagcagtgaccggcgggtgtatgaccggcgctactgcggcagctacagaagaaatgactacagccgggacagaggagatgcctactatgacacagactaccgccacagctatgagtaccagcgggagaacagcagctaccgcagccagaggagcagcaggaggaagcacagaagaagaagaagaagaagcaggaccttcagccgcagcagcagccagcacagcagccggcgggccaagtctgtggaggatgatgctgagggccacctgatctaccacgtgggggactggctgcaggagagatatgaaattgtgtccaccctgggggagggcaccttcggccgggtggtgcagtgtgtggaccaccggcggggcggggcccgggtggccctgaagatcatcaagaatgtggagaagtacaaggaggccgcccggctggagatcaacgtgctggagaagatcaatgagaaggaccctgacaacaagaacctgtgtgtgcagatgtttgactggtttgactaccacggccacatgtgcatcagctttgagctgctgggcctgagcacctttgacttcctgaaggacaacaactacctgccctaccccatccaccaggtgcgccacatggccttccagctgtgccaggccgtgaagttcctgcatgacaacaagctgacccacacagacctgaagccagagaacatcctgtttgtgaacagcgactatgagctgacctacaacctggagaagaagagagatgagaggtctgtgaagagcacagctgtgcgggtggtggactttggcagcgccacctttgaccacgagcaccacagcaccatcgtgtccaccaggcactaccgggcccctgaggtgatcctggagctgggctggagccagccctgtgatgtgtggagcatcggctgcatcatctttgagtactacgtgggcttcaccctcttccagacccatgacaaccgggagcacctggccatgatggagcgcatcctgggccccatccccagcaggatgatcaggaagaccaggaagcagaagtacttctaccggggccgcctggactgggatgagaacaccagcgctggccgctacgtgcgggagaactgcaagcccctgcggcgctacctgaccagcgaggccgaggagcaccaccagctgtttgacctgattgagagcatgctggagtatgagcccgccaagaggctgaccctgggggaggccctgcagcaccccttctttgcccggctgcgggcagagccccccaacaagctgtgggacagcagccgggacatcagcaggtag

SEQ ID NO: 344012 - DNA, 1500 bp, Artificial Sequence
  derived and/or modified sequence
atgccccacccccggcggtaccacagcagcgagcggggcagccggggctcttaccgcgagcattaccgcagccgtaagcacaagcggaggcggtctagatcttggtcttcctctagcgaccggactcgccgccgtcggagggaagacagctaccatgttcgatcccggtcttcctacgatgacagatcatctgaccgtcgagtgtacgatcgtaggtactgcggctcataccggaggaatgactattcacgggacagaggcgacgcatactacgacacggattataggcattcttatgagtaccagcgcgaaaatagctcgtatagaagtcagcggtcgagtcgccgcaagcacaggagacggcgaaggcggtctaggacattctccagaagctcctcgcagcattcttcacgcagagcaaagtcagtagaagacgatgccgaggggcacttgatctatcacgtgggggattggttacaggagcgctacgaaatagtgagcaccctgggcgagggaaccttcggtcgggtggtgcagtgtgtggatcacaggagaggcggagcacgcgtggcgctaaaaatcatcaaaaatgtcgagaagtacaaggaggcggctagactggagataaacgtactcgagaagatcaatgaaaaagatcccgataacaaaaacttatgtgtccaaatgttcgactggttcgattatcacggccatatgtgcatatccttcgagttattagggctgagtacctttgatttcctgaaggacaataactacctgccctaccccattcaccaggtgcgccatatggcctttcagctctgccaggcggtgaagttcctgcacgacaataaactaacacacaccgacctcaaacccgaaaacatcctcttcgtcaatagtgactatgagctgacttataatctggagaagaagagagatgagcggtccgtgaaatcaactgccgttcgcgtggtagacttcggctccgctacatttgatcacgagcaccatagcacaatcgtgtcaaccagacactaccgtgcacctgaggtaattctcgagctggggtggagtcagccatgtgatgtgtggtcaataggctgcattatttttgagtattacgtagggtttacactgttccagacccatgataatcgtgaacatctcgccatgatggagagaatcctgggacctataccctcccgaatgattcggaaaactcgaaaacagaagtacttctaccgcggcagactggactgggatgagaacacatccgcgggccgctacgtacgagagaactgcaagcctctccggcgctacctgacaagtgaggcggaggagcaccaccaactatttgatctgattgaaagcatgctcgagtatgaacccgccaagcggctcaccctgggcgaagccttacagcatcccttctttgctcgcctgcgagctgaaccacctaataaactctgggatagctcgcgcgacattagccgttag

SEQ ID NO: 344013 - DNA, 1500 bp, Artificial Sequence
  derived and/or modified sequence
atgccccacccccggcggtaccacagcagcgagcggggcagccggggaagttaccgggagcactatagaagcaggaagcataagcgccggagatctcgcagctggagttccagcagcgacaggactcggagaagaaggcgggaagattcttatcatgtccgtagtcggtcgagctatgacgatcggtccagcgatcgtagagtttatgatcgaaggtactgcggctcatacaggagaaacgactattcccgcgaccggggggacgcatactatgacacggattatcgacatagctatgaataccaaagagaaaatagttcctatagatcccaaaggagctcaaggaggaagcatagacgcaggaggcgacgtagccggacattctctcggagtagttcccagcatagttcgcgaagggccaagtctgtcgaggacgacgccgagggtcacctgatttatcacgttggcgattggttacaggagaggtacgagatcgtgtcaactctaggggaaggcacctttggacgagtcgtccaatgtgttgaccacagacgcggaggagctagagtagccctcaaaataataaagaacgttgagaaatataaggaggccgctcggttggagatcaatgtgctggaaaaaatcaacgaaaaagaccctgacaataaaaatctttgtgtgcagatgttcgactggttcgactatcacggccatatgtgcattagcttcgagctgctggggttgtccaccttcgatttcctcaaggataataattatctgccgtatcccatacaccaggtacgtcatatggccttccagttatgccaggccgtcaagtttcttcacgataataagttgacgcatacggacttaaagcctgagaacattctctttgtgaatagcgattatgagctcacctacaatttagaaaaaaagcgggatgagcgctctgtgaagagcactgccgtgcgggttgtggactttggcagcgcaactttcgaccatgagcaccactcgaccatcgtctcaacacgtcactaccgagcgcctgaggtgatcctcgagttaggatggtctcaaccctgtgacgtctggtctatcggctgtatcatatttgagtattatgttggctttaccctgttccagacccatgataatcgggaacacctggctatgatggaacgcattttaggccctatcccctcaagaatgatacgtaaaactaggaagcaaaaatatttctatcggggtcggttggattgggacgaaaacacttccgccggtcggtatgtgcgcgaaaactgcaagccactgaggcgctacttgaccagtgaggctgaagaacatcatcagctctttgatctaatcgaatccatgctggagtatgaacctgccaaacgtctcactctgggcgaggctctccaacatcccttttttgccagattgagggccgagccacctaacaagctgtgggactcaagtagggatatttctaggtag

SEQ ID NO: 344014 - DNA, 1500 bp, Artificial Sequence
  derived and/or modified sequence
atgccacaccctcggcgttaccactctagcgagagaggcagcaggggcagctatagagagcactatcgtagcagaaagcacaagaggcgacgcagccggtcctggagttcttcgagtgaccggactcggcgtaggcgaagggaggactcataccacgtgagatcccggtcttcctacgatgatcgttcttcggatcggagggtttacgacagacgatactgcggttcctatcgccgtaatgactattccagagatagaggtgatgcctactacgacacagattataggcattcttacgagtatcaaagagagaatagctcatatagaagtcagcgctcctcgcggagaaaacatagacgaaggcgacggagatccagaaccttcagtcggtcttcctcccaacattctagccgccgtgccaaaagtgtcgaagatgacgcagagggccatctaatataccacgtgggcgactggctgcaggaaaggtatgaaatagtcagcacccttggggagggaacgttcgggagagtggttcaatgcgttgatcacaggagagggggagctcgtgtggcgctgaagattattaaaaatgtggagaaatacaaggaagccgctcgactggaaatcaacgtgctcgaaaaaatcaacgagaaggatccagataacaagaacctctgcgtgcagatgtttgattggtttgattaccacggtcacatgtgtatctcattcgagctgctggggttgtcaacctttgatttcttgaaggacaacaattatctcccgtacccaattcaccaggttcgacacatggcattccagctctgccaggccgttaagttcctccacgataacaagttaactcataccgatctcaaacctgagaacatactattcgtgaatagtgactacgaattgacgtataacctggagaaaaaaagggatgaacgctctgtgaagagtaccgctgttcgggttgtggattttggctctgcaactttcgaccacgagcaccacagtaccatagtttcaacaaggcactacagagcacccgaggtgattctggaactgggatggagccaaccgtgcgatgtgtggagcattggttgtattatcttcgaatactacgtaggattcacactgtttcagactcatgacaatcgtgaacatctggcaatgatggaacggatactcgggcctataccgagtaggatgattagaaaaacccgaaaacagaaatacttttatcgagggaggctggactgggacgagaataccagtgcaggccgatatgttcgggagaattgcaagcccttaagaaggtatttgacatctgaagcagaagagcatcaccaactgtttgaccttatcgaaagtatgctggaatatgagcctgctaaaaggctgactctgggtgaagcactccagcaccctttctttgctcgcctaagggcggagccccctaacaaattgtgggacagttctagagatatctctcgatag

SEQ ID NO: 344015 - DNA, 1500 bp, Artificial Sequence
  derived and/or modified sequence
atgccccacccccgaagataccattccagtgaacgcggatcaagaggcagctaccgcgagcattacaggtccagaaagcacaagagacgcagaagcaggtcttggtcttcatcatccgaccgtaccagaaggaggaggagagaagatagttatcatgtgagatcccggtcctcctacgatgacagatcctcggaccggcgagtgtacgaccgtaggtattgtggctcttaccggaggaacgactactcccgcgatagaggtgacgcctattacgacaccgactataggcacagttatgaataccagcgggaaaatagcagctacaggtctcagcggtcctcaagacgtaaacatagaaggagacggcgacgatctagaacatttagccgatctagttcccagcattcttcccgcagagcaaaaagcgtggaggacgacgccgaaggacatctgatctaccacgttggagattggctgcaagaacgctatgaaatcgtttctacgctgggtgagggaactttcggcagggtggtgcagtgcgtggaccaccgcagaggcggagctcgggtggcccttaaaattatcaagaatgttgaaaaatacaaagaagcagccaggctcgagataaacgtattggagaaaatcaacgaaaaggatccggataacaagaacctgtgtgtgcagatgttcgattggtttgactatcacggccacatgtgcatcagcttcgaactgttgggcttaagcacattcgattttctgaaagacaacaactacctgccatatcctatccaccaggttcggcatatggcgtttcaactctgccaagctgtgaaattccttcacgacaacaagttgacccatacagatctgaagcctgagaacatcctctttgtgaattcagactatgagctgacgtataatctagaaaagaagcgagatgagcgatcagtcaagtcaaccgcagtccgggttgtggatttcggcagtgccacgtttgaccatgaacaccattccacaatcgtttccacccgacattacagggcgcctgaagtgattctggagctcggatggtcccagccgtgcgatgtctggtccattggatgcatcatcttcgaatactacgtgggatttacactattccagacacacgataatagggagcacttggccatgatggagcggattttgggccctatcccttcacgaatgatacgcaagacccggaaacaaaaatacttttataggggcagactggactgggacgagaatacttcagcaggtcgctatgtccgagaaaactgtaaacctctgaggcgctacctgacgtcagaggccgaggaacatcaccagctgttcgacttgatcgagtccatgctagagtatgagccagcgaagcggctcacactcggagaagccctccagcaccccttttttgctcgcttacgggctgagcctccgaataagctttgggattctagcagagatatcagtaggtag

SEQ ID NO: 344016 - DNA, 2166 bp, Artificial Sequence
  derived and/or modified sequence
ggacgtcggtccgtgcgtacgtgctcgctcacggcggcggcggcggagcggagaggccagagccggagaccgagctgggatcgggccccgggcgggggcggtgcgagcggcgccaagcagatcttaggggcggggacggagccggggcgggcgggactgaagcggagcccgggaacggggcgggaggtcccagggtcccgggttgggggggtggagcagcatttcgtcgccgcgggggtgccgggactccggccgcagtgtcgccgccatcacggacttcctgtgggacaagcgcacgggcctcgccgccagaacgatgccgcatcctcgaaggtaccactcctcagagcgaggcagccgggggagttaccgtgaacactatcggagccgaaagcataagcgacgaagaagtcgctcctggtcaagtagtagtgaccggacacgacggcgtcggcgagaggacagctaccatgtccgttctcgaagcagttatgatgatcgttcgtccgaccggagggtgtatgaccggcgatactgtggcagctacagacgcaacgattatagccgggatcggggagatgcctactatgacacagactatcggcattcctatgaatatcagcgggagaacagcagttaccgcagccagcgcagcagccggaggaagcacagacggcggaggaggcgcagccggacatttagccgctcatcttcgcagcacagcagccggagagccaagagtgtagaggacgacgctgagggccacctcatctaccacgtcggggactggctacaagagcgatatgaaatcgttagcaccttaggagaggggaccttcggccgagttgtacaatgtgttgaccatcgcaggggtggggctcgagttgccctgaagatcattaagaatgtggagaagtacaaggaagcagctcgacttgagatcaacgtgctagagaaaatcaatgagaaagaccctgacaacaagaacctctgtgtccagatgtttgactggtttgactaccatggccacatgtgtatctcctttgagcttctgggccttagcaccttcgatttcctcaaagacaacaactacctgccctaccccatccaccaagtgcgccacatggccttccagctgtgccaggctgtcaagttcctccatgataacaagctgacacatacagacctcaagcctgaaaatattctgtttgtgaattcagactatgagctcacctacaacctagagaagaagcgagatgagcgcagtgtgaagagcacagctgtgcgggtggtagactttggcagtgccacctttgaccatgagcaccatagcaccattgtctccactcgccattaccgagcaccagaagtcatccttgagttgggctggtcacagccttgtgatgtgtggagtataggctgcatcatctttgaatactatgtgggattcaccctcttccagacccatgacaacagagagcatctagccatgatggaaaggatcttgggtcctatcccttcccggatgatccgaaagacaagaaagcagaaatatttttaccggggtcgcctggattgggatgagaacacatcagctgggcgctatgttcgtgagaactgcaaaccgctgcggcggtatctgacctcagaggcagaggaacaccaccagctcttcgatctgattgaaagcatgctagagtatgaaccagctaagcggctgaccttgggtgaagcccttcagcatcctttcttcgcccgccttcgggctgagccgcccaacaagttgtgggactccagtcgggatatcagtcggtgacgatcaggccctgggcccccctgcatcttttatagcagtgggtgtccagtccaggacactggtgcttttttatacaagagaacgagccagagttcactccttcctcctggctctctatatacctgtgaatatgtgaaatagtgtaaatatgaaagaacttgtacctatcacttcaacccctgccttgtacataatactattccatccacacagtttccaccctcacctgccccctcatacggagttggatgggggccgagtgaggtaaccaggtggcatctaccccatgttttataaggaattttgtacagtctttgtgaaataaaataacgtgcttcatttgaccccca

SEQ ID NO: 344017 - DNA, 1711 bp, Artificial Sequence
  derived and/or modified sequence
agatttggggatcggacctgaggccgcggtcgcaggcgggggagcaacgggaggcaccgcctccagtccaggggtcgccccttcgctggcccccgccgccggccgctgctctgcctccatggcgcccaccccgcttacacgctcggcctcctagagccctctgtggccatcagatgccgcatcctcgaaggtaccactcctcagagcgaggcagccgggggagttaccgtgaacactatcggagccgaaagcataagcgacgaagaagtcgctcctggtcaagtagtagtgaccggacacgacggcgtcggcgagaggacagctaccatgtccgttctcgaagcagttatgatgatcgttcgtccgaccggagggtgtatgaccggcgatactgtggcagctacagacgcaacgattatagccgggatcggggagatgcctactatgacacagactatcggcattcctatgaatatcagcgggagaacagcagttaccgcagccagcgcagcagccggaggaagcacagacggcggaggaggcgcagccggacatttagccgctcatcttcgcagcacagcagccggagagccaagagtgtagaggacgacgctgagggccacctcatctaccacgtcggggactggctacaagagcgatatgaaatcgttagcaccttaggagaggggaccttcggccgagttgtacaatgtgttgaccatcgcaggggtggggctcgagttgccctgaagatcattaagaatgtggagaagtacaaggaagcagctcgacttgagatcaacgtgctagagaaaatcaatgagaaagaccctgacaacaagaacctctgtgtccagatgtttgactggtttgactaccatggccacatgtgtatctcctttgagcttctgggccttagcaccttcgatttcctcaaagacaacaactacctgccctaccccatccaccaagtgcgccacatggccttccagctgtgccaggctgtcaagttcctccatgataacaagctgacacatacagacctcaagcctgaaaatattctgtttgtgaattcagactatgagctcacctacaacctagagaagaagcgagatgagcgcagtgtgaagagcacagctgtgcgggtggtagactttggcagtgccacctttgaccatgagcaccatagcaccattgtctccactcgccattaccgagcaccagaagtcatccttgagttgggctggtcacagccttgtgatgtgtggagtataggctgcatcatctttgaatactatgtgggattcaccctcttccagacccatgacaacagagagcatctagccatgatggaaaggatcttgggtcctatcccttcccggatgatccgaaagacaagaaagcagaaatatttttaccggggtcgcctggattgggatgagaacacatcagctgggcgctatgttcgtgagaactgcaaaccgctgcggcggtatctgacctcagaggcagaggaacaccaccagctcttcgatctgattgaaagcatgctagagtatgaaccagctaagcggctgaccttgggtgaagcccttcagcatcctttcttcgcccgccttcgggctgagccgcccaacaagttgtgggactccagtcgggatatcagtcggtgacgatcaggccctgggcccccctgcatcttttatagcag

SEQ ID NO: 344018 - DNA, 1500 bp, Artificial Sequence
  derived and/or modified sequence
atgccccaccccagaagataccacagcagcgagagaggcagcagaggcagctacagagagcactacagaagcagaaagcacaagagaagaagaagcagaagctggagcagcagcagcgacagaaccagaagaagaagaagagaggacagctaccacgtgagaagcagaagcagctacgacgacagaagcagcgacagaagagtgtacgacagaagatactgcggcagctacagaagaaacgactacagcagagacagaggcgacgcctactacgacaccgactacagacacagctacgagtaccagagagagaacagcagctacagaagccagagaagcagcagaagaaagcacagaagaagaagaagaagaagcagaaccttcagcagaagcagcagccagcacagcagcagaagagccaagagcgtggaggacgacgccgagggccacctgatctaccacgtgggcgactggctgcaggagagatacgagatcgtgagcaccctgggcgagggcaccttcggcagagtggtgcagtgcgtggaccacagaagaggcggcgccagagtggccctgaagatcatcaagaacgtggagaagtacaaggaggccgccagactggagatcaacgtgctggagaagatcaacgagaaggaccccgacaacaagaacctgtgcgtgcagatgttcgactggttcgactaccacggccacatgtgcatcagcttcgagctgctgggcctgagcaccttcgacttcctgaaggacaacaactacctgccctaccccatccaccaggtgagacacatggccttccagctgtgccaggccgtgaagttcctgcacgacaacaagctgacccacaccgacctgaagcccgagaacatcctgttcgtgaacagcgactacgagctgacctacaacctggagaagaagagagacgagagaagcgtgaagagcaccgccgtgagagtggtggacttcggcagcgccaccttcgaccacgagcaccacagcaccatcgtgagcaccagacactacagagcccccgaggtgatcctggagctgggctggagccagccctgcgacgtgtggagcatcggctgcatcatcttcgagtactacgtgggcttcaccctgttccagacccacgacaacagagagcacctggccatgatggagagaatcctgggccccatccccagcagaatgatcagaaagaccagaaagcagaagtacttctacagaggcagactggactgggacgagaacaccagcgccggcagatacgtgagagagaactgcaagcccctgagaagatacctgaccagcgaggccgaggagcaccaccagctgttcgacctgatcgagagcatgctggagtacgagcccgccaagagactgaccctgggcgaggccctgcagcaccccttcttcgccagactgagagccgagccccccaacaagctgtgggacagcagcagagacatcagcagatag

SEQ ID NO: 344019 - DNA, 2583 bp, Artificial Sequence
  derived and/or modified sequence
ctctctctctctcgctcgctctctcgctctctcgctctctctcgctcgctctctcgctctcgctctctctctctctccggctcgccagcgacacttgttcgttcaacttgaccaatgagacttgaggaagggctctgagtcccgcctctgcatgagtgaccgtctcttttccaatccaggtcccgccccgactccccagggctgcttttctcgcggctgcgggtggtcgggctgcatcctgccttcagagtcttactgcgcggggccccagtctccagtcccgcccaggcgcctttgcaggctgcggtgggatttcgttttgcctccggttggggctgctgtttctcttcgccgacgtggatcctctatccttcagagactctggaacccctgtggtcttctcttcatctaatgaccctgaggggatggagttttcaagtccttccagagaggaatgtcccaagcctttgagtagggtaagcatcatggctggcagcctcacaggattgcttctacttcaggcagtgtcgtgggcatcaggtgcccgcccctgcatccctaaaagcttcggctacagctcggtggtgtgtgtctgcaatgccacatactgtgactcctttgaccccccgacctttcctgcccttggtaccttcagccgctatgagagtacacgcagtgggcgacggatggagctgagtatggggcccatccaggctaatcacacgggcacaggcctgctactgaccctgcagccagaacagaagttccagaaagtgaagggatttggaggggccatgacagatgctgctgctctcaacatccttgccctgtcaccccctgcccaaaatttgctacttaaatcgtacttctctgaagaaggaatcggatataacatcatccgggtacccatggccagctgtgacttctccatccgcacctacacctatgcagacacccctgatgatttccagttgcacaacttcagcctcccagaggaagataccaagctcaagatacccctgattcaccgagccctgcagttggcccagcgtcccgtttcactccttgccagcccctggacatcacccacttggctcaagaccaatggagcggtgaatgggaaggggtcactcaagggacagcccggagacatctaccaccagacctgggccagatactttgtgaagttcctggatgcctatgctgagcacaagttacagttctgggcagtgacagctgaaaatgagccttctgctgggctgttgagtggataccccttccagtgcctgggcttcacccctgaacatcagcgagacttcattgcccgtgacctaggtcctaccctcgccaacagtactcaccacaatgtccgcctactcatgctggatgaccaacgcttgctgctgccccactgggcaaaggtggtactgacagacccagaagcagctaaatatgttcatggcattgctgtacattggtacctggactttctggctccagccaaagccaccctaggggagacacaccgcctgttccccaacaccatgctctttgcctcagaggcctgtgtgggctccaagttctgggagcagagtgtgcggctaggctcctgggatcgagggatgcagtacagccacagcatcatcacgaacctcctgtaccatgtggtcggctggaccgactggaaccttgccctgaaccccgaaggaggacccaattgggtgcgtaactttgtcgacagtcccatcattgtagacatcaccaaggacacgttttacaaacagcccatgttctaccaccttggccacttcagcaagttcattcctgagggctcccagagagtggggctggttgccagtcagaagaacgacctggacgcagtggcactgatgcatcccgatggctctgctgttgtggtcgtgctaaaccgctcctctaaggatgtgcctcttaccatcaaggatcctgctgtgggcttcctggagacaatctcacctggctactccattcacacctacctgtggcgtcgccagtgatggagcagatactcaaggaggcactgggctcagcctgggcattaaagggacagagtcagctcacacgctgtctgtgactaaagagggcacagcagggccagtgtgagcttacagcgacgtaagcccaggggcaatggtttgggtgactcactttcccctctaggtggtgccaggggctggaggcccctagaaaaagatcagtaagccccagtgtccccccagcccccatgcttatgtgaacatgcgctgtgtgctgcttgctttggaaactgggcctgggtccaggcctagggtgagctcactgtccgtacaaacacaagatcagggctgagggtaaggaaaagaagagactaggaaagctgggcccaaaactggagactgtttgtctttcctggagatgcagaactgggcccgtggagcagcagtgtcagcatcagggcggaagccttaaagcagcagcgggtgtgcccaggcacccagatgattcctatggcaccagccaggaaaaatggcagctcttaaaggagaaaatgtttgagcccagtca

SEQ ID NO: 344020 - DNA, 2564 bp, Artificial Sequence
  derived and/or modified sequence
ctctctctctctcgctcgctctctcgctctctcgctctctctcgctcgctctctcgctctcgctctctctctctctccggctcgccagcgacacttgttcgttcaacttgaccaatgagacttgaggaagggctctgagtcccgcctctgcatgagtgaccgtctcttttccaatccaggtcccgccccgactccccagggctgcttttctcgcggctgcgggtggtcgggctgcatcctgccttcagagtcttactgcgcggggccccagtctccagtcccgcccaggcgcctttgcaggctgcggtgggatttcgttttgcctccggttggggctgctgtttctcttcgccgacgagactctggaacccctgtggtcttctcttcatctaatgaccctgaggggatggagttttcaagtccttccagagaggaatgtcccaagcctttgagtagggtaagcatcatggctggcagcctcacaggattgcttctacttcaggcagtgtcgtgggcatcaggtgcccgcccctgcatccctaaaagcttcggctacagctcggtggtgtgtgtctgcaatgccacatactgtgactcctttgaccccccgacctttcctgcccttggtaccttcagccgctatgagagtacacgcagtgggcgacggatggagctgagtatggggcccatccaggctaatcacacgggcacaggcctgctactgaccctgcagccagaacagaagttccagaaagtgaagggatttggaggggccatgacagatgctgctgctctcaacatccttgccctgtcaccccctgcccaaaatttgctacttaaatcgtacttctctgaagaaggaatcggatataacatcatccgggtacccatggccagctgtgacttctccatccgcacctacacctatgcagacacccctgatgatttccagttgcacaacttcagcctcccagaggaagataccaagctcaagatacccctgattcaccgagccctgcagttggcccagcgtcccgtttcactccttgccagcccctggacatcacccacttggctcaagaccaatggagcggtgaatgggaaggggtcactcaagggacagcccggagacatctaccaccagacctgggccagatactttgtgaagttcctggatgcctatgctgagcacaagttacagttctgggcagtgacagctgaaaatgagccttctgctgggctgttgagtggataccccttccagtgcctgggcttcacccctgaacatcagcgagacttcattgcccgtgacctaggtcctaccctcgccaacagtactcaccacaatgtccgcctactcatgctggatgaccaacgcttgctgctgccccactgggcaaaggtggtactgacagacccagaagcagctaaatatgttcatggcattgctgtacattggtacctggactttctggctccagccaaagccaccctaggggagacacaccgcctgttccccaacaccatgctctttgcctcagaggcctgtgtgggctccaagttctgggagcagagtgtgcggctaggctcctgggatcgagggatgcagtacagccacagcatcatcacgaacctcctgtaccatgtggtcggctggaccgactggaaccttgccctgaaccccgaaggaggacccaattgggtgcgtaactttgtcgacagtcccatcattgtagacatcaccaaggacacgttttacaaacagcccatgttctaccaccttggccacttcagcaagttcattcctgagggctcccagagagtggggctggttgccagtcagaagaacgacctggacgcagtggcactgatgcatcccgatggctctgctgttgtggtcgtgctaaaccgctcctctaaggatgtgcctcttaccatcaaggatcctgctgtgggcttcctggagacaatctcacctggctactccattcacacctacctgtggcgtcgccagtgatggagcagatactcaaggaggcactgggctcagcctgggcattaaagggacagagtcagctcacacgctgtctgtgactaaagagggcacagcagggccagtgtgagcttacagcgacgtaagcccaggggcaatggtttgggtgactcactttcccctctaggtggtgccaggggctggaggcccctagaaaaagatcagtaagccccagtgtccccccagcccccatgcttatgtgaacatgcgctgtgtgctgcttgctttggaaactgggcctgggtccaggcctagggtgagctcactgtccgtacaaacacaagatcagggctgagggtaaggaaaagaagagactaggaaagctgggcccaaaactggagactgtttgtctttcctggagatgcagaactgggcccgtggagcagcagtgtcagcatcagggcggaagccttaaagcagcagcgggtgtgcccaggcacccagatgattcctatggcaccagccaggaaaaatggcagctcttaaaggagaaaatgtttgagcccagtca

SEQ ID NO: 344021 - DNA, 2400 bp, Artificial Sequence
  derived and/or modified sequence
ctctctctctctcgctcgctctctcgctctctcgctctctctcgctcgctctctcgctctcgctctctctctctctccggctcgccagcgacacttgttcgttcaacttgaccaatgagacttgaggaagggctctgagtcccgcctctgcatgagtgaccgtctcttttccaatccaggtcccgccccgactccccagggctgcttttctcgcggctgcgggtggtcgggctgcatcctgccttcagagtcttactgcgcggggccccagtctccagtcccgcccaggcgcctttgcaggctgcggtgggatttcgttttgcctccggttggggctgctgtttctcttcgccgacggtgcccgcccctgcatccctaaaagcttcggctacagctcggtggtgtgtgtctgcaatgccacatactgtgactcctttgaccccccgacctttcctgcccttggtaccttcagccgctatgagagtacacgcagtgggcgacggatggagctgagtatggggcccatccaggctaatcacacgggcacaggcctgctactgaccctgcagccagaacagaagttccagaaagtgaagggatttggaggggccatgacagatgctgctgctctcaacatccttgccctgtcaccccctgcccaaaatttgctacttaaatcgtacttctctgaagaaggaatcggatataacatcatccgggtacccatggccagctgtgacttctccatccgcacctacacctatgcagacacccctgatgatttccagttgcacaacttcagcctcccagaggaagataccaagctcaagatacccctgattcaccgagccctgcagttggcccagcgtcccgtttcactccttgccagcccctggacatcacccacttggctcaagaccaatggagcggtgaatgggaaggggtcactcaagggacagcccggagacatctaccaccagacctgggccagatactttgtgaagttcctggatgcctatgctgagcacaagttacagttctgggcagtgacagctgaaaatgagccttctgctgggctgttgagtggataccccttccagtgcctgggcttcacccctgaacatcagcgagacttcattgcccgtgacctaggtcctaccctcgccaacagtactcaccacaatgtccgcctactcatgctggatgaccaacgcttgctgctgccccactgggcaaaggtggtactgacagacccagaagcagctaaatatgttcatggcattgctgtacattggtacctggactttctggctccagccaaagccaccctaggggagacacaccgcctgttccccaacaccatgctctttgcctcagaggcctgtgtgggctccaagttctgggagcagagtgtgcggctaggctcctgggatcgagggatgcagtacagccacagcatcatcacgaacctcctgtaccatgtggtcggctggaccgactggaaccttgccctgaaccccgaaggaggacccaattgggtgcgtaactttgtcgacagtcccatcattgtagacatcaccaaggacacgttttacaaacagcccatgttctaccaccttggccacttcagcaagttcattcctgagggctcccagagagtggggctggttgccagtcagaagaacgacctggacgcagtggcactgatgcatcccgatggctctgctgttgtggtcgtgctaaaccgctcctctaaggatgtgcctcttaccatcaaggatcctgctgtgggcttcctggagacaatctcacctggctactccattcacacctacctgtggcgtcgccagtgatggagcagatactcaaggaggcactgggctcagcctgggcattaaagggacagagtcagctcacacgctgtctgtgactaaagagggcacagcagggccagtgtgagcttacagcgacgtaagcccaggggcaatggtttgggtgactcactttcccctctaggtggtgccaggggctggaggcccctagaaaaagatcagtaagccccagtgtccccccagcccccatgcttatgtgaacatgcgctgtgtgctgcttgctttggaaactgggcctgggtccaggcctagggtgagctcactgtccgtacaaacacaagatcagggctgagggtaaggaaaagaagagactaggaaagctgggcccaaaactggagactgtttgtctttcctggagatgcagaactgggcccgtggagcagcagtgtcagcatcagggcggaagccttaaagcagcagcgggtgtgcccaggcacccagatgattcctatggcaccagccaggaaaaatggcagctcttaaaggagaaaatgtttgagcccagtca

SEQ ID NO: 344022 - DNA, 2324 bp, Artificial Sequence
  derived and/or modified sequence
atcacatgacccatccacatcgggaagccggaattacttgcagggctaacctagtgcctatagctaaggcaggtacctgcatccttgtttttgtttagtggatcctctatccttcagagactctggaacccctgtggtcttctcttcatctaatgaccctgaggggatggagttttcaagtccttccagagaggaatgtcccaagcctttgagtagggtaagcatcatggctggcagcctcacaggattgcttctacttcaggcagtgtcgtgggcatcaggtgcccgcccctgcatccctaaaagcttcggctacagctcggtggtgtgtgtctgcaatgccacatactgtgactcctttgaccccccgacctttcctgcccttggtaccttcagccgctatgagagtacacgcagtgggcgacggatggagctgagtatggggcccatccaggctaatcacacgggcacaggcctgctactgaccctgcagccagaacagaagttccagaaagtgaagggatttggaggggccatgacagatgctgctgctctcaacatccttgccctgtcaccccctgcccaaaatttgctacttaaatcgtacttctctgaagaaggaatcggatataacatcatccgggtacccatggccagctgtgacttctccatccgcacctacacctatgcagacacccctgatgatttccagttgcacaacttcagcctcccagaggaagataccaagctcaagatacccctgattcaccgagccctgcagttggcccagcgtcccgtttcactccttgccagcccctggacatcacccacttggctcaagaccaatggagcggtgaatgggaaggggtcactcaagggacagcccggagacatctaccaccagacctgggccagatactttgtgaagttcctggatgcctatgctgagcacaagttacagttctgggcagtgacagctgaaaatgagccttctgctgggctgttgagtggataccccttccagtgcctgggcttcacccctgaacatcagcgagacttcattgcccgtgacctaggtcctaccctcgccaacagtactcaccacaatgtccgcctactcatgctggatgaccaacgcttgctgctgccccactgggcaaaggtggtactgacagacccagaagcagctaaatatgttcatggcattgctgtacattggtacctggactttctggctccagccaaagccaccctaggggagacacaccgcctgttccccaacaccatgctctttgcctcagaggcctgtgtgggctccaagttctgggagcagagtgtgcggctaggctcctgggatcgagggatgcagtacagccacagcatcatcacgaacctcctgtaccatgtggtcggctggaccgactggaaccttgccctgaaccccgaaggaggacccaattgggtgcgtaactttgtcgacagtcccatcattgtagacatcaccaaggacacgttttacaaacagcccatgttctaccaccttggccacttcagcaagttcattcctgagggctcccagagagtggggctggttgccagtcagaagaacgacctggacgcagtggcactgatgcatcccgatggctctgctgttgtggtcgtgctaaaccgctcctctaaggatgtgcctcttaccatcaaggatcctgctgtgggcttcctggagacaatctcacctggctactccattcacacctacctgtggcgtcgccagtgatggagcagatactcaaggaggcactgggctcagcctgggcattaaagggacagagtcagctcacacgctgtctgtgactaaagagggcacagcagggccagtgtgagcttacagcgacgtaagcccaggggcaatggtttgggtgactcactttcccctctaggtggtgccaggggctggaggcccctagaaaaagatcagtaagccccagtgtccccccagcccccatgcttatgtgaacatgcgctgtgtgctgcttgctttggaaactgggcctgggtccaggcctagggtgagctcactgtccgtacaaacacaagatcagggctgagggtaaggaaaagaagagactaggaaagctgggcccaaaactggagactgtttgtctttcctggagatgcagaactgggcccgtggagcagcagtgtcagcatcagggcggaagccttaaagcagcagcgggtgtgcccaggcacccagatgattcctatggcaccagccaggaaaaatggcagctcttaaaggagaaaatgtttgagcccagtca

SEQ ID NO: 344023 - DNA, 76 bp, Artificial Sequence
  derived and/or modified sequence
aatcgaacggaatcaacatcaaacggaaaaaaaacggaattatcgaatggaatcgaagagaatcatcgaatggacc

SEQ ID NO: 344024 - DNA, 2387 bp, Artificial Sequence
  derived and/or modified sequence
tccccagggctgcttttctcgcggctgcgggtggtcgggctgcatcctgccttcagagtcttactgcgcggggccccagtctccagtcccgcccaggcgcctttgcaggctgcggtgggatttcgttttgcctccggttggggctgctgtttctcttcgccgacgtggatcctctatccttcagagactctggaacccctgtggtcttctcttcatctaatgaccctgaggggatggagttttcaagtccttccagagaggaatgtcccaagcctttgagtagggtaagcatcatggctggcagcctcacaggattgcttctacttcaggcagtgtcgtgggcatcaggtgcccgcccctgcatccctaaaagcttcggctacagctcggtggtgtgtgtctgcaatgccacatactgtgactcctttgaccccccgacctttcctgcccttggtaccttcagccgctatgagagtacacgcagtgggcgacggatggagctgagtatggggcccatccaggctaatcacacgggcacaggcctgctactgaccctgcagccagaacagaagttccagaaagtgaagggatttggaggggccatgacagatgctgctgctctcaacatccttgccctgtcaccccctgcccaaaatttgctacttaaatcgtacttctctgaagaaggaatcggatataacatcatccgggtacccatggccagctgtgacttctccatccgcacctacacctatgcagacacccctgatgatttccagttgcacaacttcagcctcccagaggaagataccaagctcaagatacccctgattcaccgagccctgcagttggcccagcgtcccgtttcactccttgccagcccctggacatcacccacttggctcaagaccaatggagcggtgaatgggaaggggtcactcaagggacagcccggagacatctaccaccagacctgggccagatactttgtgaagttcctggatgcctatgctgagcacaagttacagttctgggcagtgacagctgaaaatgagccttctgctgggctgttgagtggataccccttccagtgcctgggcttcacccctgaacatcagcgagacttcattgcccgtgacctaggtcctaccctcgccaacagtactcaccacaatgtccgcctactcatgctggatgaccaacgcttgctgctgccccactgggcaaaggtggtactgacagacccagaagcagctaaatatgttcatggcattgctgtacattggtacctggactttctggctccagccaaagccaccctaggggagacacaccgcctgttccccaacaccatgctctttgcctcagaggcctgtgtgggctccaagttctgggagcagagtgtgcggctaggctcctgggatcgagggatgcagtacagccacagcatcatcacgaacctcctgtaccatgtggtcggctggaccgactggaaccttgccctgaaccccgaaggaggacccaattgggtgcgtaactttgtcgacagtcccatcattgtagacatcaccaaggacacgttttacaaacagcccatgttctaccaccttggccacttcagcaagttcattcctgagggctcccagagagtggggctggttgccagtcagaagaacgacctggacgcagtggcactgatgcatcccgatggctctgctgttgtggtcgtgctaaaccgctcctctaaggatgtgcctcttaccatcaaggatcctgctgtgggcttcctggagacaatctcacctggctactccattcacacctacctgtggcgtcgccagtgatggagcagatactcaaggaggcactgggctcagcctgggcattaaagggacagagtcagctcacacgctgtctgtgactaaagagggcacagcagggccagtgtgagcttacagcgacgtaagcccaggggcaatggtttgggtgactcactttcccctctaggtggtgccaggggctggaggcccctagaaaaagatcagtaagccccagtgtccccccagcccccatgcttatgtgaacatgcgctgtgtgctgcttgctttggaaactgggcctgggtccaggcctagggtgagctcactgtccgtacaaacacaagatcagggctgagggtaaggaaaagaagagactaggaaagctgggcccaaaactggagactgtttgtctttcctggagatgcagaactgggcccgtggagcagcagtgtcagcatcagggcggaagccttaaagcagcagcgggtgtgcccaggcacccagatgattcctatggcaccagccaggaaaaatggcagctcttaaaggagaaaatgtttgagccca

SEQ ID NO: 344025 - DNA, 2276 bp, Artificial Sequence
  derived and/or modified sequence
gctaacctagtgcctatagctaaggcaggtacctgcatccttgtttttgtttagtggatcctctatccttcagagactctggaacccctgtggtcttctcttcatctaatgaccctgaggggatggagttttcaagtccttccagagaggaatgtcccaagcctttgagtagggtaagcatcatggctggcagcctcacaggattgcttctacttcaggcagtgtcgtgggcatcaggtgcccgcccctgcatccctaaaagcttcggctacagctcggtggtgtgtgtctgcaatgccacatactgtgactcctttgaccccccgacctttcctgcccttggtaccttcagccgctatgagagtacacgcagtgggcgacggatggagctgagtatggggcccatccaggctaatcacacgggcacaggcctgctactgaccctgcagccagaacagaagttccagaaagtgaagggatttggaggggccatgacagatgctgctgctctcaacatccttgccctgtcaccccctgcccaaaatttgctacttaaatcgtacttctctgaagaaggaatcggatataacatcatccgggtacccatggccagctgtgacttctccatccgcacctacacctatgcagacacccctgatgatttccagttgcacaacttcagcctcccagaggaagataccaagctcaagatacccctgattcaccgagccctgcagttggcccagcgtcccgtttcactccttgccagcccctggacatcacccacttggctcaagaccaatggagcggtgaatgggaaggggtcactcaagggacagcccggagacatctaccaccagacctgggccagatactttgtgaagttcctggatgcctatgctgagcacaagttacagttctgggcagtgacagctgaaaatgagccttctgctgggctgttgagtggataccccttccagtgcctgggcttcacccctgaacatcagcgagacttcattgcccgtgacctaggtcctaccctcgccaacagtactcaccacaatgtccgcctactcatgctggatgaccaacgcttgctgctgccccactgggcaaaggtggtactgacagacccagaagcagctaaatatgttcatggcattgctgtacattggtacctggactttctggctccagccaaagccaccctaggggagacacaccgcctgttccccaacaccatgctctttgcctcagaggcctgtgtgggctccaagttctgggagcagagtgtgcggctaggctcctgggatcgagggatgcagtacagccacagcatcatcacgaacctcctgtaccatgtggtcggctggaccgactggaaccttgccctgaaccccgaaggaggacccaattgggtgcgtaactttgtcgacagtcccatcattgtagacatcaccaaggacacgttttacaaacagcccatgttctaccaccttggccacttcagcaagttcattcctgagggctcccagagagtggggctggttgccagtcagaagaacgacctggacgcagtggcactgatgcatcccgatggctctgctgttgtggtcgtgctaaaccgctcctctaaggatgtgcctcttaccatcaaggatcctgctgtgggcttcctggagacaatctcacctggctactccattcacacctacctgtggcgtcgccagtgatggagcagatactcaaggaggcactgggctcagcctgggcattaaagggacagagtcagctcacacgctgtctgtgactaaagagggcacagcagggccagtgtgagcttacagcgacgtaagcccaggggcaatggtttgggtgactcactttcccctctaggtggtgccaggggctggaggcccctagaaaaagatcagtaagccccagtgtccccccagcccccatgcttatgtgaacatgcgctgtgtgctgcttgctttggaaactgggcctgggtccaggcctagggtgagctcactgtccgtacaaacacaagatcagggctgagggtaaggaaaagaagagactaggaaagctgggcccaaaactggagactgtttgtctttcctggagatgcagaactgggcccgtggagcagcagtgtcagcatcagggcggaagccttaaagcagcagcgggtgtgcccaggcacccagatgattcctatggcaccagccaggaaaaatggcagctcttaaaggagaaaatgtttgagccca

SEQ ID NO: 344026 - DNA, 1739 bp, Artificial Sequence
  derived and/or modified sequence
acttgcagggctaacctagtgcctatagctaaggcaggtacctgcatccttgtttttgtttagtggatcctctatccttcagagactctggaacccctgtggtcttctcttcatctaatgaccctgaggggatggagttttcaagtccttccagagaggaatgtcccaagcctttgagtagggtaagcatcatggctggcagcctcacaggattgcttctacttcaggcagtgtcgtgggcatcaggtgcccgcccctgcatccctaaaagcttcggctacagctcggtggtgtgtgtctgcaatgccacatactgtgactcctttgaccccccgacctttcctgcccttggtaccttcagccgctatgagagtacacgcagtgggcgacggatggagctgagtatggggcccatccaggctaatcacacgggcacaggcctgctactgaccctgcagccagatgctgctgctctcaacatccttgccctgtcaccccctgcccaaaatttgctacttaaatcgtacttctctgaagaaggaatcggatataacatcatccgggtacccatggccagctgtgacttctccatccgcacctacacctatgcagacacccctgatgatttccagttgcacaacttcagcctcccagaggaagataccaagctcaagatacccctgattcaccgagccctgcagttggcccagcgtcccgtttcactccttgccagcccctggacatcacccacttggctcaagaccaatggagcggtgaatgggaaggggtcactcaagggacagcccggagacatctaccaccagacctgggccagatactttgtgaagttcctggatgcctatgctgagcacaagttacagttctgggcagtgacagctgaaaatgagccttctgctgggctgttgagtggataccccttccagtgcctgggcttcacccctgaacatcagcgagacttcattgcccgtgacctaggtcctaccctcgccaacagtactcaccacaatgtccgcctactcatgctggatgaccaacgcttgctgctgccccactgggcaaaggtggtactgacagacccagaagcagctaaatatgttcatggcattgctgtacattggtacctggactttctggctccagccaaagccaccctaggggagacacaccgcctgttccccaacaccatgctctttgcctcagaggcctgtgtgggctccaagttctgggagcagagtgtgcggctaggctcctgggatcgagggatgcagtacagccacagcatcatcacgaacctcctgtaccatgtggtcggctggaccgactggaaccttgccctgaaccccgaaggaggacccaattgggtgcgtaactttgtcgacagtcccatcattgtagacatcaccaaggacacgttttacaaacagcccatgttctaccaccttggccacttcagcaagttcattcctgagggctcccagagagtggggctggttgccagtcagaagaacgacctggacgcagtggcactgatgcatcccgatggctctgctgttgtggtcgtgctaaaccgctcctctaaggatgtgcctcttaccatcaaggatcctgctgtgggcttcctggagacaatctcacctggctactccattcacacctacctgtggcgtcgccagtgatggagcagatactcaaggaggcactgggctcagcctgggcat

SEQ ID NO: 344027 - DNA, 1790 bp, Artificial Sequence
  derived and/or modified sequence
attacttgcagggctaacctagtgcctatagctaaggcaggtacctgcatccttgtttttgtttagtggatcctctatccttcagagactctggaacccctgtggtcttctcttcatctaatgaccctgaggggatggagttttcaagtccttccagagagcaatgccacatactgtgactcctttgaccccccgacctttcctgcccttggtaccttcagccgctatgagagtacacgcagtgggcgacggatggagctgagtatggggcccatccaggctaatcacacgggcacaggcctgctactgaccctgcagccagaacagaagttccagaaagtgaagggatttggaggggccatgacagatgctgctgctctcaacatccttgccctgtcaccccctgcccaaaatttgctacttaaatcgtacttctctgaagaaggaatcggatataacatcatccgggtacccatggccagctgtgacttctccatccgcacctacacctatgcagacacccctgatgatttccagttgcacaacttcagcctcccagaggaagataccaagctcaagatacccctgattcaccgagccctgcagttggcccagcgtcccgtttcactccttgccagcccctggacatcacccacttggctcaagaccaatggagcggtgaatgggaaggggtcactcaagggacagcccggagacatctaccaccagacctgggccagatactttgtgaagttcctggatgcctatgctgagcacaagttacagttctgggcagtgacagctgaaaatgagccttctgctgggctgttgagtggataccccttccagtgcctgggcttcacccctgaacatcagcgagacttcattgcccgtgacctaggtcctaccctcgccaacagtactcaccacaatgtccgcctactcatgctggatgaccaacgcttgctgctgccccactgggcaaaggtggtactgacagacccagaagcagctaaatatgttcatggcattgctgtacattggtacctggactttctggctccagccaaagccaccctaggggagacacaccgcctgttccccaacaccatgctctttgcctcagaggcctgtgtgggctccaagttctgggagcagagtgtgcggctaggctcctgggatcgagggatgcagtacagccacagcatcatcacgaacctcctgtaccatgtggtcggctggaccgactggaaccttgccctgaaccccgaaggaggacccaattgggtgcgtaactttgtcgacagtcccatcattgtagacatcaccaaggacacgttttacaaacagcccatgttctaccaccttggccacttcagcaagttcattcctgagggctcccagagagtggggctggttgccagtcagaagaacgacctggacgcagtggcactgatgcatcccgatggctctgctgttgtggtcgtgctaaaccgctcctctaaggatgtgcctcttaccatcaaggatcctgctgtgggcttcctggagacaatctcacctggctactccattcacacctacctgtggcgtcgccagtgatggagcagatactcaaggaggcactgggctcagcctgggcattaaagggacagagtcagctcacacgctgtctgtgactaaagagggcacagcagggccagtgtgagcttacagcgacgtaagcccaggggcaatggtttgggtgactcactttcccctctaggtggtgccaggggctggaggcccct

SEQ ID NO: 344028 - DNA, 1467 bp, Artificial Sequence
  derived and/or modified sequence
atggctgatacattcttagagcacttatgccttcttgacatagatagtgaacccgttgcagcccggtccacgtccattatcgcaacgattggccccgcttcccgctcagtcgagcgtttgaaagagatgattaaagcaggcatgaacattgcgagattgaacttctcccacgggagccatgagtaccatgcggaatccatcgccctggacaccaaaggacccgaaatccggacggggatcctacagggaggccccgagagtgaagtggagctggtcaagggttctcaggtgctggttacagttgatccagcttttcgcactcggggaaatgcaaatacagtgtgggttgattatccaaacatcgtgagggtagtcccggttggtggaaggatctacatcgacgacggccttatctccctggtggtgcaaaagataggcccggagggcctggtgacacaggtcgagaatggcggcgtgctcggcagcaggaagggtgtgaatctgcctggggcgcaggtggatttgccaggcctgtcagagcaggatgtgagagacctgcgctttggtgtagaacacggtgtggatatcgttttcgcctcatttgtgcgcaaggccagtgatgtggccgccgtgcgggccgccctgggacctgagggtcacggaatcaagattatcagcaagattgaaaaccacgagggcgtaaaaagattcgatgagatcttggaggtttccgatggtattatggtggcccgcggggacctgggcatcgaaatccctgctgaaaaggtgttcctcgcgcagaagatgatgataggccggtgcaatttagctggcaaacccgtggtttgtgcaacgcagatgctggaatctatgatcacaaaacccagacccacacgggcggagacttctgacgtggcaaatgccgttttagacggggccgattgtattatgttgagcggagaaacggccaaaggtaattttcccgtagaagcagttaaaatgcagcatgccattgctcgcgaagccgaggccgcagtgtatcacagacaactgtttgaagagctccgaagagctgcacccctgagtagagatccaacagaggtcaccgctatcggcgccgtagaggccgccttcaagtgctgcgctgcagctatcattgttctgaccaccaccggccgtagtgcgcaactgcttagccggtatagacctcgagcagctgtgatcgcagtgactcggtccgcccaggcagcgcggcaagtgcacctctgcaggggagtgttccctctcctctacagggaaccgccagaagctatatgggcagatgatgtcgatcgtagagtgcagttcgggatagagtctggtaagcttcgcgggttcctgcgcgtgggcgacctggtgatcgtagtaacgggctggagaccaggaagtggctacaccaatatcatgcgggtgctgagtattagctag

SEQ ID NO: 344029 - DNA, 1467 bp, Artificial Sequence
  derived and/or modified sequence
atggctgacaccttcctggagcacctgtgcctgctggacatcgacagcgagcctgtggccgcccggagcaccagcatcatcgccaccatcggccctgccagccgctctgtggagcggctgaaggagatgatcaaggccggcatgaacatcgcccggctgaacttcagccacggcagccatgagtaccacgccgagagcatcgccctggacaccaagggccctgagatcagaacaggcatcctgcagggcggccctgagagcgaggtggagctggtgaagggcagccaggtgctggtgacagtggaccctgccttccgcaccagaggaaatgccaacacagtgtgggtggactaccccaacatcgtgcgggtggtgcctgtgggcggccgcatctacattgatgatggcctcatcagcctggtggtgcagaagattggccctgagggcctggtgacccaggtggagaatggaggagtgctgggcagcaggaagggcgtgaacctgcccggggcccaggtggacctgcccggcctgtctgagcaggatgtgcgggacctgcgcttcggcgtggagcacggcgtggacatcgtgtttgccagctttgtgaggaaggccagtgatgtggccgctgtgcgggccgccctgggccctgagggccacggcatcaagatcatcagcaagattgaaaatcatgaaggagtgaagagatttgatgagatcctggaggtgtctgatggcatcatggtggcccggggggacctgggcatcgagatcccagctgagaaggtgttcctggcccagaagatgatgattggccgctgcaacctggccggcaagcctgtggtgtgtgccacccagatgctggagagcatgatcaccaagccccggcccaccagggctgagaccagtgatgtggccaatgctgtgctggatggagctgactgcatcatgctgtctggagaaacagccaagggcaacttccctgtggaggccgtgaagatgcagcacgccatcgcccgggaggccgaggccgctgtgtaccaccggcagctgtttgaggagctgcggcgggccgcccccctgagccgggaccccacagaggtgacagccatcggggctgtggaggccgccttcaagtgctgtgccgccgccatcatcgtgctgaccaccaccggccgcagcgcccagctgctgagccgctaccggcccagggctgctgtgattgctgtgaccaggtctgcccaggccgcccggcaggtgcacctgtgccggggcgtcttccccctgctgtaccgggagcccccagaggccatctgggcagatgatgtggacagaagagtgcagtttggaattgaaagtggcaagctgcggggcttcctgcgggtgggggacctggtgattgtggtgacaggctggaggcctggcagcggctacaccaacatcatgagggtgctgagcatctcctag

SEQ ID NO: 344030 - DNA, 1467 bp, Artificial Sequence
  derived and/or modified sequence
atggccgacaccttcctggagcacctgtgcctgctggacatcgacagtgagcccgtcgcagcgcgttccacgtctatcatcgccacaataggcccggcgtccaggagcgttgaaaggctgaaagaaatgatcaaggccggcatgaatattgctcgcctcaatttctctcatggaagtcacgaataccacgctgagtcgatagctttagacaccaagggaccagaaatcaggactggcattctccaaggtggacctgagagtgaagtcgagctggtgaaaggcagccaggtgctggttactgtagatccagcattccgtacccggggcaacgccaacacagtctgggtggattaccctaacattgttcgcgtggtacccgttggtggtaggatctatatcgacgatggcctgatatctctggtcgttcagaagattggccccgaaggactagttacgcaggtggagaatgggggggtgctcggatctagaaagggcgtaaatctgcctggcgcacaggtcgacctgccaggcctgtccgaacaggatgtgcgggacctgagatttggggtggaacatggggtggatatcgtctttgcatcatttgtacggaaggcttccgacgtggccgccgtgcgggccgcacttgggcccgagggccatggcattaaaatcatctccaaaatcgagaaccacgagggtgtaaagcgcttcgatgagatcctggaggtctctgatggcataatggtggcccgtggtgacttagggattgagattccggctgagaaggtatttctggcacaaaagatgatgatcggccggtgtaatctagcagggaaacccgtggtgtgtgccactcagatgttggagtcgatgatcaccaaacccagaccaacaagagctgaaactagtgacgtggcaaatgcagtgttggatggggccgattgcatcatgctgtctggagaaaccgccaaaggaaactttccggtcgaggccgttaagatgcaacacgccatagcccgcgaggccgaagccgcagtgtaccacagacagctgttcgaagagctgcgaagagccgctcctttgtcaagagaccccacagaggtgaccgccatcggagcagtggaggccgcttttaaatgctgcgcagccgcaattatagtgctgaccaccaccggtcgctctgctcaactgttaagccgctaccggccacgcgctgccgtcattgccgtaacgagaagcgcccaggcggcccgccaggttcacctgtgccggggcgtttttcccctgttataccgcgaaccccccgaggcaatttgggcggacgatgtggaccggcgcgtccaattcggcattgagtccggtaagctgcgggggttcctgcgcgtaggagatctggtgatagtcgtgactggctggcgaccagggagcggttacaccaatattatgagagtgctctcgatctcctag

SEQ ID NO: 344031 - DNA, 1467 bp, Artificial Sequence
  derived and/or modified sequence
atggcagatacgtttctcgagcatctgtgcttgctggatattgattcagagcctgttgcggctagatccacttcaatcatcgcgacgataggccctgctagtcgtagcgttgagcgcctaaaagaaatgatcaaggctgggatgaacatcgctcgacttaattttagtcacggctcacatgagtatcacgccgagtctatcgcattggatacgaagggtcctgaaatcagaactgggatcttgcagggcggtccggagagcgaagtggaactcgttaagggctcacaggtgctggtgactgtggaccccgctttccgcacccggggaaacgccaacaccgtttgggttgactatcctaatatagtgcgcgtggtgcctgtcggaggacgtatatacatagatgacggattaatttctcttgtggtccagaagattggacccgagggcctcgtgacccaggtggagaatggcggtgtgctaggcagtagaaagggagtaaacctgccaggggctcaggtggacttacccggactaagcgagcaggatgtccgcgacctgcgcttcggcgttgaacacggggtggatatcgtgttcgcatccttcgtcagaaaagcatccgacgtggcggcagtgagagcagccctgggccctgagggacatggaataaaaattatttccaaaatagaaaatcacgaaggtgtgaagcggtttgacgaaattctggaggtctccgacggtatcatggtggcacggggtgatttaggtatcgaaataccggcagagaaagtatttctcgctcagaagatgatgatcggcagatgtaatctcgcaggtaagccagttgtgtgcgcaacccagatgctcgagagcatgattaccaagcctagaccgacaagagcagagaccagtgacgttgcaaatgctgtactggacggcgctgattgcatcatgcttagtggcgagaccgccaagggcaatttccccgttgaggcagtgaagatgcagcatgcaatcgctagggaggctgaggcagccgtgtaccacaggcagctttttgaggaactcagacgggctgcacccctgtcacgggatccaaccgaggtaaccgccatcggcgcagtcgaagctgcctttaagtgctgcgctgctgctatcatagtgcttacaaccacagggagatccgctcagctcctgtctagatatagaccacgcgcagctgtcattgccgtcacgagatccgcacaggctgctcgacaagtgcacctgtgccgaggtgtctttccactgctctatagagaacctcccgaggctatatgggccgatgacgtcgacagaagggtgcagtttggtattgaatctggcaagctgcggggttttctgcgagtgggggaccttgtcatcgttgtgacagggtggcgccctggcagcggatacactaacataatgagggtgttgtcaatttcctag

SEQ ID NO: 344032 - DNA, 1467 bp, Artificial Sequence
  derived and/or modified sequence
atggccgacaccttcctggagcacctgtgcctgctggacatcgacagcgagcccgtggccgccagaagcaccagcatcatcgccaccatcggccccgccagcagaagcgtggagagactgaaggagatgatcaaggccggcatgaacatcgccagactgaacttcagccacggcagccacgagtaccacgccgagagcatcgccctggacaccaagggccccgagatcagaaccggcatcctgcagggcggccccgagagcgaggtggagctggtgaagggcagccaggtgctggtgaccgtggaccccgccttcagaaccagaggcaacgccaacaccgtgtgggtggactaccccaacatcgtgagagtggtgcccgtgggcggcagaatctacatcgacgacggcctgatcagcctggtggtgcagaagatcggccccgagggcctggtgacccaggtggagaacggcggcgtgctgggcagcagaaagggcgtgaacctgcccggcgcccaggtggacctgcccggcctgagcgagcaggacgtgagagacctgagattcggcgtggagcacggcgtggacatcgtgttcgccagcttcgtgagaaaggccagcgacgtggccgccgtgagagccgccctgggccccgagggccacggcatcaagatcatcagcaagatcgagaaccacgagggcgtgaagagattcgacgagatcctggaggtgagcgacggcatcatggtggccagaggcgacctgggcatcgagatccccgccgagaaggtgttcctggcccagaagatgatgatcggcagatgcaacctggccggcaagcccgtggtgtgcgccacccagatgctggagagcatgatcaccaagcccagacccaccagagccgagaccagcgacgtggccaacgccgtgctggacggcgccgactgcatcatgctgagcggcgagaccgccaagggcaacttccccgtggaggccgtgaagatgcagcacgccatcgccagagaggccgaggccgccgtgtaccacagacagctgttcgaggagctgagaagagccgcccccctgagcagagaccccaccgaggtgaccgccatcggcgccgtggaggccgccttcaagtgctgcgccgccgccatcatcgtgctgaccaccaccggcagaagcgcccagctgctgagcagatacagacccagagccgccgtgatcgccgtgaccagaagcgcccaggccgccagacaggtgcacctgtgcagaggcgtgttccccctgctgtacagagagccccccgaggccatctgggccgacgacgtggacagaagagtgcagttcggcatcgagagcggcaagctgagaggcttcctgagagtgggcgacctggtgatcgtggtgaccggctggagacccggcagcggctacaccaacatcatgagagtgctgagcatcagctag

SEQ ID NO: 344033 - DNA, 378 bp, Artificial Sequence
  derived and/or modified sequence
atgcgggtggtgatggcccggctgctgagcgagggcgagcagggcattccgactgcctgtgcagcttttgctcaacaacccgcaggacctaggcgtggtctagcaggagtgggggagggtggaccacaatgttcttgggtgaattaccgttgtaccctcgagtttcttgtcagcttacttggcacggacctggcgcggggaaggggaaatagtgcgtccggtccaacagcaccggccgacagtaagcagttaatgaattccggctcacccgccagggataacgctccaagccagaggttctgtaccaatctcagtgaggggttaagattcggcataagcccatcttggagggaagctctctatgggtgtcatgcatag

SEQ ID NO: 344034 - protein, 124 aa, Artificial Sequence
  derived and/or modified sequence
MTSQSQGIHQLLQAEKRAKDKLEEAKKKTGTASGKGKRLKQAKEEAMVEIDQYRMQRDKEFRLKQSKIMGSQNNLSDEIEEQTLGKIQELNGHYNKYMESVMNQLLSMVCDMKPEIHVNYRATN

SEQ ID NO: 344035 - DNA, 375 bp, Artificial Sequence
  derived and/or modified sequence
atgaccagccagagccagggcatccaccagctgctgcaggccgagaagagagccaaggacaagctggaggaggccaagaagaagaccggcaccgccagcggcaagggcaagagactgaagcaggccaaggaggaggccatggtggagatcgaccagtacagaatgcagagagacaaggagttcagactgaagcagagcaagatcatgggcagccagaacaacctgagcgacgagatcgaggagcagaccctgggcaagatccaggagctgaacggccactacaacaagtacatggagagcgtgatgaaccagctgctgagcatggtgtgcgacatgaagcccgagatccacgtgaactacagagccaccaactag

SEQ ID NO: 344036 - DNA, 375 bp, Artificial Sequence
  derived and/or modified sequence
atgactagtcagagtcagggaattcaccagctcctccaggcggaaaaacgcgccaaagacaaactggaggaagctaagaagaagacgggcactgcttccggtaaaggcaaaagattgaagcaggctaaggaagaggccatggtagaaatcgaccagtatcgtatgcaacgtgataaggagtttcgattaaagcagtcaaagataatgggctctcagaataacttgagcgatgaaatcgaggaacagacccttggaaaaatccaagagctgaatggacactacaacaaatacatggaatctgttatgaatcagcttctgagcatggtgtgtgacatgaaaccagaaattcatgtcaattatcgagcaacaaactag

SEQ ID NO: 344037 - DNA, 375 bp, Artificial Sequence
  derived and/or modified sequence
atgacttcacagagccaaggaatccatcaacttctccaggccgagaagagagccaaggacaagctcgaagaggctaagaagaagacaggtactgcttccggcaagggaaaaagactgaagcaagccaaggaggaagccatggtggagattgatcagtacagaatgcaaagggataaggagtttagacttaaacaatcaaaaataatgggaagccagaacaatcttagcgacgaaatcgaagagcaaacccttggaaaaatccaggagctcaatggacactacaacaaatacatggaatccgtcatgaaccagctcctgagtatggtctgcgacatgaagcctgagatccacgttaactacagggcaacaaactag

SEQ ID NO: 344038 - DNA, 375 bp, Artificial Sequence
  derived and/or modified sequence
atgaccagccagagccagggcatccaccagctgctgcaggccgagaagagggccaaggacaagctggaggaggccaagaagaagacaggaacagccagcggcaagggcaagaggctgaagcaggccaaggaggaggccatggtggagattgaccagtacaggatgcagagggacaaggagttccggctgaagcagagcaagatcatgggcagccagaacaacctgagtgatgaaattgaggagcagaccctgggcaagatccaggagctgaatggccactacaacaagtacatggagagcgtgatgaaccagctgctgtccatggtgtgtgacatgaagccagagatccacgtgaactaccgggccaccaactag

SEQ ID NO: 344039 - DNA, 375 bp, Artificial Sequence
  derived and/or modified sequence
atgaccagccagagccagggcatccaccagctgctgcaggccgagaaacgggccaaagacaagctggaggaggctaagaagaaaactggcacagcttctggaaaggggaagaggctgaagcaggcaaaggaggaagcaatggttgaaatcgatcagtacagaatgcagagggataaagagtttcgtctcaagcagagtaaaattatggggagtcagaacaatctttcagacgagatcgaggagcagacattaggcaaaatccaagagctgaacggccattacaataaatacatggaaagcgtcatgaatcagctactctctatggtctgcgacatgaaacctgagattcacgtcaattatcgggccaccaattag

SEQ ID NO: 344040 - DNA, 375 bp, Artificial Sequence
  derived and/or modified sequence
atgaccagccagagccagggcatccaccagctgctgcaggccgagaaaagagccaaggacaaactggaagaagctaaaaaaaagactggcaccgcatctgggaaggggaagcggctgaagcaggcaaaagaggaggccatggtggaaatagatcagtaccgtatgcagagagataaggaattccgcctgaaacagtccaaaatcatgggctctcagaacaatctaagcgacgagattgaggagcaaacccttggcaagattcaggagttgaatgggcactataataagtacatggaaagcgtcatgaatcagttactgagtatggtctgcgacatgaaacctgaaatacacgtgaactacagagctaccaactag

SEQ ID NO: 344041 - DNA, 375 bp, Artificial Sequence
  derived and/or modified sequence
atgacgtcccagtctcagggcatacatcaactcctgcaggccgagaaacgggcaaaagataagctcgaggaggccaaaaagaagacgggaaccgcctcaggtaagggcaagcggctcaaacaggcgaaggaggaggcaatggtggaaatcgatcaatacaggatgcagagggacaaagagttccggctgaaacagagcaaaataatggggagccaaaacaacctgtcagacgagatcgaggagcagacactgggcaagatacaggaacttaatgggcactacaataagtacatggagtccgtgatgaatcagctgctttcgatggtctgcgatatgaaacctgaaattcacgtcaactatcgagccaccaattag

SEQ ID NO: 344042 - DNA, 375 bp, Artificial Sequence
  derived and/or modified sequence
atgaccagccagtctcagggtattcaccagcttctgcaagcagagaagagggcgaaagataaactggaggaggctaaaaagaaaacagggacagctagtggaaaaggcaaaagactgaagcaagctaaagaagaggctatggtggaaatcgatcagtaccgcatgcaacgcgacaaggaatttcggcttaagcagagtaagatcatgggaagccaaaacaacttgtctgacgagattgaagagcagaccctcggtaaaatccaagagttgaacggccattacaataagtacatggagtccgtgatgaaccagcttctgtcaatggtgtgcgatatgaaacccgaaatccacgtgaactatagagccacaaactag

SEQ ID NO: 344043 - DNA, 678 bp, Artificial Sequence
  derived and/or modified sequence
tttataagtagatgcaacacctcatttatacctccttatctcatacagaagagctaagattggcagaaatgatttcacagaagccacttgcttggagcagactaccatgacaagccagtctcaggggatccaccagcttcttcaggcagaaaaacgggccaaggacaagctagaggaagccaagaagattctgcatctacttttcctaaaacgaagagactgggactgcttctggaaaaggaaagcgattgaagcaagccaaggaggaagcaatggtagaaattgaccagtacagaatgcagagagataaagagtttcgactaaaacaatctaagataatgggctctcagaataatctctcagatgaaatagaagaacaaacactagggaagatacaagaacttaatggacactacaataagtatatggaaagtgtgatgaaccagctcttgagcatggtctgtgacatgaaaccagaaatccatgtgaactacagagccaccaactaaatgtacatcacagttttcaagaaaaaaaaaggtgtgtgagtgccacctggttgcttatggcttcgtatttttatgttgagaaatttgaaatgagaaccttaaatttacatttacaggaaatgtgacataactcatacatcggcactgaattaaacaaaacaaaatacaa

SEQ ID NO: 344044 - DNA, 646 bp, Artificial Sequence
  derived and/or modified sequence
tttataagtagatgcaacacctcatttatacctccttatctcatacagaagagctaagattggcagaaatgatttcacagaagccacttgcttggagcagactaccatgacaagccagtctcaggggatccaccagcttcttcaggcagaaaaacgggccaaggacaagctagaggaagccaagaagaagactgggactgcttctggaaaaggaaagcgattgaagcaagccaaggaggaagcaatggtagaaattgaccagtacagaatgcagagagataaagagtttcgactaaaacaatctaagataatgggctctcagaataatctctcagatgaaatagaagaacaaacactagggaagatacaagaacttaatggacactacaataagtatatggaaagtgtgatgaaccagctcttgagcatggtctgtgacatgaaaccagaaatccatgtgaactacagagccaccaactaaatgtacatcacagttttcaagaaaaaaaaaggtgtgtgagtgccacctggttgcttatggcttcgtatttttatgttgagaaatttgaaatgagaaccttaaatttacatttacaggaaatgtgacataactcatacatcggcactgaattaaacaaaacaaaat

SEQ ID NO: 344045 - DNA, 449 bp, Artificial Sequence
  derived and/or modified sequence
gccacttgcttggagcagactaccatgacaagccagtctcaggggatccaccagcttcttcaggcagaaaaacgggccaaggacaagctagaggaagccaagaagaagactgggactgcttctggaaaaggaaagcgattgaagcaagccaaggaggaagcaatggtagaaattgaccagtacagaatgcagagagataaagagtttcgactaaaacaatctaagataatgggctctcagaataatctctcagatgaaatagaagaacaaacactagggaagatacaagaacttaatggacactacaataagtatatggaaagtgtgatgaaccagctcttgagcatggtctgtgacatgaaaccagaaatccatgtgaactacagagccaccaactaaatgtacatcacagttttcaagaaaaaaaaaggtgtgtgagtgccacctgg

SEQ ID NO: 344046 - protein, 59 aa, Artificial Sequence
  derived and/or modified sequence
MTSQSQGIHQLLQAEKRAKDKLEEAKKILHLLFLKRRDWDCFWKRKAIEASQGGSNGRN

SEQ ID NO: 344047 - DNA, 180 bp, Artificial Sequence
  derived and/or modified sequence
atgaccagccagagccagggcatccaccagctgctgcaggccgagaagagagccaaggacaagctggaggaggccaagaagatcctgcacctgctgttcctgaagagaagagactgggactgcttctggaagagaaaggccatcgaggccagccagggcggcagcaacggcagaaactag

SEQ ID NO: 344048 - DNA, 180 bp, Artificial Sequence
  derived and/or modified sequence
atgacctcacaatcacagggcattcatcagcttctgcaagcagagaagcgggcaaaagataagttggaggaggcaaagaagattttgcacctgttatttcttaagcggcgggactgggactgtttctggaagcgaaaggcgatcgaagccagtcagggaggttccaacggcaggaactag

SEQ ID NO: 344049 - DNA, 180 bp, Artificial Sequence
  derived and/or modified sequence
atgaccagccagagccagggcatccaccagctgctgcaggccgagaagagggccaaggacaagctggaggaggccaagaagatcctgcacctgctcttcctgaagaggcgggactgggactgcttctggaagaggaaggccatcgaggccagccagggcggcagcaatggaagaaattag

SEQ ID NO: 344050 - DNA, 180 bp, Artificial Sequence
  derived and/or modified sequence
atgaccagccagagccagggcatccaccagctgctgcaggccgagaaaagggctaaggataagttggaggaagccaaaaaaattctccacctcctttttcttaagagacgagactgggactgtttttggaaaaggaaagcgatagaggcttcgcagggcggctcaaatgggcgcaattag

SEQ ID NO: 344051 - DNA, 180 bp, Artificial Sequence
  derived and/or modified sequence
atgacaagccagtcacagggcatccatcagcttctgcaagcagagaagcgcgctaaggacaaactggaagaagctaagaagatcttgcacctactgttccttaagcgcagggactgggattgcttctggaagcgtaaagccattgaggctagtcagggtgggtcaaacggtcgcaactag

SEQ ID NO: 344052 - protein, 115 aa, Artificial Sequence
  derived and/or modified sequence
MVEDELALFDKSINEFWNKFKSTDTSCQMAGLRDTYKDSIKAFAEKLSVKLKEEERMVEMFLEYQNQISRQNKLIQEKKDNLLKLIAEVKGKKQELEVLTANIQDLKEEYSRKKE

SEQ ID NO: 344053 - DNA, 348 bp, Artificial Sequence
  derived and/or modified sequence
atggtggaggacgagctggccctgttcgacaagagcatcaacgagttctggaacaagttcaagagcaccgacaccagctgccagatggccggcctgagagacacctacaaggacagcatcaaggccttcgccgagaagctgagcgtgaagctgaaggaggaggagagaatggtggagatgttcctggagtaccagaaccagatcagcagacagaacaagctgatccaggagaagaaggacaacctgctgaagctgatcgccgaggtgaagggcaagaagcaggagctggaggtgctgaccgccaacatccaggacctgaaggaggagtacagcagaaagaaggagtag

SEQ ID NO: 344054 - DNA, 348 bp, Artificial Sequence
  derived and/or modified sequence
atggtcgaggacgagcttgccctctttgacaaaagcattaacgaattttggaacaagttcaaatcaaccgatacttcctgtcaaatggccggattaagagatacttacaaggattctattaaggcctttgctgagaaactgagcgttaaactgaaggaggaggaaagaatggtcgagatgttcttggagtaccagaaccagatctcaaggcagaataagctgattcaggagaaaaaagacaacctgctgaaactaatagctgaagtgaagggtaagaagcaggagctagaggtcttgaccgcgaatatccaggatcttaaggaggagtactcaagaaaaaaggagtag

SEQ ID NO: 344055 - DNA, 348 bp, Artificial Sequence
  derived and/or modified sequence
atggtggaggatgagctggccctgtttgacaagagcatcaatgagttctggaacaagttcaagagcacagacaccagctgccagatggccggcctgcgggacacctacaaggacagcatcaaggcctttgctgagaagctgtctgtgaagctgaaggaggaggagaggatggtggagatgttcctggagtaccagaaccagatcagccggcagaacaagctgatccaggagaagaaggacaacctgctgaagctgattgctgaggtgaagggcaagaagcaggagctggaggtgctgacagccaacatccaggacctgaaggaggagtacagcaggaagaaggagtag

SEQ ID NO: 344056 - DNA, 348 bp, Artificial Sequence
  derived and/or modified sequence
atggtggaggacgagctggccctgttcgacaagagcatcaacgagttctggaacaagtttaagagtaccgacacctcctgccagatggcaggtctgcgtgatacctataaagactccatcaaagccttcgctgaaaagctctctgttaagttgaaagaagaggaaagaatggtcgagatgttcttagaataccagaatcagatcagcagacagaacaaactgatacaggagaagaaggacaacctgctgaagttgatcgccgaagtaaaagggaaaaagcaggaactggaggtcctgaccgccaatattcaagatttaaaggaggaatattcccggaagaaggaatag

SEQ ID NO: 344057 - DNA, 348 bp, Artificial Sequence
  derived and/or modified sequence
atggtggaggacgaattagccctgttcgacaaaagtatcaatgagttttggaataagtttaaatcaactgatacatcatgtcaaatggccggattacgcgacacctataaagacagcattaaagcattcgccgagaaactctcagtcaagctgaaggaagaggaacgcatggtagagatgttcctggagtatcaaaatcaaatcagtcgccagaataagctcatccaggagaagaaagacaacctgctcaaactgattgcggaagtcaaagggaaaaagcaggagctggaggttctgaccgcaaatattcaggacctaaaggaggaatactcacggaagaaggaatag

SEQ ID NO: 344058 - DNA, 596 bp, Artificial Sequence
  derived and/or modified sequence
agacaaagcctgaatcctggaaaaagccaactctttgaacaggaattagagtgtgatcggctcagttgacgtacagggaaacctttatttgaagccgataaatgacttgtcgtgggcgagcccttcgggtgctattaatactttcgggtcacagcggagactctggctgttgttcagaaaagaactacgaatcccagaatgccctgttcccccattttcccctcgagaatccaaggcattgtcctacataatggtagaggacgaactggcacttttcgataaaagcataaatgaattttggaataaattcaaaagtacggacacctcctgtcagatggcgggactaagagatacctacaaggattccatcaaagcatttgcagaaaagctgtctgtgaaattaaaggaagaagaacgaatggttgagatgtttctggaatatcaaaatcagatcagcaggcaaaataagctcattcaagaaaaaaaggataacttgttaaaattgattgctgaagtaaaaggcaaaaagcaggaattggaagtactgactgcaaatatccaggatcttaaggaagaatattctaggaagaaggaaa

SEQ ID NO: 344059 - protein, 21 aa, Artificial Sequence
  derived and/or modified sequence
MNQVTDWVDPSFDDFLECSGV

SEQ ID NO: 344060 - protein, 670 aa, Artificial Sequence
  derived and/or modified sequence
MNQVTDWVDPSFDDFLECSGVSTITATSLGVNNSSHRRKNGPSTLESSRFPARKRGNLSSLEQIYGLENSKEYLSENEPWVDKYKPETQHELAVHKKKIEEVETWLKAQVLERQPKQGGSILLITGPPGCGKTTTLKILSKEHGIQVQEWINPVLPDFQKDDFKGMFNTESSFHMFPYQSQIAVFKEFLLRATKYNKLQMLGDDLRTDKKIILVEDLPNQFYRDSHTLHEVLRKYVRIGRCPLIFIISDSLSGDNNQRLLFPKEIQEECSISNISFNPVAPTIMMKFLNRIVTIEANKNGGKITVPDKTSLELLCQGCSGDIRSAINSLQFSSSKGENNLRPRKKGMSLKSDAVLSKSKRRKKPDRVFENQEVQAIGGKDVSLFLFRALGKILYCKRASLTELDSPRLPSHLSEYERDTLLVEPEEVVEMSHMPGDLFNLYLHQNYIDFFMEIDDIVRASEFLSFADILSGDWNTRSLLREYSTSIATRGVMHSNKARGYAHCQGGGSSFRPLHKPQWFLINKKYRENCLAAKALFPDFCLPALCRQTQLLPYLALLTIPMRNQAQISFIQDIGRLPLKRHFGRLKMEALTDREHGMIDPDSGDEAQLNGGHSAEESLGEPTQATVPETWSLPLSQNSASELPASQPQPFSAQGDMEENIIIEDYESDGT

SEQ ID NO: 344061 - DNA, 2013 bp, Artificial Sequence
  derived and/or modified sequence
atgaaccaggtgaccgactgggtggaccccagcttcgacgacttcctggagtgcagcggcgtgagcaccatcaccgccaccagcctgggcgtgaacaacagcagccacagaagaaagaacggccccagcaccctggagagcagcagattccccgccagaaagagaggcaacctgagcagcctggagcagatctacggcctggagaacagcaaggagtacctgagcgagaacgagccctgggtggacaagtacaagcccgagacccagcacgagctggccgtgcacaagaagaagatcgaggaggtggagacctggctgaaggcccaggtgctggagagacagcccaagcagggcggcagcatcctgctgatcaccggcccccccggctgcggcaagaccaccaccctgaagatcctgagcaaggagcacggcatccaggtgcaggagtggatcaaccccgtgctgcccgacttccagaaggacgacttcaagggcatgttcaacaccgagagcagcttccacatgttcccctaccagagccagatcgccgtgttcaaggagttcctgctgagagccaccaagtacaacaagctgcagatgctgggcgacgacctgagaaccgacaagaagatcatcctggtggaggacctgcccaaccagttctacagagacagccacaccctgcacgaggtgctgagaaagtacgtgagaatcggcagatgccccctgatcttcatcatcagcgacagcctgagcggcgacaacaaccagagactgctgttccccaaggagatccaggaggagtgcagcatcagcaacatcagcttcaaccccgtggcccccaccatcatgatgaagttcctgaacagaatcgtgaccatcgaggccaacaagaacggcggcaagatcaccgtgcccgacaagaccagcctggagctgctgtgccagggctgcagcggcgacatcagaagcgccatcaacagcctgcagttcagcagcagcaagggcgagaacaacctgagacccagaaagaagggcatgagcctgaagagcgacgccgtgctgagcaagagcaagagaagaaagaagcccgacagagtgttcgagaaccaggaggtgcaggccatcggcggcaaggacgtgagcctgttcctgttcagagccctgggcaagatcctgtactgcaagagagccagcctgaccgagctggacagccccagactgcccagccacctgagcgagtacgagagagacaccctgctggtggagcccgaggaggtggtggagatgagccacatgcccggcgacctgttcaacctgtacctgcaccagaactacatcgacttcttcatggagatcgacgacatcgtgagagccagcgagttcctgagcttcgccgacatcctgagcggcgactggaacaccagaagcctgctgagagagtacagcaccagcatcgccaccagaggcgtgatgcacagcaacaaggccagaggctacgcccactgccagggcggcggcagcagcttcagacccctgcacaagccccagtggttcctgatcaacaagaagtacagagagaactgcctggccgccaaggccctgttccccgacttctgcctgcccgccctgtgcagacagacccagctgctgccctacctggccctgctgaccatccccatgagaaaccaggcccagatcagcttcatccaggacatcggcagactgcccctgaagagacacttcggcagactgaagatggaggccctgaccgacagagagcacggcatgatcgaccccgacagcggcgacgaggcccagctgaacggcggccacagcgccgaggagagcctgggcgagcccacccaggccaccgtgcccgagacctggagcctgcccctgagccagaacagcgccagcgagctgcccgccagccagccccagcccttcagcgcccagggcgacatggaggagaacatcatcatcgaggactacgagagcgacggcacctag

SEQ ID NO: 344062 - DNA, 2013 bp, Artificial Sequence
  derived and/or modified sequence
atgaaccaggtgactgactgggtggatccctcttttgacgactttcttgagtgtagtggtgtgtcaactattaccgctactagtctcggcgttaacaatagctcacaccggcgtaaaaacggaccctctaccttggagtcatccaggttccccgctcgtaagagagggaacctgtctagcctggagcaaatttacgggctggagaattctaaagagtatctgtcggaaaacgaaccatgggttgataagtacaagcccgagacacagcatgaactggctgttcataagaagaagatcgaagaggtggaaacatggcttaaggcccaggtgctcgagaggcagcccaagcagggggggagcattctgctaattacgggccctccggggtgcggcaagacgacaactctgaaaattctgtccaaagagcacggcatacaggtgcaggaatggatcaaccccgttctgccagatttccagaaagacgactttaaaggaatgttcaacaccgaaagtagcttccacatgtttccatatcagagtcagatcgccgtcttcaaggaatttctactgcgagcaacgaaatacaataaactgcagatgttaggggatgatctccggactgacaaaaagattatactggtcgaggatttaccaaatcagttctacagggattcccacaccctgcatgaagtgctgcgtaagtacgttagaatcgggcgctgccccctcatattcattatttcagacagtctttcaggagacaacaaccagcggctgctgtttcccaaggagatccaggaggagtgtagcatatctaatatctcatttaatcccgtggcccccacaattatgatgaagtttctgaaccgcattgtaacaatcgaagccaataaaaacggggggaaaataactgtgcctgacaaaaccagtctggagttgctatgtcagggctgttccggagatataagaagcgccattaattcacttcagttctcctcatctaagggtgaaaataacctgaggccaagaaaaaaagggatgagcctcaagtctgatgccgtgctgagcaagtcgaagcggcgcaagaaaccagaccgcgtttttgaaaaccaggaagtacaggccatcggcggaaaagacgtgagcctattcctgttccgggcactggggaaaatcctgtactgtaaaagggcaagcctcacagaactggattccccgcgcctgccttcccatctgtcggaatatgaacgggacactctgctggttgaacccgaggaagttgtcgagatgtcacatatgccaggcgatctgttcaacttgtatctgcatcagaattatatagatttttttatggagatagacgatattgtgagggcctcagaattcctgagctttgctgacatcctgagcggcgattggaacacccgcagcttactgagggaatactccacatccatcgccacgagaggggtgatgcattctaataaggcaagaggctacgcccactgccagggcggaggttcttccttccggccactgcataaaccacaatggttcctgataaacaagaaatatcgcgagaattgtctggcagctaaggcccttttccccgacttctgtctccccgccctatgtaggcagactcagctcctaccatacttagcactgctcaccatacccatgcggaaccaggcccagatcagctttatacaggatattggtcgtctgcctttaaaaaggcatttcgggcgtctgaagatggaggcccttacagaccgcgaacacggcatgatcgatcccgacagtggtgacgaggcgcaactcaacggcgggcatagcgcagaggagtccttaggggagcccacccaggccacagtccccgagacttggtccctccccctgtcccagaactccgcctccgaattaccagcctcccagccacagccatttagtgcccagggtgatatggaggaaaacattatcatcgaagattacgaatccgacggaacctag

SEQ ID NO: 344063 - DNA, 2013 bp, Artificial Sequence
  derived and/or modified sequence
atgaaccaggtcaccgattgggtggatcctagcttcgatgacttcctggagtgtagtggcgtcagtacgattacagcaaccagtctcggcgtgaacaacagctcccacaggcgcaagaatggcccttcaacactggaaagctcacggttccccgccagaaaaaggggcaatctgagctccctcgagcagatttatggactggagaatagcaaggagtacctgtctgagaacgagccctgggttgataagtataaacctgagactcagcatgagctggccgtccacaagaagaaaattgaggaagttgagacctggcttaaggcccaagtcttagaacggcaaccaaaacaggggggctccatactcttgatcaccgggccgccaggctgtggaaagacaactactttaaagattctcagcaaggagcacggcatccaggtacaagagtggattaacccagtccttccggacttccagaaagatgatttcaaaggcatgtttaatacagagagcagctttcatatgttcccctatcaatctcagattgctgttttcaaagagttcctcttgagagctaccaaatataataaactccagatgctgggggacgacctgcgtactgataagaagataatccttgtggaggatctcccaaatcagttttaccgggatagccacacactacatgaggtgcttaggaagtatgtccgtatcggacgatgccccctgatattcatcatctctgactcattaagcggagacaataaccagagattactgtttcctaaagaaatccaggaggagtgtagtatttcgaatatctcctttaacccagtcgcccccactatcatgatgaagttccttaaccggatagtgacgatcgaggccaacaaaaacggcggaaagatcacagtgccagataagacctccttagagttgctttgtcagggatgttcaggggacatccggtctgctattaattcactccagttctcgtcttctaagggtgagaataatctgcgccctaggaaaaaagggatgagcctaaagagtgacgcagtgctttccaagagcaagaggagaaaaaaacccgatagggtcttcgagaaccaagaggtccaggcaatcggaggcaaagatgtgtcccttttcctgttccgagccctggggaagattctttattgtaagagagcgagccttaccgagcttgattccccccgacttccctcccacctctcggagtacgaacgggacactctgcttgtggaacccgaggaagtcgtcgaaatgtcgcatatgccaggtgatctcttcaatctgtacctgcatcagaattatattgatttctttatggaaattgatgacatcgtacgggcctctgagttcctctcttttgccgatatccttagcggcgactggaatacgcggtccctgctgcgggagtattctacaagcattgccacccgaggcgtgatgcatagtaataaggcgaggggatatgcgcattgtcagggaggaggtagttcatttagacctctgcacaaaccgcagtggtttctcatcaacaagaagtatcgagagaactgccttgccgctaaggccctatttccagatttttgtcttccagcactttgtcgccagacccagctgcttccatacctcgcgctcttaaccatccctatgagaaaccaggcgcagattagctttattcaggacatcgggaggttgcctctgaaacggcactttggcaggttgaagatggaggctttgaccgacagagagcatgggatgattgatccagatagtggagacgaagcgcaattgaacggcggccattccgccgaggaatcactcggcgagcccactcaggctactgtacctgaaacgtggtccttaccactgtctcagaattccgcgtccgagttacctgcaagtcagccccagccgttctcagcccagggagacatggaggagaatatcataattgaggactatgagagcgatggcacctag

SEQ ID NO: 344064 - DNA, 2013 bp, Artificial Sequence
  derived and/or modified sequence
atgaatcaggttacggactgggtggatccctctttcgacgattttttggaatgcagcggagtttcaacaatcaccgcaacctcgctgggtgttaataacagttcacaccgccgtaaaaatggtcctagtacgctcgaaagttcccggtttccagcacgtaagcggggcaatctttcaagtttagagcagatctacgggctagaaaactcgaaagaatacttatctgaaaatgagccttgggtcgataagtacaaaccagagacacaacatgagctagccgtccacaaaaaaaaaattgaggaagtggaaacctggctgaaagcgcaggtattagaaaggcagccaaaacagggcgggagcattttactgatcaccggcccaccagggtgtggtaagaccactactctgaagatcctgagtaaggaacacggaatccaggtgcaggaatggatcaaccctgtgcttcccgatttccaaaaggatgacttcaagggcatgttcaatactgaaagctcatttcacatgttcccctaccagtctcagattgccgtgtttaaagaattcctgctgcgcgcaaccaaatacaataagctccagatgctgggtgacgatctacggaccgataagaagatcatcttggtggaagacctgcccaatcaattctacagagattcccacaccctgcatgaagtgctgaggaaatatgtccgcattggccgttgcccgctaattttcatcatttccgattccctgtcaggtgacaataatcaacgcctcctcttccctaaagaaatccaggaggaatgtagtatttccaacatcagttttaaccctgttgctcctactatcatgatgaaattcctcaaccgtattgtgaccattgaggcaaacaagaatgggggtaagattactgttccagacaagacttctctcgagcttctttgccagggatgctccggagatatccggtccgccatcaattccctccagtttagctcgagtaaaggagagaataacttaaggcccagaaaaaaagggatgtccctgaaatctgatgccgtgctgtcaaaatccaagaggagaaaaaagccagacagggtgttcgaaaatcaagaggtgcaagctattggtggaaaagatgtgtcgcttttccttttcagggcactgggcaagattctgtactgtaaaagggcgtctctaacggaactcgactcacctcgcctgccatctcacctgtccgagtatgaaagggatacgctactggtcgaacccgaggaagtggttgaaatgagccatatgccaggggatcttttcaacctctatctgcatcagaactacatcgacttttttatggaaattgatgatattgtcagagccagtgaattcctctcatttgcagacatcttgtcaggggactggaacacacggagcctactgagagagtactccacatctatcgcaacccgcggcgtcatgcattcaaataaagctcggggctacgcccactgtcaaggtggtgggtcatcattccgccccctgcacaagccccagtggtttcttattaacaagaaatacagagaaaattgcttagctgctaaggccctattccctgatttctgcctgccagccctctgtcgccaaacccagctcctgccgtacctggctctgctgacaattcctatgcgaaatcaggctcaaatctcatttatacaggatattggccgactgcctctcaagcgccacttcggtcgtctgaaaatggaagcactgactgatagggagcacggcatgatagaccccgacagcggcgatgaggcgcagcttaacggaggacacagtgccgaggagtcacttggagaaccgacgcaggctacagtgcctgagacctggagcctacctctgtcccaaaattccgcctccgagttgccggcctctcagccacagcccttctccgctcagggtgatatggaagagaatattattatcgaagattatgagagtgatgggacctag

SEQ ID NO: 344065 - DNA, 2013 bp, Artificial Sequence
  derived and/or modified sequence
atgaaccaggtgacagactgggtggaccccagctttgatgacttcctggagtgcagcggcgtgtccaccatcacagccaccagcctgggcgtgaacaacagcagccacaggaggaagaatggccccagcaccctggagagcagccgcttccctgccaggaagaggggcaacctgagcagcctggagcagatctacggcctggagaacagcaaggagtacctgtctgaaaatgagccctgggtggacaagtacaagccagagacccagcacgagctggccgtgcacaagaagaagattgaggaggtggagacctggctgaaggcccaggtgctggagcggcagcccaagcagggcggcagcatcctgctgatcactggacctcctggctgtgggaagaccaccaccctgaagatcctgagcaaggagcacggcatccaggtgcaggagtggatcaaccctgtgctgcctgacttccagaaggatgacttcaagggcatgttcaacacagagagcagcttccacatgttcccctaccagagccagattgctgtgttcaaggagttcctgctgcgggccaccaagtacaacaagctgcagatgctgggagatgacctgaggacagacaagaagatcatcctggtggaggacctgcccaaccagttctacagagacagccacaccctgcacgaggtgctgaggaaatatgtgcgcatcggccgctgccccctcatcttcatcatcagtgacagcctgagcggggacaacaaccagaggctgctcttccccaaggagatccaggaggagtgcagcatcagcaacatctccttcaaccctgtggcccccaccatcatgatgaagttcctgaacagaattgtgaccatcgaggccaacaagaatggaggcaagatcaccgtgcctgacaagaccagcctggagctgctgtgccagggctgcagcggggacatccgcagcgccatcaacagcctgcagttcagcagcagcaaaggagagaacaacctgcggcccaggaagaagggcatgagcctgaagagtgatgctgtgctgagcaagagcaagaggaggaagaagccagacagagtgtttgagaaccaggaggtgcaggccatcggcggcaaggatgtgtccctcttcctgttccgggccctgggcaagatcctgtactgcaagagggccagcctgacagagctggacagcccccggctgcccagccacctgtctgaatatgagcgggacaccctgctggtggagcctgaggaggtggtggagatgagccacatgcctggggacctcttcaacctgtacctgcaccagaactacatcgacttcttcatggagattgatgacatcgtgcgggccagcgagttcctgagctttgctgacatcctgagcggggactggaacaccaggagcctgctgcgggagtacagcaccagcatcgccacccggggcgtgatgcacagcaacaaggcccggggctacgcccactgccagggcggcggcagcagcttccggcccctgcacaagccccagtggttcctgatcaacaagaagtaccgggagaactgcctggccgccaaggccctcttcccagacttctgcctgcctgccctgtgccggcagacccagctgctgccctacctggccctgctgaccatccccatgaggaaccaggcccagatctccttcatccaggacatcggccgcctgcccctgaagaggcacttcggccgcctgaagatggaggccctgacagaccgggagcacggcatgattgatcctgacagcggagatgaggcccagctgaatggaggccacagcgctgaggagagcctgggggagcccacccaggccaccgtgcctgagacctggagcctgcccctgagccagaacagcgccagcgagctgcctgccagccagccccagcccttcagcgcccagggcgacatggaggagaacatcatcattgaagattatgaaagtgatggcacctag

SEQ ID NO: 344066 - DNA, 2013 bp, Artificial Sequence
  derived and/or modified sequence
atgaaccaggtgaccgactgggtggaccccagcttcgacgacttcctggagtgttccggtgtgagcaccatcactgccacctccttaggtgtgaacaattcgtctcaccggcgtaagaacggcccttccacactggagagtagccgatttccagcccggaaaagaggcaatctaagttcgttggagcagatatatgggctggaaaacagcaaggaatatctgagcgagaatgaaccatgggtggataagtataagcccgagacccagcacgagctcgccgtgcacaagaagaagatcgaagaagtggagacttggctgaaggcccaggtgctggagagacaaccaaagcaaggagggtccattcttctcataaccggtccccccgggtgtggcaagaccacgacccttaaaatcttatccaaagagcacggtatccaagtgcaggaatggatcaaccccgtgctgcctgacttccagaaggacgatttcaagggaatgtttaataccgaaagtagtttccatatgtttccttatcaatcccagatcgccgtgtttaaggagtttctcctgcgggctaccaagtacaataaactacaaatgctgggagacgacctacgaacggataagaaaattatcctggttgaggatcttcctaaccagttctaccgggatagtcatacccttcacgaggtgcttagaaagtacgtgaggatcggtagatgccccctgatcttcatcatttcggactccctgtcaggtgacaacaatcagaggctgctgttcccgaaggagattcaagaagagtgtagtatttcaaacatctccttcaaccccgtagctccgacaattatgatgaagttcctcaaccgcatagtcaccatcgaggcgaacaagaatggcggcaaaatcaccgtgccagacaaaacttccctggaactgctctgccagggctgttccggggatattcggagcgcaatcaatagcttacagtttagcagttccaagggggaaaataaccttcgcccacgaaagaagggtatgtcacttaagtccgacgctgtgctgagcaagtccaaaagacgcaagaagcctgatcgcgtgtttgagaatcaggaggtacaagctatcggcggaaaagatgtgtcgctatttctgtttagggcgttgggcaaaattctgtattgcaagagggcctccctcactgaactggattctcctaggttgcctagtcacctgagtgagtacgaacgcgatacacttctggtggagccggaagaagtggtggaaatgtcgcatatgcctggagacttatttaacctatacctccaccagaactacattgatttctttatggaaattgacgatatcgttcgcgcctctgagtttctgagcttcgcagacatcctctcgggtgactggaacactcgcagtttgttgagagagtactcgaccagtattgccacgcggggggttatgcactcaaacaaggcacgtggttatgcccactgtcagggaggaggctccagcttccgtccccttcacaaaccccaatggttccttataaataagaaatatagagagaactgtctagcggcgaaggccttgttcccagacttctgtcttccagccctctgtagacaaacccaactgttgccttatctggccctgctgacaatcccaatgaggaaccaagcacagatttcatttatccaagacatagggagactgcctctgaagagacattttggcagactgaagatggaggccttgacagatcgggaacacggtatgatcgaccctgattcaggggacgaagctcagctgaacggtggccacagtgccgaggagtccttgggcgaacccacacaagcgactgttccagagacatggagtcttcccctgtcacaaaactccgcaagtgaattacccgccagccagccacagcccttctccgcccagggggacatggaagagaacatcatcattgaggattacgagagcgatggcacttag

SEQ ID NO: 344067 - DNA, 2013 bp, Artificial Sequence
  derived and/or modified sequence
atgaaccaggtgaccgactgggtggaccccagcttcgacgacttccttgagtgttctggtgttagtaccatcaccgccacatccctcggtgtcaacaacagcagccacaggaggaagaacgggccaagtacactggagtccagtcggtttcctgcccggaaacgaggaaacctgagctcgctcgagcagatctatgggctcgaaaatagtaaagagtacctgagtgagaacgagccttgggtggacaagtacaagcctgagacacagcacgagctagctgtgcacaagaaaaagattgaggaggtagagacctggctgaaggcccaagtgctagagcgccagcctaaacagggcggttctattctacttattacaggtcccccaggatgtggtaagacgaccaccctgaaaatcttaagcaaagaacatggcatccaagtccaggaatggatcaatccagtgctccctgattttcagaaagacgacttcaaaggcatgtttaatacagagtcctcattccacatgtttccctaccagagccagatcgcagtgtttaaagagtttctactgcgggccacgaaatataacaaactgcagatgctcggggacgaccttcgaacagacaagaagattatcttagttgaagatctgccaaatcagttctacagggatagtcacactcttcatgaggtgctccggaaatacgtccggatcggcagatgtcccctgatctttattatatctgatagtctctccggggataataaccagcggctcctgtttccaaaagagatacaggaggagtgtagcattagcaatattagcttcaatcctgtggctccaaccataatgatgaagttcctcaatcgaatagtaacaattgaggccaataaaaacggaggcaagataacagtaccagacaagacaagcctggaactgctctgccaggggtgctcaggcgacatcaggtccgcgattaattcgctccagttttcttctagcaaaggtgagaataacctgcgccctagaaaaaagggcatgtctttgaaatcggatgccgtgctgtccaagtctaagagacggaaaaaaccagatagggtttttgaaaaccaggaggtacaagccattgggggcaaggatgtcagccttttcctgtttcgtgccctgggcaaaatattgtactgtaaacgagcctctctgacagaactagacagccccagactcccgagccatctctccgagtacgagagggatacactgctggttgaacctgaagaagttgttgaaatgtcccatatgcccggtgacttgttcaatttgtacttacaccagaattacatagatttctttatggaaattgacgatattgtacgggcatcagaatttctgtcctttgccgatattttaagcggggactggaataccagatccctgctgagggaatactctacatctattgcgactcgtggtgtcatgcactccaataaagcccgaggctatgcccactgccagggaggaggatccagcttccgacctctgcataagcctcagtggttcctgattaataaaaagtaccgcgagaactgcttggccgcaaaggccttgtttccagatttctgcctgcctgctctctgcagacagactcaactgttgccttacctggcactactaacgatccccatgcggaatcaggcccaaattagttttattcaggacattgggaggcttcccctgaagcgccattttgggcgcttgaaaatggaagcacttacagatcgggaacacggaatgatcgacccagactcgggcgacgaggcacagcttaatggaggtcactctgctgaggaaagcctgggtgagccaacccaggcaaccgtccctgaaacatggtcactgcccttgtctcagaattccgcgtccgaactccccgcatctcagccccagccattctccgcacagggagatatggaagagaacatcattattgaagactatgaatctgacggtacctag

SEQ ID NO: 344068 - DNA, 2013 bp, Artificial Sequence
  derived and/or modified sequence
atgaaccaggtgaccgactgggtggaccccagcttcgacgacttcctagagtgtagcggggtatcaaccattaccgctacatccttgggggtcaacaattcttcccacagacggaaaaacgggccctccacattagagagttctcggtttccagccagaaagagagggaatttgtcaagcctggagcagatctacggtctagaaaactctaaggaatacctttccgaaaatgagccctgggttgacaagtataaacccgagacccaacacgaacttgcagttcacaaaaaaaagatcgaggaagtcgagacatggctgaaggcacaggtgctggaaaggcaaccgaaacagggtgggtccatactgctaattacaggcccacccggctgcggtaagacaaccaccttgaaaatattgtctaaggagcacggtatccaggtccaagaatggatcaatcccgtgttgcccgattttcaaaaagatgactttaaaggcatgttcaataccgagagttcattccatatgtttccttatcaatcccagatcgccgtgtttaaagagtttctcctccgcgcgaccaagtacaataaattacagatgcttggagacgacctgagaaccgataaaaaaataattctggttgaagatctgccgaatcaattttacagagattctcacacactccatgaggtgcttagaaaatatgttcgaataggtcggtgtcccttaattttcattattagtgattcccttagtggcgataataatcagcggctgctttttccaaaagagatacaagaggagtgctctatttccaacatttcttttaaccccgttgcccccactatcatgatgaaatttctgaatcggatagttactatagaggcgaataaaaatggcggtaaaatcactgttcccgacaaaacatcactcgagctgctgtgccagggctgctctggggatatccgctccgcgattaactcccttcagtttagctcatccaaaggggagaacaatctgcgaccgaggaaaaagggcatgtcattgaagtcggacgctgtgctgtctaaaagcaagcgtcgtaagaagcccgacagggtttttgagaaccaggaagtgcaggcaattggaggtaaggatgtaagcttattcctgtttagggcgttaggaaagattctgtattgcaagagggccagcctgacagagctcgacagcccccgccttccttctcatctgtcagagtatgagcgagacaccctcctcgtcgagcccgaggaggtcgttgagatgagccacatgccgggggatctgttcaacctgtacctccaccagaattatatagacttcttcatggaaatagacgatattgtaagagcttctgagtttctgtcttttgccgatatattgagtggtgactggaatactcgctccctgctgagagaatactctacttctatcgcaacccgcggtgtgatgcatagtaacaaggcgcgcggctacgcccattgccaggggggcggaagctcattccggccactgcataagccccaatggttccttatcaataagaagtacagggagaattgccttgctgccaaagctcttttccccgacttttgtctgccagcgctgtgtcgccaaacccaactccttccctacctagcgctcttaactatccccatgcgcaatcaggcgcaaatcagcttcattcaggacatcggccgcctgcccctgaaacgccacttcggtcgcctcaagatggaggccttaacagaccgcgaacatggcatgattgacccagacagcggtgatgaggcacagctgaatggtggccactctgccgaggaatccctcggcgagcccacgcaagctacagtgcctgagacatggtcattacccctctcacagaattcggcatccgagttgccggcgtctcagccgcaaccttttagcgcccagggggatatggaagagaacattataatcgaggattacgagtcggacggcacatag

SEQ ID NO: 344069 - DNA, 2013 bp, Artificial Sequence
  derived and/or modified sequence
atgaaccaggtgaccgactgggttgatccctcctttgacgactttttagaatgctccggcgtaagcacgataactgccacctcattgggagttaataactccagccaccgcagaaagaacggaccctccactttggagagtagtaggttccctgctcggaagagaggtaacctgtcaagcttagagcagatatatggcctggagaattcgaaggaatacctgtctgagaacgaaccatgggtcgacaaatacaagccggaaacccagcatgaactggccgtccacaaaaagaagattgaggaggttgaaacctggctaaaagcccaggtgctcgagcgccagcccaaacagggaggaagtattctcctgatcaccgggcctcctggctgtggcaagaccacgacgttaaagattctgtccaaagagcacgggatacaggttcaggagtggattaacccggtgctccccgacttccagaaggatgacttcaaaggcatgttcaataccgaatcaagctttcatatgtttccctaccagtctcagattgccgtgttcaaggagtttcttctgcgggctactaaatacaacaaattgcagatgctgggcgatgatttgagaacggacaaaaaaattatccttgtagaagacttaccaaaccaattttatcgagattcacacacacttcacgaggtgctcaggaagtatgtacggatcgggagatgccctctgatcttcatcatcagcgatagcctctccggcgataacaatcagagactcctcttccccaaagaaatacaagaggagtgttccatctccaacatctcttttaatccagtggcccctacaattatgatgaagtttctcaatagaattgtgacgatagaagcaaacaaaaatggaggaaagataactgtacccgataagacatctctcgagttactgtgtcagggatgttcaggtgacatccgctctgctattaattcgctgcagttttctagttctaaaggtgagaacaatctgcgtcccagaaagaagggaatgtcactaaaatcagatgctgttctgtctaaatctaaaagaaggaaaaaacccgatcgagtatttgaaaaccaagaggtgcaagccatcggtggcaaggatgtttctctgtttctcttccgtgctttggggaagatcctctattgcaagcgggcaagtctcactgaattagactctccccgtcttccttcacaccttagcgagtatgaaagagacaccctcctggtcgagcccgaggaagtggtggagatgagccatatgcctggagacctttttaatctgtacttgcaccagaactatattgatttcttcatggaaatcgacgacatcgtgcgagcttccgaattcctgagctttgccgacattttgtcgggcgactggaatacaagatctcttttaagggaatatagtacatcgatagccacccgaggagtcatgcactctaataaggcgcgtggatatgcccattgccagggaggaggcagcagttttcggccactgcataaaccacagtggttcctcattaacaagaaatatcgcgaaaactgccttgcagcaaaagccctctttccagacttctgcttgcctgccctgtgtaggcagacccagttattgccgtacctggcgttgctgactatcccgatgcgtaaccaggcccagataagttttatccaggacattggcaggctgccgctcaaaagacacttcgggcgtctaaagatggaagccctcacagaccgggagcacggaatgattgacccggattccggtgacgaagctcagcttaacgggggacacagtgcagaagaatcactgggtgagcccactcaggcaaccgtgcccgagacatggtcactgccactgagccagaacagcgccagtgagctccctgcaagtcaaccccagcccttctccgcccagggtgacatggaggagaatatcattatcgaagactacgaaagcgatggaacctag

SEQ ID NO: 344070 - DNA, 2013 bp, Artificial Sequence
  derived and/or modified sequence
atgaaccaggtgactgactgggtggatccatctttcgatgattttttagaatgctcaggcgtgtccaccatcacagctacttcgctgggagtcaataacagcagccaccgacgcaagaacggacctagcacactggaatcttctaggttcccagcgcgaaagcgcggtaatctgtcatccctggagcaaatctacggactggaaaactctaaagaatatttgtctgaaaatgaaccctgggtggacaagtacaaacccgagactcaacatgagcttgctgtgcacaagaagaagatcgaggaagtagagacctggctgaaagcacaagtgttagagaggcaaccaaaacagggaggatctatactacttataactgggcctccaggatgtgggaagactactactctaaaaatcttgtctaaggaacatggcatccaagtacaagaatggatcaacccagtgctacccgactttcaaaaggatgacttcaagggaatgttcaacaccgagtccagtttccacatgtttccttatcaatcacagatagcagtattcaaggagttcctgctccgagccaccaaatacaacaagttgcagatgctcggcgacgatcttcgcacagataaaaagatcattctcgtggaggacctccctaaccaattttaccgggatagccatactttacacgaggtccttcgaaaatatgtgcggattggtaggtgcccactgatcttcattatctcagactcactgtctggggacaacaaccagagactcctgttcccgaaggagatacaagaagaatgtagcatctcaaatattagcttcaacccagttgcccctaccattatgatgaagtttctaaaccgcattgtgaccattgaagctaacaaaaatggcggaaagatcaccgtccccgacaagacctcacttgagttgctctgtcagggttgtagcggcgacatcagaagcgccatcaacagtctgcagttttctagtagcaagggcgagaacaacctcagacctaggaagaaggggatgtcactcaaatctgatgctgtgctgtccaaatcaaagcgacgcaagaagccagatagagtcttcgaaaatcaggaggtacaagccatcggcggaaaggacgtgagcctgtttctcttcagagccctgggtaagattctgtactgtaagcgtgccagtcttaccgagcttgattcacctagattgccttcacacctatctgagtacgagcgcgacacgcttctggttgagccagaagaagttgtggaaatgtctcacatgcccggtgatttgtttaacctctatctgcatcaaaactatatcgatttttttatggagattgatgacatcgtgcgtgcttctgaatttctgagctttgctgatatactctccggagactggaatacgaggagccttctaagggagtacagcacctcaatcgcgaccaggggcgtcatgcacagcaacaaggcgaggggctacgctcattgccaagggggtggaagctcttttcggcctttgcacaagccgcagtggtttctcataaacaagaaatatagagaaaactgcctggccgctaaagccctcttccctgacttttgcttgcctgccctgtgcaggcagactcagctcttaccctacctggccttgcttacaatccccatgcgaaaccaggcacaaattagttttatacaggatatcggcagactgccacttaaaagacattttggcagattgaagatggaagctttgactgaccgcgaacatggcatgattgatccagactccggcgacgaagcacaactgaacggaggacacagtgctgaagagagtttgggcgagccaactcaggcgaccgtgccagagacctggtctctacccctgtcccagaactctgcttctgaattaccggcaagccagccccagcccttttctgcccaaggagacatggaggaaaacattatcatcgaagattacgagtccgatgggacttag

SEQ ID NO: 344071 - DNA, 2013 bp, Artificial Sequence
  derived and/or modified sequence
atgaaccaggtgacagattgggtcgatccctcctttgacgactttttggagtgcagtggtgtaagtacaatcacagcaacatccctcggtgtgaataactcgtcacatcgcagaaagaatgggccttccaccctcgagagctctcgcttccccgctagaaagcgaggtaacctgagcagcctggaacaaatttacggactggaaaacagtaaagaatacctctctgagaatgagccctgggtggacaaatataagcctgagacgcaacacgagttagcagttcataaaaaaaaaattgaggaggttgaaacatggctcaaggctcaggttctggagagacagccaaagcaggggggttctatccttctcataactggtccgccaggttgtgggaagactacgacactgaagattctgtcgaaggagcatggaattcaggtgcaggagtggatcaatcccgtgttaccagattttcagaaagatgacttcaaagggatgtttaacactgagtcctcatttcatatgttcccctaccagtctcagatcgctgtcttcaaggagttcttactgagagcaacgaaatacaataagctgcagatgcttggggacgatcttaggacagacaagaagattatcttagtggaggacctgccgaatcagttctacagagatagtcacacactacacgaagttctcaggaaatacgtccggatcggaaggtgccctctcatatttataatctcagatagtctgagcggtgacaacaaccagaggctacttttccccaaggaaatccaagaggagtgcagcattagcaacatcagttttaaccccgtcgccccaactattatgatgaaattcctgaaccgaatcgtgaccatcgaagcaaacaagaatggcggaaagatcaccgtcccagataaaactagtttggaattgctgtgtcagggatgcagtggggacattcgcagcgcaatcaactccctccagttctcatcttccaaaggagagaacaatctccgtccgagaaagaagggaatgtccctgaagagtgatgccgtgctttccaagtctaaaaggaggaaaaaacccgatcgggtcttcgaaaaccaagaagtgcaggccataggaggaaaagatgtttcactttttctctttcgagctttaggaaagatcctttattgtaagagagcatccctaaccgagctggacagtccaagactgcctagccatctgagcgagtatgagagagacaccctgctggtggaaccagaggaagtcgtcgagatgtctcacatgcctggtgacctgtttaatttgtaccttcatcaaaactacatcgatttcttcatggagatcgatgacattgtgcgggctagcgaatttctgtcatttgccgatattctctctggcgattggaatacacgatcactgctgcgggagtacagtacttccattgcgactcgcggtgtcatgcattctaataaagcacgcggttacgctcactgccaggggggtggatcatcattcaggcccctccacaagcctcagtggttcctaattaacaaaaagtaccgcgaaaattgcctggccgcaaaagctttattccccgacttttgccttcctgctctgtgccggcagacccaactgctgccttacctggccctgttgaccatccccatgagaaatcaggcccagatctctttcattcaggatatcggacggctgccacttaaacgacacttcggcagattgaagatggaggccttgaccgaccgggagcatggaatgattgaccccgacagtggtgatgaggcacaactcaatggcggacactcagccgaggaaagtctcggcgaaccgacccaggcgactgtcccagaaacatggagtctaccactctcacaaaactcggcttcagagctgcccgcaagccaaccacagccctttagtgcacagggagatatggaggaaaatatcattattgaagactatgaatctgatggcacatag

SEQ ID NO: 344072 - DNA, 3060 bp, Artificial Sequence
  derived and/or modified sequence
gaggccgtacctccgagaggctcggcgttgagcccgggtagggccaggtggctgccctttcacctagggtagtccctggtcgcctccgctcttcgcccaaaaggggatgcagctccgggaaacaagtgaattcatggtattttacttttttgggaaatactggaaatgaagacctgcaactgtaatttgaaataaggaaaactttaattttcagtataaaaattgctcaaatagaattgcctgattttaatgacaaaaggtgaattatagtttaatgtactgcaagtcctaaactacggatgggaactattacagtttataatgtcaaaaacttttcttagaccaaaggtatcttccacaaagtatatgggagtccacatttatgtaagaaatgaaactataaaatgtataaataatttgcaaatcagaattgctgtcgaaagttttactataatgaaagatattttcatactctcaaaaatatagaggaaaggggccaagattatagtaccagtcacaatcttttgatgaggacgaaatgaatcaggtaacagactgggttgacccatcatttgatgattttctagagtgtagtggcgtctctactattactgccacatcattaggtgtgaataactcaagtcatagaagaaaaaatgggccttctacattagaaagcagcagatttccagcgagaaaaagaggaaatctatcttccttagaacagatttatggtttagaaaattcaaaagaatatctgtctgaaaatgaaccatgggtggataaatataaaccagaaactcagcatgaacttgctgtgcataaaaagaaaattgaagaagtcgaaacctggttaaaagctcaagttttagaaaggcaaccaaaacagggtggatctattttattaataacaggtcctcctggatgtggaaagacaacgaccttaaaaatactatcaaaggagcatggtattcaagtacaagagtggattaatccagttttaccagacttccaaaaagatgatttcaaggggatgtttaatactgaatcaagcttccatatgtttccctatcagtctcagatagcagttttcaaagagtttctactaagagcgacaaagtataacaagttacaaatgcttggagatgatctgagaactgataagaagataattctggttgaagatttacctaaccagttttatcgggattctcatactttacatgaagttctaaggaagtatgtgaggattggtcgatgtcctcttatatttataatctcggacagtctcagtggagataataatcaaaggttattgtttcccaaagaaattcaggaagagtgttctatctcaaatattagtttcaaccctgtggcaccaacaattatgatgaaatttcttaatcgaatagtgactatagaagctaacaagaatggaggaaaaattactgtccctgacaaaacttctctagagttgctctgtcagggatgttctggtgatatcagaagtgcaataaacagcctccagttttcttcttcaaaaggagaaaacaacttacggccaaggaaaaaaggaatgtctttaaaatcagatgctgtgctgtcaaaatcaaaacgaagaaaaaaacctgatagggtttttgaaaatcaagaggtccaagctattggtggcaaagatgtttctctgtttctcttcagagctttggggaaaattctatattgtaaaagagcatctttaacagaattagactcacctcggttgccctctcatttatcagaatatgaacgggatacattacttgttgaacctgaggaggtagtagaaatgtcacacatgcctggagacttatttaatttatatcttcaccaaaactacatagatttcttcatggaaattgatgatattgtgagagccagtgaatttctgagttttgcagatatcctcagtggtgactggaatacacgctctttactcagggaatatagcacatctatagctacgagaggtgtgatgcattccaacaaagcccgaggatatgctcattgccaaggaggaggatcaagttttcgacccttgcacaaacctcagtggtttctaataaataaaaagtatcgggaaaattgcctggcagcaaaagcactttttcctgacttctgcctaccagctttatgccgccaaactcagctattgccataccttgctctactaaccattccaatgagaaatcaagctcagatttcttttatccaagatattggaaggctccctctgaagcgacactttggaagattgaaaatggaagccctgactgacagggaacatggaatgatagaccctgacagcggagatgaagcccagcttaatggaggacattctgcagaggaatctctgggtgaacccactcaagccactgtgccggaaacctggtctcttcctttgagtcagaatagtgccagtgaactgcctgctagccagccccagcccttttcagcccaaggagacatggaagaaaacataataatagaagactacgagagtgatgggacatagaagccagcctgctaatcagattgctacttcacagcttcatttttgtttcattcagtggtacttcagcagagttaatatgcttttctgatgaattacacaacagtttgttaattcttcattcttgtagtatttcatcacaagaaacctactcttctgtcatcttgaagtaaatagaagatcaagccttcaaatctcttaattttttcggtatttattaaatctgtgagtggtttaaggagcggtcagtgtgtataaagtgtgtttgaacattatgccaaatatcaagatgtgaaggactaattcaggatgcaaaaacgttattggggggttgtaaatatcaactattcaacagtttaggatgcaattacgagtgtaaactgtgtgccttatttacactttattgtctcccgcttctcagatagttttgatgtgttgtacagtggaatatcttagatactttttggaaagtatttacataagttatatcacaattaaaatgttgaatttaa

SEQ ID NO: 344073 - DNA, 2943 bp, Artificial Sequence
  derived and/or modified sequence
cgagaggctcggcgttgagcccgggtagggccaggtggctgccctttcacctagggtagtccctggtcgcctccgctcttcgcccaaaaggggatgcagctccgggaaacaagtgaattcatggtattttacttttttgggaaatactggaaatgaagacctgcaactgtaatttgaaataaggaaaactttaattttcagtataaaaattgctcaaatagaattgcctgattttaatgacaaaagtatatgggagtccacatttatgtaagaaatgaaactataaaatgtataaataatttgcaaatcagaattgctgtcgaaagttttactataatgaaagatattttcatactctcaaaaatatagaggaaaggggccaagattatagtaccagtcacaatcttttgatgaggacgaaatgaatcaggtaacagactgggttgacccatcatttgatgattttctagagtgtagtggcgtctctactattactgccacatcattaggtgtgaataactcaagtcatagaagaaaaaatgggccttctacattagaaagcagcagatttccagcgagaaaaagaggaaatctatcttccttagaacagatttatggtttagaaaattcaaaagaatatctgtctgaaaatgaaccatgggtggataaatataaaccagaaactcagcatgaacttgctgtgcataaaaagaaaattgaagaagtcgaaacctggttaaaagctcaagttttagaaaggcaaccaaaacagggtggatctattttattaataacaggtcctcctggatgtggaaagacaacgaccttaaaaatactatcaaaggagcatggtattcaagtacaagagtggattaatccagttttaccagacttccaaaaagatgatttcaaggggatgtttaatactgaatcaagcttccatatgtttccctatcagtctcagatagcagttttcaaagagtttctactaagagcgacaaagtataacaagttacaaatgcttggagatgatctgagaactgataagaagataattctggttgaagatttacctaaccagttttatcgggattctcatactttacatgaagttctaaggaagtatgtgaggattggtcgatgtcctcttatatttataatctcggacagtctcagtggagataataatcaaaggttattgtttcccaaagaaattcaggaagagtgttctatctcaaatattagtttcaaccctgtggcaccaacaattatgatgaaatttcttaatcgaatagtgactatagaagctaacaagaatggaggaaaaattactgtccctgacaaaacttctctagagttgctctgtcagggatgttctggtgatatcagaagtgcaataaacagcctccagttttcttcttcaaaaggagaaaacaacttacggccaaggaaaaaaggaatgtctttaaaatcagatgctgtgctgtcaaaatcaaaacgaagaaaaaaacctgatagggtttttgaaaatcaagaggtccaagctattggtggcaaagatgtttctctgtttctcttcagagctttggggaaaattctatattgtaaaagagcatctttaacagaattagactcacctcggttgccctctcatttatcagaatatgaacgggatacattacttgttgaacctgaggaggtagtagaaatgtcacacatgcctggagacttatttaatttatatcttcaccaaaactacatagatttcttcatggaaattgatgatattgtgagagccagtgaatttctgagttttgcagatatcctcagtggtgactggaatacacgctctttactcagggaatatagcacatctatagctacgagaggtgtgatgcattccaacaaagcccgaggatatgctcattgccaaggaggaggatcaagttttcgacccttgcacaaacctcagtggtttctaataaataaaaagtatcgggaaaattgcctggcagcaaaagcactttttcctgacttctgcctaccagctttatgccgccaaactcagctattgccataccttgctctactaaccattccaatgagaaatcaagctcagatttcttttatccaagatattggaaggctccctctgaagcgacactttggaagattgaaaatggaagccctgactgacagggaacatggaatgatagaccctgacagcggagatgaagcccagcttaatggaggacattctgcagaggaatctctgggtgaacccactcaagccactgtgccggaaacctggtctcttcctttgagtcagaatagtgccagtgaactgcctgctagccagccccagcccttttcagcccaaggagacatggaagaaaacataataatagaagactacgagagtgatgggacatagaagccagcctgctaatcagattgctacttcacagcttcatttttgtttcattcagtggtacttcagcagagttaatatgcttttctgatgaattacacaacagtttgttaattcttcattcttgtagtatttcatcacaagaaacctactcttctgtcatcttgaagtaaatagaagatcaagccttcaaatctcttaattttttcggtatttattaaatctgtgagtggtttaaggagcggtcagtgtgtataaagtgtgtttgaacattatgccaaatatcaagatgtgaaggactaattcaggatgcaaaaacgttattggggggttgtaaatatcaactattcaacagtttaggatgcaattacgagtgtaaactgtgtgccttatttacactttattgtctcccgcttctcagatagttttgatgtgttgtacagtggaatatcttagatactttttggaaagtatttacataagttatatcacaattaaaatgttgaatttaa

SEQ ID NO: 344074 - DNA, 2789 bp, Artificial Sequence
  derived and/or modified sequence
agcccgggtagggccaggtggctgccctttcacctagggtagtccctggtcgcctccgctcttcgcccaaaaggggatgcagctccgggaaatatatgggagtccacatttatgtaagaaatgaaactataaaatgtataaataatttgcaaatcagaattgctgtcgaaagttttactataatgaaagatattttcatactctcaaaaatatagaggaaaggggccaagattatagtaccagtcacaatcttttgatgaggacgaaatgaatcaggtaacagactgggttgacccatcatttgatgattttctagagtgtagtggcgtctctactattactgccacatcattaggtgtgaataactcaagtcatagaagaaaaaatgggccttctacattagaaagcagcagatttccagcgagaaaaagaggaaatctatcttccttagaacagatttatggtttagaaaattcaaaagaatatctgtctgaaaatgaaccatgggtggataaatataaaccagaaactcagcatgaacttgctgtgcataaaaagaaaattgaagaagtcgaaacctggttaaaagctcaagttttagaaaggcaaccaaaacagggtggatctattttattaataacaggtcctcctggatgtggaaagacaacgaccttaaaaatactatcaaaggagcatggtattcaagtacaagagtggattaatccagttttaccagacttccaaaaagatgatttcaaggggatgtttaatactgaatcaagcttccatatgtttccctatcagtctcagatagcagttttcaaagagtttctactaagagcgacaaagtataacaagttacaaatgcttggagatgatctgagaactgataagaagataattctggttgaagatttacctaaccagttttatcgggattctcatactttacatgaagttctaaggaagtatgtgaggattggtcgatgtcctcttatatttataatctcggacagtctcagtggagataataatcaaaggttattgtttcccaaagaaattcaggaagagtgttctatctcaaatattagtttcaaccctgtggcaccaacaattatgatgaaatttcttaatcgaatagtgactatagaagctaacaagaatggaggaaaaattactgtccctgacaaaacttctctagagttgctctgtcagggatgttctggtgatatcagaagtgcaataaacagcctccagttttcttcttcaaaaggagaaaacaacttacggccaaggaaaaaaggaatgtctttaaaatcagatgctgtgctgtcaaaatcaaaacgaagaaaaaaacctgatagggtttttgaaaatcaagaggtccaagctattggtggcaaagatgtttctctgtttctcttcagagctttggggaaaattctatattgtaaaagagcatctttaacagaattagactcacctcggttgccctctcatttatcagaatatgaacgggatacattacttgttgaacctgaggaggtagtagaaatgtcacacatgcctggagacttatttaatttatatcttcaccaaaactacatagatttcttcatggaaattgatgatattgtgagagccagtgaatttctgagttttgcagatatcctcagtggtgactggaatacacgctctttactcagggaatatagcacatctatagctacgagaggtgtgatgcattccaacaaagcccgaggatatgctcattgccaaggaggaggatcaagttttcgacccttgcacaaacctcagtggtttctaataaataaaaagtatcgggaaaattgcctggcagcaaaagcactttttcctgacttctgcctaccagctttatgccgccaaactcagctattgccataccttgctctactaaccattccaatgagaaatcaagctcagatttcttttatccaagatattggaaggctccctctgaagcgacactttggaagattgaaaatggaagccctgactgacagggaacatggaatgatagaccctgacagcggagatgaagcccagcttaatggaggacattctgcagaggaatctctgggtgaacccactcaagccactgtgccggaaacctggtctcttcctttgagtcagaatagtgccagtgaactgcctgctagccagccccagcccttttcagcccaaggagacatggaagaaaacataataatagaagactacgagagtgatgggacatagaagccagcctgctaatcagattgctacttcacagcttcatttttgtttcattcagtggtacttcagcagagttaatatgcttttctgatgaattacacaacagtttgttaattcttcattcttgtagtatttcatcacaagaaacctactcttctgtcatcttgaagtaaatagaagatcaagccttcaaatctcttaattttttcggtatttattaaatctgtgagtggtttaaggagcggtcagtgtgtataaagtgtgtttgaacattatgccaaatatcaagatgtgaaggactaattcaggatgcaaaaacgttattggggggttgtaaatatcaactattcaacagtttaggatgcaattacgagtgtaaactgtgtgccttatttacactttattgtctcccgcttctcagatagttttgatgtgttgtacagtggaatatcttagatactttttggaaagtatttacataagttatatcacaattaaaatgttgaatttaa

SEQ ID NO: 344075 - protein, 315 aa, Artificial Sequence
  derived and/or modified sequence
MADTIFGSGNDQWVCPNDRQLALRAKLQTGWSVHTYQTEKQRRKQHLSPAEVEAILQVIQRAERLDVLEQQRIGRLVERLETMRRNVMGNGLSQCLLCGEVLGFLGSSSVFCKDCRKKVCTKCGIEASPGQKRPLWLCKICSEQREVWKRSGAWFYKGLPKYILPLKTPGRADDPHFRPLPTEPAEREPRSSETSRIYTWARGRVVSSDSDSDSDLSSSSLEDRLPSTGVRDRKGDKPWKESGGSVEAPRMGFTHPPGHLSGCQSSLASGETGTGSADPPGGPRPGLTRRAPVKDTPGRAPAADAAPAGPSSCLG

SEQ ID NO: 344076 - DNA, 948 bp, Artificial Sequence
  derived and/or modified sequence
atggcagacaccatctttggcagtggtaacgatcagtgggtgtgtcccaatgatcgtcagctggcgttgcgtgccaaactgcagacgggctggagcgttcatacataccagaccgaaaagcaacggcggaaacaacacctgtctcctgcagaggtagaggcaattttacaggtgatccagcgagccgagagactagacgttctggaacagcagcggataggccgactcgtggagagattggagaccatgcgacgcaatgtcatgggaaacggcctgagtcaatgcttgctgtgtggcgaagtcttagggtttctggggagttcttctgttttttgtaaggattgtaggaagaaggtctgcacaaaatgcggaatcgaggcttctcccggacaaaagcggccactctggctctgcaaaatctgttcagagcagcgagaagtttggaaacgctctggcgcctggttctataaaggattgccaaaatatattctgcctctgaagacgcccggaagagcagacgacccccacttccggcctctgccaacagagcctgctgagagggagccaagaagcagcgaaacttcacgtatctatacttgggcccggggtcgggtggtttcctctgactcagactccgattccgacctctcttcttcttccctggaagacagactgccttctaccggggtgagagatcggaaaggtgacaaaccttggaaagaatccggcggcagtgtcgaggcccctaggatgggattcacccatccacccgggcatctctctggttgccagagtagcctggcctccggtgagaccggtaccgggtctgccgatccccccggcggcccgagaccaggtctcacgagacgcgccccggtgaaggatactcccggcagagccccggctgccgatgccgctccagcagggccaagctcatgcctaggatag

SEQ ID NO: 344077 - DNA, 948 bp, Artificial Sequence
  derived and/or modified sequence
atggctgacaccatcttcggcagcggaaatgaccagtgggtgtgccccaatgaccggcagctggccctgcgggccaagctgcagacaggctggagcgtgcacacctaccagacagagaagcagaggaggaagcagcacctgagccctgctgaggtggaggccatcctgcaggtgatccagagagctgagcggctggatgtgctggagcagcagagaattggccgcctggtggagcggctggagaccatgagaagaaatgtgatgggaaatggcctgagccagtgcctgctgtgtggggaggtgctgggcttcctgggcagcagctctgtgttctgcaaggactgcaggaagaaggtgtgcaccaagtgtggcatcgaggccagccctggccagaagaggcccctgtggctgtgcaagatctgcagcgagcagcgggaggtgtggaagaggtctggggcctggttctacaagggcctgcccaagtacatcctgcccctgaagaccccaggccgggcagatgacccccacttccggcccctgcccacagagcctgctgagcgggagcccaggagcagcgagaccagccgcatctacacctgggcccggggccgggtggtgtccagtgacagcgacagcgacagcgacctgagcagcagcagcctggaggaccggctgcccagcactggagtgcgggacaggaagggggacaagccctggaaggagagcggcggctctgtggaggcccccaggatgggcttcacccaccccccaggccacctgagcggctgccagagcagcctggccagcggggagaccggcaccggcagcgctgaccccccaggcggccccaggcctggcctgacccggcgggcccctgtgaaggacaccccaggccgggccccagctgctgatgctgccccagctggccccagcagctgcctgggctag

SEQ ID NO: 344078 - DNA, 948 bp, Artificial Sequence
  derived and/or modified sequence
atggccgacaccatcttcggcagcggcaacgaccagtgggtgtgccccaatgataggcagctagccctccgggccaaactgcagactggatggtcagtgcacacctaccagactgaaaaacagagacgaaagcagcacctttcccctgcggaagtggaagccattcttcaggtgattcagagggcagaacgcctggacgtcctcgaacagcagcggatcggcaggttggtggagcggctggagaccatgcggcgcaacgttatgggcaatggactctcgcagtgtttattgtgtggtgaagttcttggcttcctgggaagcagctcagtcttctgcaaggactgtaggaagaaggtctgcaccaaatgtggaatcgaggcttcccctggccagaaacgacccctatggctgtgcaaaatctgcagtgagcaacgcgaggtatggaagagaagcggcgcctggttttacaagggcctccctaagtacatcttgccactcaaaaccccaggacgtgccgatgatcctcacttccgtccgctcccaacagagccggcggagagggaacctaggagctccgaaacttctcggatatatacatgggcaaggggaagggtcgtctcatcggatagcgattctgactccgacctttccagctcctcattggaagacagattaccgtcgaccggggtgcgcgacagaaaaggcgataagccctggaaggagagcggcggatcggtcgaggcccctagaatgggatttactcatccacccggccacctgtccggatgccagtcttccctggccagcggagagacaggcacaggctcggccgaccccccaggggggccccggccaggtttgaccaggcgagccccggtaaaggacacccccggtcgagccccagctgccgacgccgcgcccgctgggcctagctcttgtctaggctag

SEQ ID NO: 344079 - DNA, 948 bp, Artificial Sequence
  derived and/or modified sequence
atggcagatacaatctttggctccggcaatgaccagtgggtgtgccccaacgatcggcagctggccctaagggccaagctgcagactgggtggagcgtacatacctaccaaacagagaagcagagacgcaagcaacacttatcccccgcagaagttgaagctattctgcaggtgatccagagagccgagcgattagacgtgctcgagcaacaacgtataggacgcctagtggagagactcgaaaccatgcgtagaaatgtgatggggaatggactctcgcagtgtctgctctgcggagaggtgctggggtttctcggctccagctctgtcttttgtaaggattgcaggaaaaaagtgtgtacgaaatgtggcatcgaagcatctcccggacaaaagcgccctctgtggctctgcaagatatgcagcgagcagcgggaggtgtggaagcgttcaggagcatggttctacaaggggctcccaaaatacatcctccctctcaaaacccccggtcgcgctgacgatccacacttcaggcctctgcctacggagccagctgagcgtgaaccacggtcaagcgagacatcccgaatttatacctgggccaggggaagggtcgtgagcagtgactccgattccgatagtgacctgagtagcagctcgctggaagatcgcctcccctccacaggcgtgagggataggaagggggataaaccatggaaggagtcaggcggatctgtggaagcacctcgtatgggtttcacacatccacctgggcacttgagcggctgccaaagctcactggccagcggtgagactggcactggatccgcagatccgccagggggacctcgtccaggcctgaccagacgtgcccctgtgaaggacactcccggaagagcaccagcggctgatgcggctcctgccggacccagctcctgcctgggttag

SEQ ID NO: 344080 - DNA, 2896 bp, Artificial Sequence
  derived and/or modified sequence
ccaccactgctgcctgtaagggctgttttggatacagaaaatgtgccctttctaacccaaaaaatgcttgaaatgtgtaaaagtggccagactaacagtcccaaagagggctgccctctaagaggaagcgtcccaaatctgttcagttttagagactacgtgactggggtacgtggtggggccttaccagacatccacgaggagaatccaggccttggtttggctccagctgggcctgcctggtggctgccacttattgacttaagtcccagtgattcagctcctcatctggaacacctcgggtcacccccgacaacggtggtgggagggagagcggcctcctcctccctggtggggcctgtctgggtgaagcccctctgttcccgaggatcgtctgccttattgaaaccatctaattggagatccgcagattaggctaccaagacacagctgcctccagcagaatttgtgtagtggacacttgtacgtgcactttggagacagcaagcatgaggcctgcagctgacagctttgagtggctgtgaacctgactatggaaaagatgtgactccccacccccagccgggtgctccgagccatggccgacaccatcttcggcagcgggaatgatcagtgggtttgccccaatgaccggcagcttgcccttcgagccaagctgcagacgggctggtccgtgcacacctaccagacggagaagcagaggaggaagcagcacctcagcccggcggaggtggaggccatcctgcaggtcatccagagggcagagcggctcgacgtcctggagcagcagagaatcgggcggctggtggagcggctggagaccatgaggcggaatgtgatggggaacggcctgtcccagtgtctgctctgcggggaggtgctgggcttcctgggcagctcgtcggtgttctgcaaagactgcaggaagaaagtctgcaccaaatgtgggatcgaggcctcccctggccagaagcggcccctgtggctgtgtaagatctgcagtgagcaaagagaggtctggaagaggtcgggggcctggttctacaaagggctccccaagtatatcttgcccctgaagacccctggccgagctgatgacccccacttccgacctttgcccacggaaccggcagagcgagagcccagaagctctgagaccagccgcatctacacgtgggcccgaggaagagtggtttccagtgacagtgacagtgactcggatcttagctcctccagcctagaggacagactcccatccactggggtcagggaccggaaaggcgacaaaccctggaaggagtcaggtggcagcgtggaggcccccaggatggggttcacccacccgccgggccacctctctgggtgccagagcagcctggccagtggtgagacggggacaggctctgctgacccgccagggggaccccgccccgggctgacccgaagggccccggtaaaagacacacctggacgagcccccgctgctgacgcagctccagcaggcccctccagctgcctgggctgaggtgtctggtgcctggaacagacttccctgtggaggattcctgccagaccctgcccggctcctccctgaccggtccttgtgccctcaccagacaccctgttggccatgactcaacaaaccagtgttgggagccgtctgcctccccagctcagtgcctttctgcaccccttctctcctggggagctgtctgcatccgccaccccctccaaccactgccctcagcccccgaccttatttattaccctcccctcccacacccccaatctacctggtgatgattttaagtttgcgcgtgtcttgggttgggctggggggtttcccacatgcagtgtcagaggggccgcccggtggggctatctccgttgctatattaatggcaagactaaatgaaacctagggcacggcctccgaagctgcgtgtggccccttagaggtgagcatcagagccagagcagtgagggggagactcacccaccctctccctctcccttcagctctgggaggcaggcgcagtgcccccctcccatgggctggcccaggaccgtgggtgaaacctgggtctgtttagtttctttggtttttgtatgtttgtttgtttttgacacagtctcgctttgttgcccaggctggggtgcagtggcacgatcgcggctcactgcaacctccacctcccgggctcaagcgattctctcacctcagcctcctgagtaggtgggattacagatgcccgccaccacacccagttaatttttgtatttttagaagagatggggtttctccatgttggccaggctggtcttgaactcctggtctcaagtgatctgcccgcctcggcctcccaaagtgctgggattacaggtgtgagccaccgcacccaatcctattaggtttctttgaatcccctcatggcctgcctggtttttgctcagcctgtcttcagcttgaggagctgggaagctctggtggatgctatgaactcacttgctgaagagcagcgttcaggtgcatccccagccagggcacgtggctccctcagccatgaattcacttctcttcaggaggtttggcttggcatgaaaatacttcattcagagtatgggcaaatgcttctggaaaacccttccctgaagagagagaacgtgtgtgtgtgtgtcggtgatcacaccctcccatccttcctgcctcctgccccaaaccccgggttcctgggtctggaagggccttctctccaagctgggagctcctgggcccccaccattcactttttgtccttgctgctggcaaacagtaaagaaactcactttccctgtggcacgttatgcttcagaattaaaacaatgaagattaaaa

SEQ ID NO: 344081 - DNA, 948 bp, Artificial Sequence
  derived and/or modified sequence
atggccgacaccatcttcggcagcggcaacgaccagtgggtgtgccccaacgacagacagctggccctgagagccaagctgcagaccggctggagcgtgcacacctaccagaccgagaagcagagaagaaagcagcacctgagccccgccgaggtggaggccatcctgcaggtgatccagagagccgagagactggacgtgctggagcagcagagaatcggcagactggtggagagactggagaccatgagaagaaacgtgatgggcaacggcctgagccagtgcctgctgtgcggcgaggtgctgggcttcctgggcagcagcagcgtgttctgcaaggactgcagaaagaaggtgtgcaccaagtgcggcatcgaggccagccccggccagaagagacccctgtggctgtgcaagatctgcagcgagcagagagaggtgtggaagagaagcggcgcctggttctacaagggcctgcccaagtacatcctgcccctgaagacccccggcagagccgacgacccccacttcagacccctgcccaccgagcccgccgagagagagcccagaagcagcgagaccagcagaatctacacctgggccagaggcagagtggtgagcagcgacagcgacagcgacagcgacctgagcagcagcagcctggaggacagactgcccagcaccggcgtgagagacagaaagggcgacaagccctggaaggagagcggcggcagcgtggaggcccccagaatgggcttcacccacccccccggccacctgagcggctgccagagcagcctggccagcggcgagaccggcaccggcagcgccgacccccccggcggccccagacccggcctgaccagaagagcccccgtgaaggacacccccggcagagcccccgccgccgacgccgcccccgccggccccagcagctgcctgggctag

SEQ ID NO: 344082 - protein, 286 aa, Artificial Sequence
  derived and/or modified sequence
MADTIFGSGNDQWVCPNDRQLALRAKLQTGWSVHTYQTEKQRRKQHLSPAEVEAILQVIQRAERLDVLEQQRIGRLVERLETMRRNVMGNGLSQCLLCGEVLGFLGSSSVFCKDCRKVWKRSGAWFYKGLPKYILPLKTPGRADDPHFRPLPTEPAEREPRSSETSRIYTWARGRVVSSDSDSDSDLSSSSLEDRLPSTGVRDRKGDKPWKESGGSVEAPRMGFTHPPGHLSGCQSSLASGETGTGSADPPGGPRPGLTRRAPVKDTPGRAPAADAAPAGPSSCLG

SEQ ID NO: 344083 - DNA, 861 bp, Artificial Sequence
  derived and/or modified sequence
atggccgacaccatcttcggcagcggcaacgaccagtgggtgtgccccaacgacagacagctggccctgagagccaagctgcagaccggctggagcgtgcacacctaccagaccgagaagcagagaagaaagcagcacctgagccccgccgaggtggaggccatcctgcaggtgatccagagagccgagagactggacgtgctggagcagcagagaatcggcagactggtggagagactggagaccatgagaagaaacgtgatgggcaacggcctgagccagtgcctgctgtgcggcgaggtgctgggcttcctgggcagcagcagcgtgttctgcaaggactgcagaaaggtgtggaagagaagcggcgcctggttctacaagggcctgcccaagtacatcctgcccctgaagacccccggcagagccgacgacccccacttcagacccctgcccaccgagcccgccgagagagagcccagaagcagcgagaccagcagaatctacacctgggccagaggcagagtggtgagcagcgacagcgacagcgacagcgacctgagcagcagcagcctggaggacagactgcccagcaccggcgtgagagacagaaagggcgacaagccctggaaggagagcggcggcagcgtggaggcccccagaatgggcttcacccacccccccggccacctgagcggctgccagagcagcctggccagcggcgagaccggcaccggcagcgccgacccccccggcggccccagacccggcctgaccagaagagcccccgtgaaggacacccccggcagagcccccgccgccgacgccgcccccgccggccccagcagctgcctgggctag

SEQ ID NO: 344084 - DNA, 861 bp, Artificial Sequence
  derived and/or modified sequence
atggcagatacgatatttggctccgggaacgatcaatgggtctgtcccaacgaccgtcagctggccttgcgggccaagctgcagacaggctggtcggtccacacctatcagactgaaaagcagcgccgaaagcaacacctgtcacctgccgaggttgaggctattctgcaggttatacagagggccgaacgactggacgttctggagcaacagaggatcgggaggctcgtggaacgactggagacaatgaggaggaacgtgatgggaaacgggctctcccaatgcctgctgtgcggagaggtgctgggcttcttgggtagttcatccgttttttgtaaagattgtaggaaggtgtggaaaaggtcaggtgcttggttctacaaaggactccctaaatacatcctgcctctaaagacccccggacgagctgacgatccacatttcagaccgctgccaaccgagcctgccgagagggagccaagatctagcgagaccagcagaatatacacttgggcccgcggaagagtcgtgagcagcgattccgatagtgattctgacttatcatctagtagcctggaggaccgcctgccaagtacaggggtgcgagatcgcaaaggtgacaagccctggaaagaatcaggcggctccgtggaggcacctcgaatgggatttacccatcctccaggacacttgagtggttgccagagctcattagcatctggcgagactggaacaggcagcgcagaccccccaggggggccacgacctggtttaacccgccgagctccggtgaaggatacgcctggcagggcacccgcggccgatgccgcaccagccggtccaagctcgtgtctggggtag

SEQ ID NO: 344085 - DNA, 861 bp, Artificial Sequence
  derived and/or modified sequence
atggctgacaccatcttcggcagcggaaatgaccagtgggtgtgccccaatgaccggcagctggccctgcgggccaagctgcagacaggctggagcgtgcacacctaccagacagagaagcagaggaggaagcagcacctgagccctgctgaggtggaggccatcctgcaggtgatccagagagctgagcggctggatgtgctggagcagcagagaattggccgcctggtggagcggctggagaccatgagaagaaatgtgatgggaaatggcctgagccagtgcctgctgtgtggggaggtgctgggcttcctgggcagcagctctgtgttctgcaaggactgcaggaaggtgtggaagaggtctggggcctggttctacaagggcctgcccaagtacatcctgcccctgaagaccccaggccgggcagatgacccccacttccggcccctgcccacagagcctgctgagcgggagcccaggagcagcgagaccagccgcatctacacctgggcccggggccgggtggtgtccagtgacagcgacagcgacagcgacctgagcagcagcagcctggaggaccggctgcccagcactggagtgcgggacagaaaaggagacaagccctggaaggagagcggcggctctgtggaggcccccaggatgggcttcacccaccccccaggccacctgagcggctgccagagcagcctggccagcggggagactggaactggatctgctgaccccccaggcggcccccggcccggcctgacccggcgggcccctgtgaaggacaccccaggccgggccccagctgctgatgctgccccagctggccccagcagctgcctgggctag

SEQ ID NO: 344086 - DNA, 861 bp, Artificial Sequence
  derived and/or modified sequence
atggccgacaccatcttcggcagcggcaacgaccagtgggtgtgccccaatgacagacagctcgccttgcgtgccaaactgcaaacgggctggagtgtgcatacctatcagacagaaaaacaacggcggaagcagcatctttcacctgccgaagttgaggccattctccaggtcatacaacgcgccgagcggctggatgttctcgaacagcaacggataggtcggctcgtggaaaggcttgagacaatgcgacgaaatgtgatgggcaacggtctttcccaatgcctgttgtgcggtgaggtcttgggttttctggggagctcatccgttttctgcaaagattgtcgcaaggtgtggaagcgttcaggagcttggttctacaaggggctgccaaaatacatcctgcccttgaagacaccagggagagccgacgacccacatttccgtccccttccaacagaacctgcggaaagggagccccggtcttcagagacgtcccggatttacacctgggccaggggcagggtggtttccagcgactcggacagcgactctgatctcagcagctcgtccctggaagacagactcccgtctactggggtgcgcgatagaaaaggcgacaaaccctggaaagaaagcggaggttcagtcgaggcaccgagaatgggcttcactcatccccctggccatctttccggatgtcagagctccctggcatcaggtgagacggggactggcagcgctgaccctccaggcggtcccagacctggccttaccagacgggctcctgtcaaggacactccagggcgggcccccgcagcagatgccgctcccgcaggtcctagctcatgtttagggtag

SEQ ID NO: 344087 - DNA, 861 bp, Artificial Sequence
  derived and/or modified sequence
atggcggacactatatttgggagcggaaacgaccaatgggtgtgcccaaacgatcgacagctggccctgagggcaaagttgcagacaggctggtcggttcacacctaccaaactgagaagcagcgcaggaaacagcatttgtcacctgccgaggtggaggctatcctgcaggtcatacaacgtgctgagaggctagacgtccttgaacaacaaaggattgggcgtctggtggagcgcctcgagacaatgcggcgtaatgtgatggggaacgggctcagccagtgtctcttgtgtggagaggtcctgggctttctggggtcctcctcagtcttttgtaaggattgcagaaaagtctggaagcgatcaggcgcatggttctacaagggactaccaaaatacatcctgccactgaagacacccggacgcgcagacgacccgcacttccggccactgccgacagaaccggcagagcgtgaaccgagatcgtctgagacctcgaggatttatacttgggcaagaggcagagttgtgagttccgatagcgactccgatagcgacctgtcctcgagcagcctggaggaccgactaccgtcaacgggggttagagacaggaaaggggacaaaccctggaaagagtctggagggtccgttgaagctcctcgcatgggcttcacacatccccctgggcacctttccggctgccagagcagcctcgcgtctggagaaactggcactgggtccgcagatcctccagggggaccacgcccaggtctgactaggagggcacccgttaaggacacacccggaagggccccagctgccgacgccgcaccagcgggtccatccagctgcctgggctag

SEQ ID NO: 344088 - DNA, 2809 bp, Artificial Sequence
  derived and/or modified sequence
ccaccactgctgcctgtaagggctgttttggatacagaaaatgtgccctttctaacccaaaaaatgcttgaaatgtgtaaaagtggccagactaacagtcccaaagagggctgccctctaagaggaagcgtcccaaatctgttcagttttagagactacgtgactggggtacgtggtggggccttaccagacatccacgaggagaatccaggccttggtttggctccagctgggcctgcctggtggctgccacttattgacttaagtcccagtgattcagctcctcatctggaacacctcgggtcacccccgacaacggtggtgggagggagagcggcctcctcctccctggtggggcctgtctgggtgaagcccctctgttcccgaggatcgtctgccttattgaaaccatctaattggagatccgcagattaggctaccaagacacagctgcctccagcagaatttgtgtagtggacacttgtacgtgcactttggagacagcaagcatgaggcctgcagctgacagctttgagtggctgtgaacctgactatggaaaagatgtgactccccacccccagccgggtgctccgagccatggccgacaccatcttcggcagcgggaatgatcagtgggtttgccccaatgaccggcagcttgcccttcgagccaagctgcagacgggctggtccgtgcacacctaccagacggagaagcagaggaggaagcagcacctcagcccggcggaggtggaggccatcctgcaggtcatccagagggcagagcggctcgacgtcctggagcagcagagaatcgggcggctggtggagcggctggagaccatgaggcggaatgtgatggggaacggcctgtcccagtgtctgctctgcggggaggtgctgggcttcctgggcagctcgtcggtgttctgcaaagactgcaggaaggtctggaagaggtcgggggcctggttctacaaagggctccccaagtatatcttgcccctgaagacccctggccgagctgatgacccccacttccgacctttgcccacggaaccggcagagcgagagcccagaagctctgagaccagccgcatctacacgtgggcccgaggaagagtggtttccagtgacagtgacagtgactcggatcttagctcctccagcctagaggacagactcccatccactggggtcagggaccggaaaggcgacaaaccctggaaggagtcaggtggcagcgtggaggcccccaggatggggttcacccacccgccgggccacctctctgggtgccagagcagcctggccagtggtgagacggggacaggctctgctgacccgccagggggaccccgccccgggctgacccgaagggccccggtaaaagacacacctggacgagcccccgctgctgacgcagctccagcaggcccctccagctgcctgggctgaggtgtctggtgcctggaacagacttccctgtggaggattcctgccagaccctgcccggctcctccctgaccggtccttgtgccctcaccagacaccctgttggccatgactcaacaaaccagtgttgggagccgtctgcctccccagctcagtgcctttctgcaccccttctctcctggggagctgtctgcatccgccaccccctccaaccactgccctcagcccccgaccttatttattaccctcccctcccacacccccaatctacctggtgatgattttaagtttgcgcgtgtcttgggttgggctggggggtttcccacatgcagtgtcagaggggccgcccggtggggctatctccgttgctatattaatggcaagactaaatgaaacctagggcacggcctccgaagctgcgtgtggccccttagaggtgagcatcagagccagagcagtgagggggagactcacccaccctctccctctcccttcagctctgggaggcaggcgcagtgcccccctcccatgggctggcccaggaccgtgggtgaaacctgggtctgtttagtttctttggtttttgtatgtttgtttgtttttgacacagtctcgctttgttgcccaggctggggtgcagtggcacgatcgcggctcactgcaacctccacctcccgggctcaagcgattctctcacctcagcctcctgagtaggtgggattacagatgcccgccaccacacccagttaatttttgtatttttagaagagatggggtttctccatgttggccaggctggtcttgaactcctggtctcaagtgatctgcccgcctcggcctcccaaagtgctgggattacaggtgtgagccaccgcacccaatcctattaggtttctttgaatcccctcatggcctgcctggtttttgctcagcctgtcttcagcttgaggagctgggaagctctggtggatgctatgaactcacttgctgaagagcagcgttcaggtgcatccccagccagggcacgtggctccctcagccatgaattcacttctcttcaggaggtttggcttggcatgaaaatacttcattcagagtatgggcaaatgcttctggaaaacccttccctgaagagagagaacgtgtgtgtgtgtgtcggtgatcacaccctcccatccttcctgcctcctgccccaaaccccgggttcctgggtctggaagggccttctctccaagctgggagctcctgggcccccaccattcactttttgtccttgctgctggcaaacagtaaagaaactcactttccctgtggcacgttatgcttcagaattaaaacaatgaagattaaaa

SEQ ID NO: 344089 - DNA, 861 bp, Artificial Sequence
  derived and/or modified sequence
atggcagatacaatttttggatctggtaatgatcagtgggtctgccccaacgacagacagttagctctcagggccaagctgcaaaccggctggagcgtgcacacatatcaaaccgaaaagcagcggcgtaaacaacatctcagtccggctgaggtggaggctatcttgcaggtgatccagagggccgagcggctggacgtgttagagcagcagcgcatcggccgactggttgagcgactcgaaacgatgagacgaaatgtcatgggcaacggcctgtctcagtgtctactgtgtggcgaggtgttggggttccttggctcatcatccgtcttctgcaaggactgtcgcaaggtctggaaacgctcaggcgcctggttttataagggtctgccaaagtatatcttgcccttgaagaccccaggaagagctgatgatcctcatttcagacccctgccgacagagcctgctgagcgcgaaccgaggtcttccgagacatctagaatatatacctgggcccgagggagggtggttagctctgattcagattcggattccgacctctcttcctccagcctcgaggaccgacttccctccacaggagtacgagacaggaaaggtgataaaccttggaaggagagtgggggcagcgtcgaagctccgcgtatgggtttcactcatccccctggtcacctgtcgggttgccaatcatcgcttgcttccggagaaaccggcactggatcggctgacccacccgggggtccacgcccaggcttgactcggcgggctccagttaaggatacaccggggagggcccccgccgcagacgcagcgccagctggcccttcgagttgtttgggctag

SEQ ID NO: 344090 - DNA, 861 bp, Artificial Sequence
  derived and/or modified sequence
atggctgatacaatctttgggtccggaaatgaccagtgggtctgtcctaatgacaggcagcttgcccttagagcgaaactccagaccggttggagcgtgcacacataccagactgaaaagcaacgacgcaaacagcatctctcacctgctgaagtggaagcaatcctgcaggttatccagagagcagaacgtctggacgtacttgagcaacagaggatcgggcgcctcgtcgagagactggaaactatgagacgcaacgtcatgggaaacggcctgtcacagtgtttgctctgtggtgaagtgttgggatttctggggtcctcctcggtgttctgtaaggactgccgtaaggtgtggaaacggtctggtgcatggttctataaaggactgcctaagtacattttgccgctcaagaccccaggcagagctgatgatccacatttcaggcccctacctaccgaacctgctgagcgtgagcctagatcttctgaaaccagcagaatctatacttgggcgcgcggacgggtggtgtccagtgattcagattccgactctgatctgagctccagctccctggaggataggctccctagcactggcgtaagagatcgcaagggcgataaaccctggaaagagtcagggggcagtgtggaggccccccgcatggggtttacccacccaccgggtcaccttagcggctgtcagtctagtttggcctctggtgagaccggtaccgggtcagcagacccacctggggggcctcggcctgggctcaccaggagggcgccggtgaaagatactcccggcagggcaccggctgctgacgccgctcctgctggacccagcagttgccttggttag

SEQ ID NO: 344091 - DNA, 861 bp, Artificial Sequence
  derived and/or modified sequence
atggccgacaccatcttcggcagcggcaacgaccagtgggtgtgccctaacgatcgacagttggccctcagggcgaaattgcagactgggtggagcgtgcatacctatcagactgagaagcagaggagaaagcagcatttgtctcctgcagaagtagaggcaatattgcaggtaatacagagagcagaaagactcgatgtgctagaacagcagaggatcggcagactggtcgaacgattggagacaatgcgaaggaatgtgatgggcaatggcctgtcacaatgtcttctgtgtggagaggtcttgggcttccttggctcatcaagcgttttctgcaaagattgtcgcaaagtatggaagcgtagcggggcctggttctataaaggtctccccaagtatattctgcctctgaagactcccgggagggcagatgacccccatttccgacctctgcctactgagcctgccgaacgggagcctaggagcagtgagacatccagaatctatacatgggcaagaggtagggtcgtgtccagtgacagtgactcggacagtgatttgtcgagtagctcactggaggatcggctgccaagcaccggtgtgcgggacaggaaaggggacaaaccttggaaagaaagtggcgggtctgttgaagcgcctagaatggggtttacacatccaccaggacacctttccggttgccagagctccctggcctcgggagagaccggaaccggttccgctgaccctccagggggaccaagacctggcctgacgcggcgtgcaccagtcaaagacaccccaggtagagcgccagcagccgatgcagctccagcaggaccttcttcttgccttggatag

SEQ ID NO: 344092 - DNA, 861 bp, Artificial Sequence
  derived and/or modified sequence
atggccgacaccatcttcggcagcggcaacgaccagtgggtgtgccccaatgaccggcagttggccctaagagcgaagctccagaccggctggagcgtgcacacataccagaccgaaaaacagcgccgcaagcagcacctatctccagccgaggtggaggcaatcctgcaggtaattcagcgggcagaaagactagatgtcctggagcagcagcgcattggcaggcttgtcgagaggctcgaaaccatgaggaggaacgtgatgggaaacggcctgagccagtgcctgctctgtggggaggtcctcgggtttctgggcagttcgagcgtcttctgcaaagactgtcggaaagtgtggaaacgaagcggcgcttggttttacaagggcctccccaaatatatactccctctgaagactcccggccgggccgacgaccctcacttccgccccctgcccactgagcccgccgagcgagagcccaggagtagtgaaacttcccgaatctacacttgggccagagggcgggtggtctcgtcagatagcgattcggatagcgacctgtctagttcttctttggaggaccgccttccctctaccggggtacgggatcgcaaaggggacaaaccatggaaggagtccggcggcagcgtggaggctccacggatgggcttcacacaccctcctggacatctctcgggttgccagagttcactcgcgagcggggagacggggacggggtcagccgacccacccggcggcccccgccctggactgaccagaagggctccagtgaaagatactcctggcagagccccggctgctgacgccgcgcctgcagggccctcatcttgtctcggttag

SEQ ID NO: 344093 - DNA, 861 bp, Artificial Sequence
  derived and/or modified sequence
atggctgacacaatttttggctcaggtaatgaccagtgggtttgccccaacgaccgacaattggctcttcgagctaagttgcagaccggatggagcgtccatacctaccagaccgagaagcaaagacgcaaacagcacctttcaccagctgaagtggaggcaatcctgcaagtaattcaaagagctgagagacttgatgttttggagcagcagcgcattgggaggctggttgagagactcgagactatgcgcagaaatgtgatgggaaatggactttctcagtgtctcctttgtggtgaggttctgggatttttgggaagctctagtgtgttttgtaaagactgccggaaggtatggaagagaagtggcgcttggttctacaaagggctgccgaagtacatcctgcccttgaagactcccggaagagcggatgatcctcacttccggccactgcccacagagcccgctgaaagagaacctcgaagctccgagactagtagaatctacacatgggccaggggaagagtcgtgtcttcggactctgattcagactctgacttatcttctagttccctggaggaccgattgccctccacgggcgtgcgagatcggaagggcgataagccatggaaagaatccggagggagcgtcgaagccccacgaatggggttcacccaccctcccggacacctctccgggtgtcagtcttcactagcaagcggcgagactgggacaggcagcgcagaccctcccggtggaccaagacctggactgaccaggcgagcacccgtcaaggacaccccgggtagagccccagccgcagatgccgcacctgcaggaccatcatcatgtctgggttag

SEQ ID NO: 344094 - DNA, 861 bp, Artificial Sequence
  derived and/or modified sequence
atggctgacactatttttgggtctggcaacgatcagtgggtttgtcctaacgacagacagttagcattgagggccaagctgcaaacagggtggtcagtccacacttaccaaacagaaaagcagagaaggaaacagcacctgagcccggcagaggtggaggctattttacaggtcatccagagagctgagcggctcgacgtgctagagcagcagcgcatcgggaggttggtcgagaggctggagactatgcgcagaaacgtcatgggaaacggacttagccaatgcctgctgtgcggcgaagtgttgggtttccttggctcttccagcgttttttgtaaggattgccgtaaagtctggaagcgaagcggcgcttggttctataaaggactgccgaagtacatcctgcccctcaaaaccccaggacgagcagacgacccacattttcgcccattaccaactgagcctgcggagagggagcctcggtcaagcgaaacatcgaggatatacacatgggccaggggtagggtcgtgtcttccgactcagatagtgactcagatctgagctcctcgtccttagaggatagactgccgtccaccggcgtgcgtgacaggaaaggggataaaccatggaaggaaagtgggggttccgtagaggccccacgaatgggatttacccacccccctgggcacctcagcggatgccagtccagcttagcaagtggtgagacaggcactggctcagcagatccccctggagggcctcggcctggcctcacccgaagggctcctgtcaaggatactccaggcagggcgccagccgctgacgcagcaccagccggtcccagcagctgcctgggatag

SEQ ID NO: 344095 - DNA, 2493 bp, Artificial Sequence
  derived and/or modified sequence
acaacggtggtgggagggagagcggcctcctcctccctggtggggcctgtctgggtgaagcccctctgttcccgaggatcgtctgccttattgaaaccatctaattggagatccgcagattaggctaccaagacacagctgcctccagcagaatttgtgtagtggacacttgtacgtgcactttggagacagcaagcatgaggcctgcagctgacagctttgagtggctgtgaacctgactatggaaaagatgtgactccccacccccagccgggtgctccgagccatggccgacaccatcttcggcagcgggaatgatcagtgggtttgccccaatgaccggcagcttgcccttcgagccaagctgcagacgggctggtccgtgcacacctaccagacggagaagcagaggaggaagcagcacctcagcccggcggaggtggaggccatcctgcaggtcatccagagggcagagcggctcgacgtcctggagcagcagagaatcgggcggctggtggagcggctggagaccatgaggcggaatgtgatggggaacggcctgtcccagtgtctgctctgcggggaggtgctgggcttcctgggcagctcgtcggtgttctgcaaagactgcaggaaggtctggaagaggtcgggggcctggttctacaaagggctccccaagtatatcttgcccctgaagacccctggccgagctgatgacccccacttccgacctttgcccacggaaccggcagagcgagagcccagaagctctgagaccagccgcatctacacgtgggcccgaggaagagtggtttccagtgacagtgacagtgactcggatcttagctcctccagcctagaggacagactcccatccactggggtcagggaccggaaaggcgacaaaccctggaaggagtcaggtggcagcgtggaggcccccaggatggggttcacccacccgccgggccacctctctgggtgccagagcagcctggccagtggtgagacggggacaggctctgctgacccgccagggggaccccgccccgggctgacccgaagggccccggtaaaagacacacctggacgagcccccgctgctgacgcagctccagcaggcccctccagctgcctgggctgaggtgtctggtgcctggaacagacttccctgtggaggattcctgccagaccctgcccggctcctccctgaccggtccttgtgccctcaccagacaccctgttggccatgactcaacaaaccagtgttgggagccgtctgcctccccagctcagtgcctttctgcaccccttctctcctggggagctgtctgcatccgccaccccctccaaccactgccctcagcccccgaccttatttattaccctcccctcccacacccccaatctacctggtgatgattttaagtttgcgcgtgtcttgggttgggctggggggtttcccacatgcagtgtcagaggggccgcccggtggggctatctccgttgctatattaatggcaagactaaatgaaacctagggcacggcctccgaagctgcgtgtggccccttagaggtgagcatcagagccagagcagtgagggggagactcacccaccctctccctctcccttcagctctgggaggcaggcgcagtgcccccctcccatgggctggcccaggaccgtgggtgaaacctgggtctgtttagtttctttggtttttgtatgtttgtttgtttttgacacagtctcgctttgttgcccaggctggggtgcagtggcacgatcgcggctcactgcaacctccacctcccgggctcaagcgattctctcacctcagcctcctgagtaggtgggattacagatgcccgccaccacacccagttaatttttgtatttttagaagagatggggtttctccatgttggccaggctggtcttgaactcctggtctcaagtgatctgcccgcctcggcctcccaaagtgctgggattacaggtgtgagccaccgcacccaatcctattaggtttctttgaatcccctcatggcctgcctggtttttgctcagcctgtcttcagcttgaggagctgggaagctctggtggatgctatgaactcacttgctgaagagcagcgttcaggtgcatccccagccagggcacgtggctccctcagccatgaattcacttctcttcaggaggtttggcttggcatgaaaatacttcattcagagtatgggcaaatgcttctggaaaacccttccctgaagagagagaacgtgtgtgtgtgtgtcggtgatcacaccctcccatccttcctgcctcctgccccaaaccccgggttcctgggtctggaagggccttctctccaagctgggagctcctgggcccccaccattcactttttgtccttgctgctggcaaacagtaaagaaactcactttccctgtggcacgttatgcttcagaattaaaacaatgaagatt

SEQ ID NO: 344096 - DNA, 1204 bp, Artificial Sequence
  derived and/or modified sequence
atctggaacacctcgggtcacccccgacaacggtggtgggagggagagcggcctcctcctccctggtggggcctgtctgggtgaagcccctctgttcccgatgtgactccccacccccagccgggtgctccgagccatggccgacaccatcttcggcagcgggaatgatcagtgggtttgccccaatgaccggcagcttgcccttcgagccaagctgcagacgggctggtccgtgcacacctaccagacggagaagcagaggaggaagcagcacctcagcccggcggaggtggaggccatcctgcaggtcatccagagggcagagcggctcgacgtcctggagcagcagagaatcgggcggctggtggagcggctggagaccatgaggcggaatgtgatggggaacggcctgtcccagtgtctgctctgcggggaggtgctgggcttcctgggcagctcgtcggtgttctgcaaagactgcaggaaggtctggaagaggtcgggggcctggttctacaaagggctccccaagtatatcttgcccctgaagacccctggccgagctgatgacccccacttccgacctttgcccacggaaccggcagagcgagagcccagaagctctgagaccagccgcatctacacgtgggcccgaggaagagtggtttccagtgacagtgacagtgactcggatcttagctcctccagcctagaggacagactcccatccactggggtcagggaccggaaaggcgacaaaccctggaaggagtcaggtggcagcgtggaggcccccaggatggggttcacccacccgccgggccacctctctgggtgccagagcagcctggccagtggtgagacggggacaggctctgctgacccgccagggggaccccgccccgggctgacccgaagggccccggtaaaagacacacctggacgagcccccgctgctgacgcagctccagcaggcccctccagctgcctgggctgaggtgtctggtgcctggaacagacttccctgtggaggattcctgccagaccctgcccggctcctccctgaccggtccttgtgccctcaccagacaccctgttggccatgactcaacaaaccagtgttgggagccgtctgcctccccagctcagtgcctttctgcaccccttctctcctggggagctgtctgcatccgccaccccctcc

SEQ ID NO: 344097 - protein, 219 aa, Artificial Sequence
  derived and/or modified sequence
MAPPSRHCLLLISTLGVFALNCFTKGQKNSTLIFTRENTIRNCSCSADIRDCDYSLANLMCNCKTVLPLAVERTSYNGHLTIWFTDTSALGHLLNFTLVQDLKLSLCSTNTLPTEYLAICGLKRLRINMEAKHPFPEQSLLIHSGGDSDSREKPMWLHKGWQPCMYISFLDMALFNRDSAFKSYSIENVTSIANNFPDFSYFRTFPMPSNKSYVVTFIY

SEQ ID NO: 344098 - DNA, 93 bp, Artificial Sequence
  derived and/or modified sequence
aacaagtggacgaaggatatgaacagacacttctcaagacatttatgcagccaacagacacacgaaaaaatgctcatcatcactggccatcag

SEQ ID NO: 344099 - DNA, 964 bp, Artificial Sequence
  derived and/or modified sequence
ctgtggagtggagaggcgaggcctcacggtggaactctcagatgacagcatgcaggcaccaagagagtggacgcacatacagaagacagccatgcactgagctggggacatgcaacaataacaggccatacaatgaaagtcgctgaagaagaatatgaattttgcctgcggatttgctaacactcgacaatcctaggaggtgagttccaacaaattggttcaaaaagaggggggataaacacgctggcccatgctgggcaagcatggcaccaccttccaggcactgtcttcttctgatcagcactctgggtgtctttgcacttaactgcttcaccaaaggtcagaagaacagcacgctcatcttcacaagggaaaacaccattcggaactgcagctgttctgcggacatccgggattgtgactacagtttggccaacctgatgtgcaactgtaaaaccgtcctgccccttgcagtagagcgaaccagctacaatggccatctgaccatctggttcacggacacatctgcgctgggccacctgctgaacttcacgctggtccaagacctgaagctttccctgtgcagcaccaacactctccccactgaatacctggctatttgtggtctgaagaggctgcgcatcaacatggaggccaagcatcccttcccagagcagagcttactcatccatagcggtggggacagtgactccagagagaagcccatgtggttacacaaaggctggcagccatgtatgtatatctcattcttagatatggctcttttcaacagggactcagcctttaaatcatatagtattgaaaacgttaccagcattgccaacaactttcctgacttttcttactttagaaccttcccaatgccaagcaacaaaagctatgttgtcacatttatttactagcataataactgtgtccagctgcctggaactttggcaaatga

SEQ ID NO: 344100 - DNA, 1009 bp, Artificial Sequence
  derived and/or modified sequence
accagctgtcaagccagggtgaaggatccgtggccaggcagaggtctgtggagtggagaggcgaggcctcacggtggaactctcagatgtgagttccaacaaattggttcaaaaagaggggggataaacacgctggcccatgctgggcaagcatggcaccaccttccaggcactgtcttcttctgatcagcactctgggtgtctttgcacttaactgcttcaccaaaggtcagaagaacagcacgctcatcttcacaagggaaaacaccattcggaactgcagctgttctgcggacatccgggattgtgactacagtttggccaacctgatgtgcaactgtaaaaccgtcctgccccttgcagtagagcgaaccagctacaatggccatctgaccatctggttcacggacacatctgcgctgggccacctgctgaacttcacgctggtccaagacctgaagctttccctgtgcagcaccaacactctccccactgaatacctggctatttgtggtctgaagaggctgcgcatcaacatggaggccaagcatcccttcccagagcagagcttactcatccatagcggtggggacagtgactccagagagaagcccatgtggttacacaaaggctggcagccatgtatgtatatctcattcttagatatggctcttttcaacagggactcagcctttaaatcatatagtattgaaaacgttaccagcattgccaacaactttcctgacttttcttactttagaaccttcccaatgccaagcaacaaaagctatgttgtcacatttatttactagcataataactgtgtccagctgcctggaactttggcaaatgatgaataatttgcagaaggaatctggaaataaggccgtgagataggtatccctacccacaactgtgcctctctccgcaggctccatttgcaacacagccacacataccaataaccagctctctgttctgctctgtgcccaactgcgagaacactttt

SEQ ID NO: 344101 - DNA, 1155 bp, Artificial Sequence
  derived and/or modified sequence
cctccgaagacggaaaagaacagcaagtgcaagaccacgcattccaccctggcttgcagattaaaccagctgtcaagccagggtgaaggatccgtggccaggcagaggtctgtggagtggagaggcgaggcctcacggtggaactctcagatgacagcatgcaggcaccaagagagtggacgcacatacagaagacagccatgcactgagctggggacatgcaacaataacaggtgagttccaacaaattggttcaaaaagaggggggataaacacgctggcccatgctgggcaagcatggcaccaccttccaggcactgtcttcttctgatcagcactctgggtgtctttgcacttaactgcttcaccaaaggtcagaagaacagcacgctcatcttcacaagggaaaacaccattcggaactgcagctgttctgcggacatccgggattgtgactacagtttggccaacctgatgtgcaactgtaaaaccgtcctgccccttgcagtagagcgaaccagctacaatggccatctgaccatctggttcacggacacatctgcgctgggccacctgctgaacttcacgctggtccaagacctgaagctttccctgtgcagcaccaacactctccccactgaatacctggctatttgtggtctgaagaggctgcgcatcaacatggaggccaagcatcccttcccagagcagagcttactcatccatagcggtggggacagtgactccagagagaagcccatgtggttacacaaaggctggcagccatgtatgtatatctcattcttagatatggctcttttcaacagggactcagcctttaaatcatatagtattgaaaacgttaccagcattgccaacaactttcctgacttttcttactttagaaccttcccaatgccaagcaacaaaagctatgttgtcacatttatttactagcataataactgtgtccagctgcctggaactttggcaaatgatgaataatttgcagaaggaatctggaaataaggccgtgagataggtatccctacccacaactgtgcctctctccgcaggctccatttgcaacacagccacacataccaataaccagctctctgttctgctctgtgcccaactgcgagaacacttttg

SEQ ID NO: 344102 - DNA, 3889 bp, Artificial Sequence
  derived and/or modified sequence
aggccatacaatgaaagtcgctgaagaagaatatgaattttgcctgcggatttgctaacactcgacaatcctaggaggtgagttccaacaaattggttcaaaaagaggggggataaacacgctggcccatgctgggcaagcatggcaccaccttccaggcactgtcttcttctgatcagcactctgggtgtctttgcacttaactgcttcaccaaaggtcagaagaacagcacgctcatcttcacaagggaaaacaccattcggaactgcagctgttctgcggacatccgggattgtgactacagtttggccaacctgatgtgcaactgtaaaaccgtcctgccccttgcagtagagcgaaccagctacaatggccatctgaccatctggttcacggacacatctgcgctgggccacctgctgaacttcacgctggtccaagacctgaagctttccctgtgcagcaccaacactctccccactgaatacctggctatttgtggtctgaagaggctgcgcatcaacatggaggccaagcatcccttcccagagcagagcttactcatccatagcggtggggacagtgactccagagagaagcccatgtggttacacaaaggctggcagccatgtatgtatatctcattcttagatatggctcttttcaacagggactcagcctttaaatcatatagtattgaaaacgttaccagcattgccaacaactttcctgacttttcttactttagaaccttcccaatgccaagcaacaaaagctatgttgtcacatttatttactagcataataactgtgtccagctgcctggaactttggcaaatgatgaataatttgcagaaggaatctggaaataaggccgtgagataggtatccctacccacaactgtgcctctctccgcaggctccatttgcaacacagccacacataccaataaccagctctctgttctgctctgtgcccaactgcgagaacacttttgaaaaacaaaagaaaaagaaaccaaaaaaccaacttgattccgtccagggacatgtcttgggagccagctaggcttggtctctgcaactagaagcctgcagggaaatgtcccgtcagaaatggagaaagcaatacaccctagagactgcttagtggagctcctcctagaaggtgacccccaagaaacatatcttctttcaaaatactgccttaatttttttctgtttcattttgtgaaattgcttggaattcccctaagtagagaataatcaatttcagaggtttggggactatgagttttataaaatggtcgggcacagtggctcacacctgtaatcccagcactttgggaggccgaggcgggcggatcacctgaggtcgggagttcaagaccagcctgaccaacatggagaaaccccatctctactaaaaatacaaaattagccgggcatggtggcacatgcctgtaatcccagctactcggaggctgagcaggagaatcgcttgaacctgggaggcggaggttgcagtgagccaaaatcgtgccactgcactctacactccagcctgggtgacagagtcagagatcacaccattgcactccagcctgggcaacaagagcgaaactccatctcaaaaaaaaaaaaaataataataataaaatgattaggttctcttaaactgatcttttctaaataccttgctaagaatagatgcaccaagaaataagaggttggagactgtgtttgttggggtggaggtaccacaggcatggatagggtaagaccttaggatcaaatggggggaccagtgttccagagagagggatgcagcagtgaaaattggaggacacaaaacacatttgcatctatctcaaaattttgcttagagcacagcctaactgcaaggaaagttcttcacttctagcctttcacattcttttccttttctttctttgcatggtctgtctttgcccctgctataccatttcaccaatttctcttctcattttcatcttctttctcctactccttttcctcttgctccaaaaatcagaacttagatgaataccattcaagctatgtttaactacattaggggctagcctgggaatttactcaccacttacaacattatttctattgttaaaagtgctcaaattattaacagataattaacaaaaaaacatctaaggctcaatccatttggaaggttaagattgcaaagtgaaggcattttatatgacacggttaacacaaaatgattttatgtgtgctgataaaaggaaccaaagcaacatacttttgaaaaaattaaatggattcattattgtacaaagaaaattttccctcatagagacgcaacttgccattaaagtggactgtaaagaatccatggcttgggaggccgaggcaggcggatcacctgaggtcgggagttcgagaccagcctgaccaacatggagaaaccctgtctctactaaaaatacaaaataagccaggcgtggtggtgcatgcctgtaatcccagctactcaggaggctgaggcaggagagtcacttgaacctgggaggcggaggttgcagtgagccaagattgcgccactgcactccagcctgggcaacaagagcaaaactccatctcaaaaaaaaaaaaagaaaagaaaaaagaatccactgcaattgtgatacaaatgtctaaacctggagtggaatgaatttgaaacattattgcattcatgataccataatgataagaaatagtccatgacttaacaggatatcctggggttgatgactttagatcacatacatcacttttttttttttttcacttaaccttaacatagagtaactgaaataatctgcaatttctacatttgcttaattggtgggggatttagccattcaggctaattagcatgagcccatgtcagtgtttaaattaggccaaaacaaagaccaaagtatgaattttaatagaaaaatgtgacctcattactgacattgtactgcagataatgttaaagtgaaagaaaaaataaggaaaaggggaaaaaggaggaaaaaggaaagcaagaaaagacaagtgaaaagattagtaatatattcattgtcattagttactgaaaatataacaaattgaattttaataatttttattaataaagtataaaattaaatgatgatagaaagtatatgcctcctataaatatcttccatttggtagcttttaatagtttcaaagccctttcacatatgttttaagtaagtcttttgagaaatacttgtgagttaatgggacttaaaccaacagaaaaggaaagctaatttagttataaatcaagcctgaggtttcagatttctggactaaaaatatggttcagtttgtgctgctgtgggatgaagaatgggcagagaaaatccacagtgcaggcatggggattaatggcatttggcacttagctgcagggtttgggggacaacagggagtggtgggatggtggttaagtaagggtgcatgccccacctgaagctctacagtggctcagctccaactgagtgttgccatgggaaaatctgatggggccagatctgatccttcagagaatgaggaattccaggttgttatgtgaattctcacaatttgtaaatgtcggcttgccattcagcttttttgtttgtttgttttaaataatatcatgtgggtcaaacaaactatgttaatggtagccatctggcctggggctagtagcttattgcctctggccagtggtgtgctaacaaaagtttaaccagcagctctccaacaaaaaagggaggtgggctgctctgcctatgcagtagccatgcttttattcctttactttgttaataaacttgctttcacttt

SEQ ID NO: 344103 - DNA, 660 bp, Artificial Sequence
  derived and/or modified sequence
atggccccccccagcagacactgcctgctgctgatcagcaccctgggcgtgttcgccctgaactgcttcaccaagggccagaagaacagcaccctgatcttcaccagagagaacaccatcagaaactgcagctgcagcgccgacatcagagactgcgactacagcctggccaacctgatgtgcaactgcaagaccgtgctgcccctggccgtggagagaaccagctacaacggccacctgaccatctggttcaccgacaccagcgccctgggccacctgctgaacttcaccctggtgcaggacctgaagctgagcctgtgcagcaccaacaccctgcccaccgagtacctggccatctgcggcctgaagagactgagaatcaacatggaggccaagcaccccttccccgagcagagcctgctgatccacagcggcggcgacagcgacagcagagagaagcccatgtggctgcacaagggctggcagccctgcatgtacatcagcttcctggacatggccctgttcaacagagacagcgccttcaagagctacagcatcgagaacgtgaccagcatcgccaacaacttccccgacttcagctacttcagaaccttccccatgcccagcaacaagagctacgtggtgaccttcatctactag

SEQ ID NO: 344104 - DNA, 660 bp, Artificial Sequence
  derived and/or modified sequence
atggccccccctagccgccactgtcttctactcatttctacgctcggagtctttgctttaaattgttttacgaaaggccagaagaattccactctcatattcaccagggaaaacacaattaggaattgttcctgctcggccgacattagggactgcgattacagtcttgcaaatttaatgtgtaactgcaaaaccgtgttgcccctcgccgttgaaagaacttcgtacaatggccatctcactatatggtttacggacacaagcgccctggggcacctgctgaatttcacactggttcaagacctgaagttatctttgtgttcgaccaataccctgcccaccgaatatctcgccatttgcggcttaaagcgtctcaggatcaatatggaagccaagcaccctttccctgaacagtcccttctgatccactccgggggggattctgactctagggaaaagccaatgtggctgcacaaaggatggcaaccttgcatgtatatctctttcctcgatatggctctgttcaatcgtgactcagccttcaagagttatagcatagagaatgtgacaagcattgccaacaattttccagatttttcctattttcggacgtttcctatgccttcaaataagtcatatgtagtaacattcatctattag

SEQ ID NO: 344105 - DNA, 660 bp, Artificial Sequence
  derived and/or modified sequence
atggcacccccaagcagacattgcctgctgctaatctccaccttgggcgttttcgcgcttaactgttttactaagggccagaagaactccacgctgatcttcacacgcgagaacacgattcgcaattgcagctgttctgcggacattagggattgcgattactcactggcaaacctgatgtgtaattgcaagacggtactgccactggcagtcgaaagaacgtcctacaatggtcacctgaccatctggttcacagacacaagtgcactgggacacctgctgaatttcacactggtccaggacctgaaactgtctctgtgttcaactaatactctccccaccgaatatttggccatttgtggtctcaaaagactgcggatcaacatggaagccaaacatccctttcccgaacagtctctacttatccacagtggaggcgacagcgactctagagagaagcccatgtggctgcacaagggatggcaaccttgcatgtatatttccttcctcgacatggcactgtttaatagagactcggctttcaaatcttactctattgagaacgtgacatccattgccaacaacttccctgacttttcctacttcaggacttttcccatgccctcaaacaagtcttatgtggttacgtttatctactag

SEQ ID NO: 344106 - DNA, 660 bp, Artificial Sequence
  derived and/or modified sequence
atggcacctcccagccgacattgtctgcttctaatttccactctgggagtgttcgccttgaactgttttactaagggccagaaaaactccactctcatcttcacaagagagaacactatacgcaattgttcctgcagcgccgacatccgggactgtgattactctctggcaaatcttatgtgcaactgtaagacagtgcttcccctggctgttgagcgcacctcctacaacggtcaccttacaatctggtttacagatacttccgctctgggccatctcctgaactttacactggtgcaggatctcaaactttccctttgcagcacaaacactctgccaactgaatatttagccatttgcggtttgaagcggctgcgaattaatatggaggctaagcaccccttcccagaacagtctctcttaatacacagcggaggcgattcggactctcgtgagaaacctatgtggctgcataagggatggcagccatgtatgtacataagcttcctggacatggccctctttaatagagattctgcctttaaatcctattccatcgagaatgtgacctccatcgcaaacaacttcccggacttttcatattttaggacttttcctatgccatccaataagagctatgtggtcactttcatttattag

SEQ ID NO: 344107 - DNA, 660 bp, Artificial Sequence
  derived and/or modified sequence
atggctccaccctcacggcactgtctgcttctcatttccactcttggagtgtttgctcttaactgttttacaaaagggcaaaaaaattccacccttatcttcactcgcgaaaatacaatcagaaactgcagctgttctgctgacatccgcgactgtgattacagcctcgccaacctgatgtgcaactgtaagacagtactacctttggcagtggagagaacaagctacaatggccacctaaccatttggtttaccgatacttccgcactgggccacctgttgaactttacactcgtccaggacctgaaactttcattgtgctccacaaacactctgcccacggagtacctggcaatctgcggtcttaagcgtcttagaataaacatggaagctaaacatcctttccccgaacaatctttgctgattcactctggcggcgatagtgattctagagaaaagcccatgtggctgcataagggctggcagccgtgcatgtatatttcctttctggacatggccctatttaacagagatagtgccttcaagtcttactcaattgagaacgtgacctctatcgctaacaatttccctgatttctcttattttagaacgttccccatgcccagtaacaaatcctacgtcgtcacgtttatctactag

SEQ ID NO: 344108 - DNA, 660 bp, Artificial Sequence
  derived and/or modified sequence
atggccccacccagccgccactgcctgctgctgatcagcaccctgggcgtgtttgccctgaactgcttcaccaagggccagaagaacagcaccctcatcttcacccgggagaacaccatccggaactgcagctgcagcgctgacatccgggactgtgactacagcctggccaacctgatgtgcaactgcaagacagtgctgcccctggccgtggagaggaccagctacaacggccacctgaccatctggttcacagacaccagcgccctgggccacctgctgaacttcaccctggtgcaggacctgaagctgagcctgtgcagcaccaacaccctgcccacagagtacctggccatctgtggcctgaagaggctgcgcatcaacatggaggccaagcaccccttccctgagcagagcctgctgatccacagcggcggggacagcgacagccgggagaagcccatgtggctgcacaagggctggcagccctgcatgtacatctccttcctggacatggccctcttcaacagagattctgccttcaagagctacagcattgaaaatgtgaccagcatcgccaacaacttcccagacttctcctacttccgcaccttccccatgcccagcaacaagagctatgtggtgaccttcatctactag

SEQ ID NO: 344109 - DNA, 660 bp, Artificial Sequence
  derived and/or modified sequence
atggccccccccagccggcactgcctgctgctgatcagcaccctgggcgtgtttgccctcaactgttttactaagggtcagaaaaacagtacactaattttcacccgtgagaatacaatccggaattgctcttgcagtgccgatattagggactgtgactattccctcgctaacctgatgtgcaactgcaaaacagtgctgccactggccgtcgaacgcactagctacaacggacaccttactatttggtttactgatacatccgcgctcggacacctcctcaatttcactcttgtgcaggatctcaaactgtccctgtgctccactaataccctgcccactgaatatctcgccatctgtgggctgaagcgcctgcgaataaacatggaggccaaacaccctttcccagaacagtcactgctcattcactctggcggtgattcagactctcgggaaaagccaatgtggttacacaaggggtggcagccatgcatgtatatcagtttcctggatatggccctttttaaccgcgactcagcgttcaagtcatattccattgagaatgtgacatctatagcaaacaacttcccggatttctcttactttcgcacctttcccatgcccagcaacaagtcctacgttgttacattcatttactag

SEQ ID NO: 344110 - DNA, 660 bp, Artificial Sequence
  derived and/or modified sequence
atggccccccccagccggcactgcctgctgctgatcagcaccctgggcgttttcgcactcaactgttttacgaagggacagaaaaactctactcttatcttcactcgcgagaatacaataaggaattgtagctgcagtgctgatatcagggattgtgactacagtctcgccaatttgatgtgcaactgcaaaacggtgctacctctggcagtcgaaaggacctcctacaatggccacctgacgatatggtttaccgatacttctgctctcggccacctcctcaactttactcttgtgcaagacctcaagctgtcactgtgctctaccaatactcttcccaccgagtatcttgccatctgtggcctaaagagacttaggattaacatggaagctaaacatcccttccctgagcagtctcttctcatccactcaggcggggactctgacagcagagaaaaacccatgtggttacacaagggatggcagccttgtatgtatatttcttttctcgacatggccctcttcaatcgcgacagtgccttcaaaagctattctatcgagaatgtgacctctattgcgaacaacttccccgacttctcttactttaggaccttccctatgccttctaacaaatcctatgtggtgaccttcatctactag

SEQ ID NO: 344111 - DNA, 660 bp, Artificial Sequence
  derived and/or modified sequence
atggccccccccagccggcactgcctgctgctgatcagcaccctgggagtgtttgccctcaattgttttacaaagggtcagaaaaactctaccttaatttttactcgggaaaataccattaggaattgctcatgctccgccgatattagggactgtgactattccctcgcaaaccttatgtgcaattgcaaaacagtactgcctcttgctgtagagcgcacatcgtacaacggccacctcaccatttggttcacagacacctccgccctgggccacttacttaactttactctcgtacaggatctgaaattaagcctgtgctccacaaacacgctacccacagaatatctcgctatttgcgggctgaaaaggttacgcattaacatggaggccaaacatcccttcccagagcaatcgctgctgatccattcaggcggggatagcgacagtcgggaaaagcccatgtggcttcacaaaggctggcagccatgcatgtatataagctttctggacatggctctgttcaaccgggattccgcttttaaatcctacagtatcgagaacgtcacttcaatcgctaataatttccctgacttcagctactttcgaacattccccatgccttcaaataaaagctacgtcgttacatttatttattag

SEQ ID NO: 344112 - DNA, 660 bp, Artificial Sequence
  derived and/or modified sequence
atggccccccccagccggcactgcctgctgctgatcagcaccctgggtgtttttgctcttaattgttttactaaggggcagaaaaactcaacgctgatattcactcgggaaaacacgatcaggaattgttcatgctctgcagacatcagggactgtgactatagcctagccaatttgatgtgtaactgtaaaaccgtcttgccgctcgcagttgagagaacctcttacaatggccaccttacaatttggttcactgacacttctgctctcggacatctgttaaacttcactctggtccaagatttaaagctttccttatgctccaccaacacgcttcccacagagtatctggccatctgcggcctgaagcggctccgtatcaacatggaagcaaaacatcccttccctgagcaaagcctgctgatccactccggtggtgacagtgatagtcgggagaaacctatgtggttacataagggctggcaaccatgcatgtatatttcctttttggacatggccctttttaatagggactcagcattcaagagttactctatagaaaatgtgacttctatcgctaacaattttcccgacttctcatactttcgaactttcccgatgcccagcaacaaaagctacgtggtcacattcatttattag

SEQ ID NO: 344113 - DNA, 660 bp, Artificial Sequence
  derived and/or modified sequence
atggccccacctagccggcactgcctgttgctgattagcacattgggagtgttcgccctcaactgtttcactaagggacaaaaaaacagcaccctcattttcacccgcgaaaataccatcagaaactgtagctgttccgctgatatccgcgactgtgattactccctcgccaatctgatgtgtaactgcaagaccgtcttgcccctggccgtggagaggacgagctacaacgggcatttgacaatctggtttaccgataccagcgcccttggccatctcctaaattttaccctggtccaggacctgaagttaagtctctgcagtactaatactctgccaactgagtacctggcaatatgtggccttaagagactgagaattaatatggaagcaaagcatccattccccgagcagagtttgctcatccactctggcggagattctgactccagagagaagcctatgtggctccacaagggttggcagccctgcatgtacatctcatttctggatatggcactttttaaccgcgattccgctttcaaaagttacagtatcgaaaatgtgacttccatcgcaaacaatttccccgatttttcctactttcggacctttccaatgcccagtaataagagctatgtggtcacattcatatattag

SEQ ID NO: 344114 - DNA, 660 bp, Artificial Sequence
  derived and/or modified sequence
atggctcccccaagccgccactgtctgttattaatcagtaccctgggtgtgtttgctctcaattgtttcacaaaaggccaaaagaacagcacacttatcttcactcgtgagaacactattcggaactgcagctgttccgcagatatcagggactgtgattatagtcttgcaaacctcatgtgcaattgcaaaactgtgcttccacttgcggtggaacgaacaagttacaatgggcatctgacaatctggtttaccgatacctccgcacttggccacctgctgaactttaccttagtgcaagacctcaagttgagcttatgctccacaaacacattgcccacggaatatctcgccatctgtggcttgaagaggctgagaataaacatggaggcaaaacatcctttccctgagcagagcttgctgattcattcgggcggtgactccgatagtagagagaagccaatgtggttacataagggttggcagccatgtatgtacatttcatttctcgacatggctctctttaaccgagatagcgccttcaagtcttatagtattgagaacgtcacttccattgccaacaactttcctgacttcagctattttcggacatttccaatgccctccaataagagctatgtggtgactttcatttactag

SEQ ID NO: 344115 - DNA, 660 bp, Artificial Sequence
  derived and/or modified sequence
atggccccaccctctaggcattgtcttctgttaatctctaccctgggggtattcgccctgaattgctttacaaaaggacagaagaattccactttgatattcacaagagagaacacaatccgtaattgttcttgcagcgcggacatcagagactgcgattacagcctggcaaatttgatgtgtaactgtaagacagtgctgcctcttgcagtggagcgtacctcctacaatggtcatctgacaatctggtttactgacacttccgcactgggacacctgctgaattttacactcgtgcaggacctgaaactcagcctgtgtagcacaaacactttacccaccgaatatttagctatatgcggtctcaagcggctccggatcaatatggaggccaagcatccctttccagaacaatcattgcttatccatagcggtggagatagcgatagtagggaaaaaccaatgtggctgcacaagggctggcaaccctgcatgtatatctctttcctggatatggccctcttcaatcgcgactcggcatttaaaagctactcaatcgagaatgtgacaagcatcgctaataatttcccagacttttcctatttccgaacttttccaatgcctagcaataagtcatacgtcgtaacctttatttactag

SEQ ID NO: 344116 - DNA, 660 bp, Artificial Sequence
  derived and/or modified sequence
atggctcccccatcacgccactgtctcctgctgatctctaccttaggcgtattcgcgctcaactgttttactaaaggacaaaagaattctactctaatttttacgcgcgagaacacaattcggaattgtagttgctccgctgacattcgcgattgcgactactctctggctaatttgatgtgcaactgtaagactgtacttccactcgcagtggagcgcacctcctataacggacacctaactatttggtttaccgacacatcggcccttggccaccttctcaatttcaccctggttcaagacctgaagcttagcctgtgttcaaccaatacactgccaactgagtacctcgccatctgtggattgaagaggttgagaattaacatggaagcgaaacatcctttccccgagcaaagcttgttgatccactctggaggggacagcgattctcgcgaaaaacccatgtggctgcacaagggctggcagccctgcatgtacatttcatttctggacatggctcttttcaatcgggactctgcattcaaaagttattctattgaaaacgtcactagtattgctaacaacttcccggactttagttacttccgcacttttcccatgccttccaataagagctacgtggtcaccttcatatattag

SEQ ID NO: 344117 - protein, 199 aa, Artificial Sequence
  derived and/or modified sequence
MEASPASGPRHLMDPHIFTSNFNNGIGRHKTYLCYEVERLDNGTSVKMDQHRGFLHNQAKNLLCGFYGRHAELRFLDLVPSLQLDPAQIYRVTWFISWSPCFSWGCAGEVRAFLQENTHVRLRIFAARIYDYDPLYKEALQMLRDAGAQVSIMTYDEFKHCWDTFVDHQGCPFQPWDGLDEHSQALSGRLRAILQNQGN

SEQ ID NO: 344118 - DNA, 600 bp, Artificial Sequence
  derived and/or modified sequence
atggaggccagccccgccagcggccccagacacctgatggacccccacatcttcaccagcaacttcaacaacggcatcggcagacacaagacctacctgtgctacgaggtggagagactggacaacggcaccagcgtgaagatggaccagcacagaggcttcctgcacaaccaggccaagaacctgctgtgcggcttctacggcagacacgccgagctgagattcctggacctggtgcccagcctgcagctggaccccgcccagatctacagagtgacctggttcatcagctggagcccctgcttcagctggggctgcgccggcgaggtgagagccttcctgcaggagaacacccacgtgagactgagaatcttcgccgccagaatctacgactacgaccccctgtacaaggaggccctgcagatgctgagagacgccggcgcccaggtgagcatcatgacctacgacgagttcaagcactgctgggacaccttcgtggaccaccagggctgccccttccagccctgggacggcctggacgagcacagccaggccctgagcggcagactgagagccatcctgcagaaccagggcaactag

SEQ ID NO: 344119 - DNA, 600 bp, Artificial Sequence
  derived and/or modified sequence
atggaggccagcccagcaagtggcccacggcatttaatggatccacatatctttacatccaattttaacaacgggattggccggcacaagacgtatctgtgctacgaagtggagaggctagataacgggacttcagtgaaaatggaccagcatcgagggttccttcacaaccaggcaaaaaatcttctgtgtggattctacggtaggcatgcagaactgaggttcctggacttagtcccgtccctccaattggatcctgcacaaatttatagagtgacgtggtttatcagttggtccccatgtttcagctggggatgcgccggtgaggtccgggcctttctccaagagaatacccacgtgagattgaggatatttgcggcgcgaatctacgactacgaccccctgtataaggaggccctgcaaatgttgcgggacgcgggtgcacaagtgagtattatgacttatgacgaattcaaacattgctgggatacatttgtagatcatcagggctgtccatttcagccttgggacggcttagacgaacattcccaggccctttcagggcgcctgcgggcaatactccagaaccaggggaattag

SEQ ID NO: 344120 - DNA, 600 bp, Artificial Sequence
  derived and/or modified sequence
atggaggccagccctgccagcggccccaggcacctgatggacccccacatcttcaccagcaacttcaacaacggcatcggccgccacaagacctacctgtgctatgaggtggagcggctggacaatggcacctctgtgaagatggaccagcaccggggcttcctgcacaaccaggccaagaacctgctgtgtggcttctacggcagacatgctgagctgcgcttcctggacctggtgcccagcctgcagctggaccctgcccagatctacagagtgacctggttcatctcctggagcccctgcttctcctggggctgtgccggggaggtgcgggccttcctgcaggagaacacccacgtgcggctgcgcatctttgctgcccgcatctatgactatgaccccctgtacaaggaggccctgcagatgctgagagatgctggggcccaggtgtccatcatgacctatgatgagttcaagcactgctgggacacctttgtggaccaccagggctgccccttccagccctgggatggcctggatgagcacagccaggccctgagcggccgcctgcgggccatcctgcagaaccagggcaactag

SEQ ID NO: 344121 - DNA, 600 bp, Artificial Sequence
  derived and/or modified sequence
atggaggccagccccgccagcggcccccggcacctgatggacccccatatcttcacgtccaatttcaacaatggcattggaagacacaaaacatatttatgttatgaagtcgagaggctggataacggaactagcgttaaaatggaccagcaccgagggtttttgcacaaccaggcaaaaaaccttctgtgtgggttctacgggaggcatgccgagctcaggttcctggacctggtcccctcattgcagttagatccagcacagatctatagggttacctggttcatttcctggtcgccctgtttttcctggggctgtgctggggaagtgagggcctttttacaagagaacacacacgtgcggctccgtatattcgctgccagaatttatgactacgaccctctgtataaggaggcccttcagatgctcagggacgccggtgctcaggtatctattatgacctacgatgagtttaagcattgctgggacacatttgtggatcatcagggctgtccttttcagccttgggacgggctggacgagcactcacaggccctgtctgggaggttgcgggccatcttacaaaatcaggggaactag

SEQ ID NO: 344122 - DNA, 991 bp, Artificial Sequence
  derived and/or modified sequence
gccttgagcaagtcgcaagagcgggaggacacagaccaggaaccgagaagggacaagcacatggaagccagcccagcatccgggcccagacacttgatggatccacacatattcacttccaactttaacaatggcattggaaggcataagacctacctgtgctacgaagtggagcgcctggacaatggcacctcggtcaagatggaccagcacaggggctttctacacaaccaggctaagaatcttctctgtggcttttacggccgccatgcggagctgcgcttcttggacctggttccttctttgcagttggacccggcccagatctacagggtcacttggttcatctcctggagcccctgcttctcctggggctgtgccggggaagtgcgtgcgttccttcaggagaacacacacgtgagactgcgtatcttcgctgcccgcatctatgattacgaccccctatataaggaggcactgcaaatgctgcgggatgctggggcccaagtctccatcatgacctacgatgaatttaagcactgctgggacacctttgtggaccaccagggatgtcccttccagccctgggatggactagatgagcacagccaagccctgagtgggaggctgcgggccattctccagaatcagggaaactgaaggatgggcctcagtctctaaggaaggcagagacctgggttgagcagcagaataaaagatcttcttccaagaaatgcaaacagaccgttcaccaccatctccagctgctcacagacaccagcaaagcaatgtgctcctgatcaagtagattttttaaaaatcagagtcaattaattttaattgaaaatttctcttatgttccaagtgtacaagagtaagattatgctcaatattcccagaatagttttcaatgtattaatgaagtgattaattggctccatatttagactaataaaacattaagaatcttccataattgtttccacaaaca

SEQ ID NO: 344123 - DNA, 600 bp, Artificial Sequence
  derived and/or modified sequence
atggaggcctccccggcatcaggcccacggcacctgatggatccacatattttcaccagtaatttcaataacggaatcggtaggcataagacctacctgtgttatgaagtggagagactggacaacggaaccagtgttaagatggatcagcatcgaggctttctgcacaatcaggcgaaaaatttgctgtgcggcttctatggaaggcacgcagagctgaggttcctggatctcgttccttccttgcaattagaccccgcacagatctatcgggtcacctggtttattagctggtccccctgcttcagttggggatgcgctggagaggtcagggccttccttcaagagaacacccatgtgaggttaagaatctttgcggcaagaatctatgactatgaccccctctacaaggaagctttgcaaatgctgagagacgcaggggcacaggtgagtattatgacatacgacgaatttaagcattgttgggatacctttgtggatcaccagggttgcccattccaaccctgggacggacttgatgaacacagccaagctctcagcggacggttgagagccattctccagaaccaagggaactag

SEQ ID NO: 344124 - DNA, 600 bp, Artificial Sequence
  derived and/or modified sequence
atggaagctagcccagcctcagggccacgacatcttatggatccccatatattcacttctaattttaataacggtattggcaggcacaagacctacctctgctatgaggtcgaaagactcgacaacggcactagtgtgaaaatggaccagcataggggattcctccacaatcaggcaaagaacctgctgtgtggattttacgggcgacatgcagaactgagatttcttgatctggtcccatctctgcagttggatcctgcccaaatataccgcgtcacgtggtttatcagttggtccccgtgcttttcttggggctgcgctggtgaggtgagggcttttttacaggagaacactcatgtgaggctgagaatttttgccgcacggatttacgattacgatccactgtacaaggaagcactacagatgctgagagatgcgggggcacaagtgagcatcatgacctacgacgaatttaaacactgctgggataccttcgtcgatcatcaaggttgcccgtttcaaccatgggacggcttggatgagcacagccaggccctgagcggtaggcttagagcaattcttcagaaccaggggaattag

SEQ ID NO: 344125 - DNA, 600 bp, Artificial Sequence
  derived and/or modified sequence
atggaggcaagtcccgctagcggtccaaggcacctcatggacccccatattttcacaagcaatttcaataatgggatcgggcggcataaaacgtacttatgctacgaggtcgaaagacttgacaacggtacatctgtaaagatggaccaacacagaggcttcctgcacaaccaggctaaaaacctgctgtgtgggttctatggacgccatgccgagctacgattccttgatctggtgccttccctgcaactggaccccgcccagatctaccgcgtcacctggtttatttcctggtccccctgcttctcttggggttgtgcaggcgaggtccgcgcattcctccaggagaatacccatgtgcggcttaggatatttgccgcacgcatttatgactatgatccattgtataaggaagccctgcaaatgctccgggacgcaggtgcacaggtcagcatcatgacttacgacgaattcaaacactgctgggatacattcgtggaccaccaagggtgtccttttcagccatgggatggtctggatgagcatagtcaggcactgtctggcagattgcgggctattctacaaaaccaagggaactag

SEQ ID NO: 344126 - DNA, 600 bp, Artificial Sequence
  derived and/or modified sequence
atggaggccagccccgccagcggcccccggcacctgatggacccccacattttcacttccaatttcaataatggcatcggtcgccataaaacctatctatgttacgaggttgagcggttggataatggtacatcggtgaagatggatcaacatcgggggtttctgcacaatcaggccaagaacctgctgtgtggattttatggtcggcacgcagagcttcgctttcttgacctggtcccctccctgcagttggatcctgcacagatttaccgggttacctggttcatctcatggtccccgtgcttctcctgggggtgtgccggagaggtaagggccttcctgcaagagaacacccatgttcggcttaggattttcgccgcaaggatttatgattacgatcccctgtacaaagaggcactacaaatgctgagagatgccggagcccaagtctctataatgacatatgacgagtttaaacattgttgggatactttcgtggaccaccaaggatgtccttttcagccttgggatggcctggacgaacacagccaagccctgagcggcagactcagggcaatcctccaaaatcaagggaactag

SEQ ID NO: 344127 - DNA, 600 bp, Artificial Sequence
  derived and/or modified sequence
atggaggccagccccgccagcggcccccggcacctgatggacccccacattttcacttcaaacttcaataatggcattggccggcacaaaacatacttgtgctacgaggtggaaagactagacaacggcacttctgtaaaaatggatcagcataggggcttcctccacaatcaagccaagaaccttttatgcggcttttacgggcggcatgccgagttaaggttcctggatctggtccccagcctgcagcttgatcccgctcagatctaccgggtgacgtggtttattagttggagtccatgtttttcttggggttgcgcaggggaagtgcgcgctttcctgcaagaaaatactcatgttcgtctgcgcatttttgcagctaggatttacgactacgaccccctgtacaaggaggcccttcagatgttacgagacgctggtgcccaggtcagcattatgacctacgatgagtttaagcattgttgggatacttttgtggaccatcagggatgccctttccaaccctgggatggactggacgaacattcccaggcactgtcaggacgcctgcgggctatcttgcaaaaccaggggaattag

SEQ ID NO: 344128 - DNA, 600 bp, Artificial Sequence
  derived and/or modified sequence
atggaggcttccccagccagcggccctcggcacctgatggacccccatatttttacttctaatttcaataacggcattgggaggcacaagacctacctgtgctacgaggtggaaaggctggacaacgggacaagcgtgaagatggaccaacatagaggcttcctgcataaccaggcaaaaaatctgctgtgcgggttctatggacgccacgccgaattaaggttcctcgatctggtgccttccctgcagctcgacccagcacagatctatagagtgacttggtttatctcatggtctccatgctttagttggggctgtgccggtgaggttagagccttcttgcaggaaaatactcatgtcagactgaggatttttgcagctcgcatttatgattacgacccactgtacaaggaggcactgcaaatgttaagagatgctggcgctcaggtgagtatcatgacctatgacgaatttaagcactgctgggacactttcgtagatcaccaaggctgcccatttcagccttgggatggcttagacgagcactcgcaggctctttccgggagactgcgggcaatacttcagaatcagggtaactag

SEQ ID NO: 344129 - DNA, 600 bp, Artificial Sequence
  derived and/or modified sequence
atggaagcaagtccagcctcaggtcctcggcacctgatggacccgcacatattcacatcaaactttaacaacggcatcggcaggcacaagacttatctctgctacgaagtggagcgactggataacgggacctcggtgaagatggatcagcatagaggatttttgcataaccaggccaagaatctcctttgcggtttctacggaaggcacgccgaactgaggttcttggacctggtgccctcactccagctggatcccgctcagatttaccgtgtgacctggtttatttcctggagcccctgtttcagctggggttgcgccggagaagtaagagcattcttacaggaaaatacgcacgtgcgcctccgtatcttcgccgctcggatctacgactatgatcccctatacaaggaggccctccaaatgctgcgcgatgctggcgctcaggtgtctataatgacctacgacgaattcaaacactgctgggacacatttgttgaccatcaaggctgcccattccagccgtgggatggtctcgacgagcatagccaggccctgagcgggaggctgcgcgctattctgcaaaaccagggcaattag

SEQ ID NO: 344130 - DNA, 1444 bp, Artificial Sequence
  derived and/or modified sequence
ggagaaggggtggggcagggtatcgctgactcagcagcttccaggttgctctgatgatatattaaggctcctgaatcctaagagaatgttggtgaagatcttaacaccacgccttgagcaagtcgcaagagcgggaggacacagaccaggaaccgagaagggacaagcacatggaagccagcccagcatccgggcccagacacttgatggatccacacatattcacttccaactttaacaatggcattggaaggcataagacctacctgtgctacgaagtggagcgcctggacaatggcacctcggtcaagatggaccagcacaggggctttctacacaaccaggctaagaatcttctctgtggcttttacggccgccatgcggagctgcgcttcttggacctggttccttctttgcagttggacccggcccagatctacagggtcacttggttcatctcctggagcccctgcttctcctggggctgtgccggggaagtgcgtgcgttccttcaggagaacacacacgtgagactgcgtatcttcgctgcccgcatctatgattacgaccccctatataaggaggcactgcaaatgctgcgggatgctggggcccaagtctccatcatgacctacgatgaatttaagcactgctgggacacctttgtggaccaccagggatgtcccttccagccctgggatggactagatgagcacagccaagccctgagtgggaggctgcgggccattctccagaatcagggaaactgaaggatgggcctcagtctctaaggaaggcagagacctgggttgagcagcagaataaaagatcttcttccaagaaatgcaaacagaccgttcaccaccatctccagctgctcacagacgccagcaaagcagtatgctcccgatcaagtagatttttaaaaaatcagagtgggccgggcgcggtggctcacgcctgtaatcccagcactttggaggccaaggcgggtggatcacgaggtcaggagatcgagaccatcctggctaacacggtgaaaccctgtctctactaaaaatacaaaaaattagccaggcgtggtggcgggcgcctgtagtcccagctactctggaggctgaggcaggagagtagcgtgaacccgggaggcagagcttgcggtgagccgagattgcgctactgcactccagcctgggcgacagtaccagactccatctcaaaaaaaaaaaaaccagactgaattaattttaactgaaaatttctcttatgttccaagtacacaatagtaagattatgctcaatattctcagaataattttcaatgtattaatgaaatgaaatgataatttggcttcatatctagactaacacaaaattaagaatcttccataattgcttttgctcagtaactgtgtcatgaattgcaagagtttccacaaacact

SEQ ID NO: 344131 - DNA, 1478 bp, Artificial Sequence
  derived and/or modified sequence
ggcctccctgccacggggatgctgccttttctgctccgggtgtttccacgaggcaggcatggaatcttccctggacaagcgacataccgtggagagacaggctcctgaatcctaagagaatgttggtgaagatcttaacaccacgccttgagcaagtcgcaagagcgggaggacacagaccaggaaccgagaagggacaagcacatggaagccagcccagcatccgggcccagacacttgatggatccacacatattcacttccaactttaacaatggcattggaaggcataagacctacctgtgctacgaagtggagcgcctggacaatggcacctcggtcaagatggaccagcacaggggctttctacacaaccaggctaagaatcttctctgtggcttttacggccgccatgcggagctgcgcttcttggacctggttccttctttgcagttggacccggcccagatctacagggtcacttggttcatctcctggagcccctgcttctcctggggctgtgccggggaagtgcgtgcgttccttcaggagaacacacacgtgagactgcgtatcttcgctgcccgcatctatgattacgaccccctatataaggaggcactgcaaatgctgcgggatgctggggcccaagtctccatcatgacctacgatgaatttaagcactgctgggacacctttgtggaccaccagggatgtcccttccagccctgggatggactagatgagcacagccaagccctgagtgggaggctgcgggccattctccagaatcagggaaactgaaggatgggcctcagtctctaaggaaggcagagacctgggttgagcagcagaataaaagatcttcttccaagaaatgcaaacagaccgttcaccaccatctccagctgctcacagacgccagcaaagcagtatgctcccgatcaagtagatttttaaaaaatcagagtgggccgggcgcggtggctcacgcctgtaatcccagcactttggaggccaaggcgggtggatcacgaggtcaggagatcgagaccatcctggctaacacggtgaaaccctgtctctactaaaaatacaaaaaattagccaggcgtggtggcgggcgcctgtagtcccagctactctggaggctgaggcaggagagtagcgtgaacccgggaggcagagcttgcggtgagccgagattgcgctactgcactccagcctgggcgacagtaccagactccatctcaaaaaaaaaaaaaccagactgaattaattttaactgaaaatttctcttatgttccaagtacacaatagtaagattatgctcaatattctcagaataattttcaatgtattaatgaaatgaaatgataatttggcttcatatctagactaacacaaaattaagaatcttccataattgcttttgctcagtaactgtgtcatgaattgcaagagtttccacaaacact

SEQ ID NO: 344132 - DNA, 1470 bp, Artificial Sequence
  derived and/or modified sequence
atgacccccatcgtaacagtcctcatctgtttgcgactgagcctgggaccccgtacccatgtgcaggccgggaccttacctaaaccaaccctctgggcggaaccgggaagtgtgattacccaagggagccctgttacgctgtggtgccagggaattctcgagacgcaagaatatcgcctttatcgcgagaagaagaccgcaccctggatcacgaggatcccgcaggagatcgtcaagaaaggccagttccccatccctagcattacgtgggagcacacaggtagataccgatgtttctatggaagccataccgctggttggtcagagccatccgatccattagaactggtcgtgacgggcgcctatattaagcccacgcttagcgcgttgccatctccggttgtgacttcgggggggaatgtcaccctacattgcgtgtcccaagttgcgtttggtagttttattctctgcaaggagggcgaagatgagcacccccagtgcttgaattctcagccacgtacccacggttggagcagagcaatcttttccgttggacctgtttccccgagccggcgttggtcatacagatgctatgcctatgattctaattccccacacgtctggtcactgccttccgatttattggaactgctggtcttaggggtatctaagaagccatcactgtctgttcagccagggcctattgtggccccaggcgagtcattgactctccaatgcgtctcggacgtaagttacgatagatttgtgctgtataaggagggtgagagggacttccttcaacttcccggaccacaaccgcaggccggcctgagtcaggcaaactttacactgggccccgtctcacgaagttacggtggccagtaccggtgtagtggcgcctacaacttatcctctgaatggtccgccccatcggatccgctggacattctgatcgccggccagttccgtggtcggccgttcatatcagtgcaccctggtcccaccgtagcttctggggagaatgtcactttgctatgccagtcatggggccccttccacacgttcctgctcacaaaagccggagcggcagacgctcccctccggcttcgctccatccatgagtacccaaagtatcaggccgagtttcccatgagccctgtcacttctgcccacagtggtacatacaggtgctacggcagcctaagctcaaatccataccttctctctcacccttcagattcactagagctaatggtgtcaggggctgccgagacgttgagccctccgcagaacaagtctgactccaaagcgggggccgctaacaccctgtcccctagtcaaaataagactgcttcacacccccaggattacactgttgagaatctgatccgcatgggcattgccgggctggtactcgtggtgttaggtattctcttgtttgaggctcagcactctcaacgctccctttag

SEQ ID NO: 344133 - DNA, 1470 bp, Artificial Sequence
  derived and/or modified sequence
atgacccccatcgtgacagtgctgatctgcctgcggctgagcctgggccccaggacccacgtgcaggccggcaccctgcccaagcccaccctgtgggccgagcccggcagcgtcatcacccagggcagccctgtgaccctgtggtgccagggcatcctggagacccaggagtaccgcctgtaccgggagaagaagacagccccctggatcacccgcatcccccaggagatcgtgaagaagggccagttccccatccccagcatcacctgggagcacacaggccgctaccgctgcttctacggcagccacacagctggctggagcgagcccagcgaccccctggagctggtggtgactggagcctacatcaagcccaccctgagcgccctgcccagccctgtggtgaccagcggcggcaatgtgaccctgcactgtgtgtcccaggtggccttcggcagcttcatcctgtgcaaggagggagaagatgagcacccccagtgcctgaacagccagcccaggacccacggctggagccgggccatcttctctgtgggccctgtgagccccagccgccgctggagctaccgctgctacgcctatgacagcaacagcccccacgtgtggagcctgcccagcgacctgctggagctgctggtgctgggcgtgtccaagaagcccagcctgtctgtgcagcccggccccatcgtggcccctggagagagcctgaccctgcagtgtgtgtctgatgtgtcctatgacagatttgtgctgtacaaggagggggagcgggacttcctgcagctgcccggcccccagccccaggccggcctgagccaggccaacttcaccctgggccctgtgagccgctcctatggaggccagtaccgctgcagcggggcctacaacctgagcagcgagtggagcgcccccagcgaccccctggacatcctgattgctggccagttccggggccggcccttcatctctgtgcaccctggccccaccgtggccagcggggagaatgtgaccctgctgtgccagagctggggccccttccacaccttcctgctgaccaaggccggggctgctgatgcccccctgcggctgcggagcatccacgagtaccccaagtaccaggccgagttccccatgagccctgtgaccagcgcccacagcggcacctaccgctgctacggcagcctgagcagcaacccctacctgctgagccaccccagcgacagcctggagctgatggtgtctggagctgctgagaccctgagccccccccagaacaagagtgacagcaaggccggggccgccaacaccctgagccccagccagaacaagacagccagccacccccaggactacacagtggagaacctgatccgcatgggcattgctggcctggtgctggtggtgctgggcatcctgctgtttgaggcccagcacagccagaggagcctgtag

SEQ ID NO: 344134 - DNA, 1910 bp, Artificial Sequence
  derived and/or modified sequence
ctcactgccacacgcagctcaacctgagctacacagccagatgcgagatgcttctctgctgatctgagtctgcctgcagcatggaccttggtcttccctgaagcatctccagggctggagggacgactgccatgcaccgagggctcatccatccgcagagcagggcagtgggaggagacgctatgacccccatcgtcacagtcctgatctgtctcaggctgagtctgggcccccggacccacgtgcaggcagggaccctccccaagcccacactctgggctgagccaggctctgtgatcacccaggggagtcccgtgaccctctggtgtcaggggatcctggagacccaggagtaccgtctgtatagagaaaagaaaacagcaccctggattacacggatcccacaggagattgtgaagaagggccagttccccatcccatccatcacctgggaacacacagggcggtatcgctgtttctacggtagccacactgcaggctggtcagagcccagtgaccccctggagctggtggtgacaggagcctacatcaaacccaccctctcagctctacccagccctgtggtgacctcaggagggaacgtgaccctccattgtgtctcacaggtggcatttggcagcttcattctgtgtaaggaaggagaagatgaacacccacaatgcctgaactcacagccccgtacccatgggtggtcccgggccatcttctctgtgggccccgtgagcccgagtcgcaggtggtcgtacaggtgctatgcttatgactcgaactctccccatgtgtggtctctacccagtgatctcctggagctcctggtcctaggtgtttctaagaagccatcactctcagtgcagccaggtcctatagtggcccctggggagagcctgaccctccagtgtgtttctgatgtcagctacgacagatttgttctgtataaggagggagaacgtgacttcctccagctccctggcccacagccccaggctgggctctcccaggccaacttcaccctgggccctgtgagccgctcctacgggggccagtacagatgctccggtgcatacaacctctcctccgagtggtcggcccccagcgaccccctggacatcctgatcgcaggacagttccgtggcagacccttcatctcggtgcatccgggccccacggtggcctcaggagagaacgtgaccctgctgtgtcagtcatgggggccgttccacactttccttctgaccaaggcgggagcagctgatgcccccctccgtctcagatcaatacacgaatatcctaagtaccaggctgaattccctatgagtcctgtgacctcagcccactcggggacctacaggtgctacggctcactcagctccaacccctacctgctgtctcaccccagtgactccctggagctcatggtctcaggagcagctgagaccctcagcccaccacaaaacaagtccgattccaaggctggagcagctaacaccctcagcccatcacaaaacaagactgcctcacacccccaggattacacagtggagaatctcatccgcatgggcatagctggcttggtcctggtggtcctcgggattctgctatttgaggctcagcacagccagagaagcctctgagatgcagccgggaggtgaacagcagagagaagaatgtacccttcagagtggtggagccttgggaacagatctgatgatgccaggaggttccgggagacaatttagggctgatgctatctggactgtctgccaatcatttttagagggaggaatcagtgttggattgcagagacattttctggagtgatccatgaaggaccattaacctgtgatacctttcctctctattaatgttgacttcccttggttggatcctct

SEQ ID NO: 344135 - DNA, 1470 bp, Artificial Sequence
  derived and/or modified sequence
atgacccccatcgtgaccgtgctgatctgcctgcggctgagcctggggccacggactcacgtgcaggctggtacccttcccaagcctactttatgggcagagccgggtagtgtcattacacagggaagcccggtgacactctggtgccagggcatcctcgaaacacaagagtacaggctttacagggagaagaaaacagccccatggattacaaggatcccacaggagatcgtgaagaaaggccaatttcccatcccaagcattacatgggagcacactggcagatataggtgtttctacggctctcacaccgcaggttggtccgagcctagcgacccattggagcttgtggtgacaggggcttacatcaagccaacgctgagcgctttgccctctccagttgttacaagcggcggtaatgttacactccattgtgtttcacaggttgcctttggatcttttatcttgtgtaaagagggtgaagatgaacacccccagtgcttaaatagtcagcctcgcacccacggatggagccgggcaatcttctctgtgggtccagtcagcccctcaaggagatggtcctaccgctgctacgcctatgatagcaactcacctcatgtgtggagtctgccctccgacttgcttgaactgctagttctcggtgtgtctaaaaagcccagcctgtctgtgcaacccgggcccatcgttgcacctggagagtccttgactctgcagtgtgtatcagacgtttcatacgaccggttcgtcctctacaaggaaggtgagagggactttctccagctgcccggcccccagccgcaagctgggttgtcccaagctaactttaccctgggacccgtgtcgaggtcttatggcggccaatatcgttgttctggagcttacaacctgtcgagcgagtggtccgctccctccgatcctttagatattttgatcgctggccagtttagagggcgaccgttcatctctgttcacccaggacccacagtggcctctggtgaaaatgttacactcctttgccaatcatggggcccttttcacaccttccttctgactaaagccggggccgctgatgccccccttaggctacgcagtattcatgaataccccaagtaccaggcagaattccctatgagtccggttacatcagctcattctggcacttatcggtgctacggtagcctgtcttcgaacccataccttctctcccaccccagtgattccctggagcttatggtgtcgggagcagctgaaaccttgagtcctccccaaaataagtccgattccaaagctggagctgcgaacacactgtccccgtcccaaaacaaaactgcctctcatcctcaggattataccgtcgaaaacttgattcgcatggggatcgctggtctcgtactggtagtgttgggcattttgctgtttgaggcccaacatagtcagagaagcctctag

SEQ ID NO: 344136 - DNA, 1470 bp, Artificial Sequence
  derived and/or modified sequence
atgactccaatcgttaccgtgctgatctgcctgaggctctctctggggcctaggacacatgtgcaggccggtaccctccccaaacccactctgtgggccgagcccggtagtgtgatcacacagggatcaccagtgacactgtggtgtcaagggatcctggagactcaggaatatcgactctaccgagaaaaaaagacagccccttggattacacgaataccccaggaaattgtaaaaaagggacagtttccaataccatcgattacttgggagcacacaggccgttacagatgcttctacggtagccataccgcgggttggagtgaacctagcgatcccctggaactggtggtcacgggtgcgtacatcaagccaacgctcagcgcgctcccttctcctgtggttacaagcggaggcaacgtcactttacattgtgtctcacaggtggcttttggtagttttatcctatgtaaggagggtgaggacgaacacccacaatgcctgaacagtcagcccaggactcatgggtggtcgcgagctattttttctgtggggcctgtgtcacccagtagacgctggagctaccgatgctacgcttacgacagcaacagccctcatgtatggtctctaccttctgaccttctggagctcttggtcttgggggtctccaaaaagccctccctgtcagtgcaacccggaccaatagtcgcccctggcgagtccctcacattgcagtgtgtatccgacgtgtcttacgaccgatttgtgctatacaaggaaggagagagagatttcctgcagctgcccggacctcaacctcaagccggtctatctcaagcaaacttcacacttggacctgtgagcagaagttacgggggacaataccgctgttccggggcatacaatctgtcgtccgaatggagcgccccttcagatcccctggatatcctgatcgctggccagtttcgtggcaggcctttcatttcagtgcacccgggacctaccgttgcgagcggcgagaacgtaactctcttatgtcaaagctggggcccttttcacaccttcctgttaaccaaggcaggggctgccgacgccccattgcgactgagatccatccatgagtatccgaagtaccaggctgagttccccatgagccccgtcacttccgctcattctggcacgtatagatgctatggttctctgtcgtcaaacccatatctgctgtcgcatcctagcgattcactagagcttatggtgtctggtgcggcagaaacactatctcctccgcagaataagtccgattctaaggctggcgctgcgaacacactctcgccgagtcaaaacaaaaccgcctcacacccccaggactacaccgtagagaacttaatccggatgggaatcgctgggcttgttctggtggtgttgggtattctgctattcgaagcccagcatagtcagagaagcttgtag

SEQ ID NO: 344137 - DNA, 1470 bp, Artificial Sequence
  derived and/or modified sequence
atgacccccatcgtgaccgtgctgatctgcctgagactgagcctgggccccagaacccacgtgcaggccggcaccctgcccaagcccaccctgtgggccgagcccggcagcgtgatcacccagggcagccccgtgaccctgtggtgccagggcatcctggagacccaggagtacagactgtacagagagaagaagaccgccccctggatcaccagaatcccccaggagatcgtgaagaagggccagttccccatccccagcatcacctgggagcacaccggcagatacagatgcttctacggcagccacaccgccggctggagcgagcccagcgaccccctggagctggtggtgaccggcgcctacatcaagcccaccctgagcgccctgcccagccccgtggtgaccagcggcggcaacgtgaccctgcactgcgtgagccaggtggccttcggcagcttcatcctgtgcaaggagggcgaggacgagcacccccagtgcctgaacagccagcccagaacccacggctggagcagagccatcttcagcgtgggccccgtgagccccagcagaagatggagctacagatgctacgcctacgacagcaacagcccccacgtgtggagcctgcccagcgacctgctggagctgctggtgctgggcgtgagcaagaagcccagcctgagcgtgcagcccggccccatcgtggcccccggcgagagcctgaccctgcagtgcgtgagcgacgtgagctacgacagattcgtgctgtacaaggagggcgagagagacttcctgcagctgcccggcccccagccccaggccggcctgagccaggccaacttcaccctgggccccgtgagcagaagctacggcggccagtacagatgcagcggcgcctacaacctgagcagcgagtggagcgcccccagcgaccccctggacatcctgatcgccggccagttcagaggcagacccttcatcagcgtgcaccccggccccaccgtggccagcggcgagaacgtgaccctgctgtgccagagctggggccccttccacaccttcctgctgaccaaggccggcgccgccgacgcccccctgagactgagaagcatccacgagtaccccaagtaccaggccgagttccccatgagccccgtgaccagcgcccacagcggcacctacagatgctacggcagcctgagcagcaacccctacctgctgagccaccccagcgacagcctggagctgatggtgagcggcgccgccgagaccctgagccccccccagaacaagagcgacagcaaggccggcgccgccaacaccctgagccccagccagaacaagaccgccagccacccccaggactacaccgtggagaacctgatcagaatgggcatcgccggcctggtgctggtggtgctgggcatcctgctgttcgaggcccagcacagccagagaagcctgtag

SEQ ID NO: 344138 - protein, 483 aa, Artificial Sequence
  derived and/or modified sequence
MTPILTVLICLGLSLGPRTHVQAGHLPKPTLWAEPGSVIIQGSPVTLRCQGSLQAEEYHLYRENKSASWVRRIQEPGKNGQFPIPSITWEHAGRYHCQYYSHNHSSEYSDPLELVVTGAYSKPTLSALPSPVVTLGGNVTLQCVSQVAFDGFILCKEGEDEHPQRLNSHSHARGWSWAIFSVGPVSPSRRWSYRCYAYDSNSPYVWSLPSDLLELLVPGVSKKPSLSVQPGPMVAPGESLTLQCVSDVGYDRFVLYKEGERDFLQRPGWQPQAGLSQANFTLGPVSPSHGGQYRCYSAHNLSSEWSAPSDPLDILITGQFYDRPSLSVQPVPTVAPGKNVTLLCQSRGQFHTFLLTKEGAGHPPLHLRSEHQAQQNQAEFRMGPVTSAHVGTYRCYSSLSSNPYLLSLPSDPLELVVSEAAETLSPSQNKTDSTTTSLGQHPQDYTVENLIRMGVAGLVLVVLGILLFEAQHSQRSLQDAAGR

SEQ ID NO: 344139 - protein, 327 aa, Artificial Sequence
  derived and/or modified sequence
MTPILTVLICLGLSLGPRTHVQAGHLPKPTLWAEPGSVIIQGSPVTLRCQGSLQAEEYHLYRENKSASWVRRIQEPGKNGQFPIPSITWEHAGRYHCQYYSHNHSSEYSDPLELVVTGAYSKPTLSALPSPVVTLGGNVTLQCVSQVAFDGFILCKEGEDEHPQRLNSHSHARGWSWAIFSVGPVSPSRRWSYRCYAYDSNSPYVWSLPSDLLELLVPGVSKKPSLSVQPGPMVAPGESLTLQCVSDVGYDRFVLYKEGERDFLQRPGWQPQAGLSQANFTLGPVSPSHGGQYRCYSAHNLSSEWSAPSDPLDILITGQFYDRPSLS

SEQ ID NO: 344140 - DNA, 1452 bp, Artificial Sequence
  derived and/or modified sequence
atgacccctatcctgacggtgctgatttgcctgggcctgtctttgggcccccggacccatgtccaggcgggccacctccccaagcctacactatgggcggagcctggctctgtaatcatacagggctctcctgtcacccttagatgccagggctcattgcaggctgaggagtaccacctgtatagagaaaataagtccgcctcttgggtgagaaggatacaagagcctgggaagaacgggcagtttccaatcccctccattacctgggagcatgctgggaggtatcattgccaatactactcgcataaccacagcagcgaatattctgaccccctggaactggtagtcaccggggcttatagcaagcctaccctcagtgctctgccgagcccagtcgtgaccctgggagggaatgtgaccctgcaatgcgtctctcaggtagcgttcgatgggtttatcctctgtaaagaaggcgaagacgagcacccacagcgcctgaactctcattcacatgcacggggctggagttgggccattttctccgtgggacccgtctccccatctcgtcggtggagctatagatgttatgcctacgatagcaactcgccgtacgtttggagtcttccttccgacctgctggaactcttggtccccggagtgagcaagaagccctctctgagcgttcagcctggaccaatggtggcaccgggtgagtccctcacgctgcagtgtgtctctgatgtcgggtatgaccggttcgttctttacaaggagggcgagcgagattttctccagaggcccgggtggcaaccccaggccggcctgagtcaggccaatttcaccctgggcccagtgagtccctctcacggcgggcagtaccgctgctactctgcccacaacctatcctctgaatggagcgccccttctgatccgttggatatactcattactggccagttttatgaccggccatccctcagcgtgcagcccgtgcccacagtggcccctggaaaaaacgttacactcctctgccagagtcgaggtcagtttcacaccttcctgctgaccaaggaaggtgccggtcatcctccattgcacttgagatccgagcaccaggcccagcaaaatcaggccgagttccgcatgggcccagtcactagcgcccacgtgggcacttacagatgttactctagcctatctagtaacccttatctcctcagcttgccgagtgatcctctggagctagtcgtgagtgaggccgccgaaactctgtcaccatcccagaacaagaccgactcaacaacgacctctctcggccaacaccctcaagattacacagtggaaaaccttataaggatgggagtagccggccttgtgctggtcgtcctcgggattcttctgttcgaggctcagcatagccaacgtagtctccaggacgccgccgggcggtag

SEQ ID NO: 344141 - DNA, 1452 bp, Artificial Sequence
  derived and/or modified sequence
atgacacccatcctgactgttctgatctgcctcggcttatcccttggcccccggactcatgtacaggctggtcatctaccgaagccaaccctgtgggccgagcctgggagcgtgatcatccaggggagccctgtcaccctgcgatgccagggatcactgcaggccgaagagtaccatctgtatagggaaaacaagtctgcatcctgggttcggaggatacaggagccaggtaaaaacgggcaattccctatccctagtatcacctgggaacatgctgggagataccattgccagtattactcccacaaccacagttccgaatactcagaccccctagaactggtggttacaggcgcgtactcgaagcccactctgtctgctttgccctcaccagtcgtgacccttggtggcaacgtcactttgcagtgtgtaagtcaagtggccttcgatgggtttatcctgtgtaaggagggagaggatgagcacccccagcggctgaattcccatagtcacgccaggggctggagctgggccatcttcagcgtgggcccggtgtcaccttctagacggtggtcctacagatgctatgcctacgatagcaactcaccttacgtgtggtccctaccaagcgacctgctggaactgcttgtaccaggcgttagtaagaagccgagcttgagtgtccagcctggacctatggtcgctccaggcgagagcctgacattgcagtgcgtcagtgacgtgggttatgaccgcttcgtgctgtataaagaaggagagcgtgattttctccagcgccccggatggcagcctcaggccggattgtcccaggctaattttacattgggacccgtgtctccttctcatgggggccagtaccgttgttattcagctcataacctgtcctcagagtggagtgctccaagtgatcctcttgacatcctgatcactggacaattttatgatcgcccgtccctctccgtgcagccagtgcctactgtggccccaggcaagaacgtcactttactttgtcagagccggggacagttccatacgtttctgttgacaaaagaaggagctggccatccgcctctgcatctgcggtcagagcaccaggcccagcaaaatcaggctgagttccgcatgggcccagtgacgtccgcccacgtcgggacttatcgatgctactctagcctgtcaagtaacccatatctcctttctctgccatccgaccctctggagctcgttgtaagcgaggctgcagaaactctcagcccatcacagaacaaaactgactccactacaacaagcctcgggcagcatccccaggactataccgtcgagaatctgatacgaatgggggtggcaggattggtactggttgtgttaggaatcttgctgtttgaagcgcagcatagccagcggtctctgcaggacgccgcaggtaggtag

SEQ ID NO: 344142 - DNA, 984 bp, Artificial Sequence
  derived and/or modified sequence
atgacgcccattctgaccgtccttatctgccttggcctaagcctaggaccgcgcacccacgtccaggccggtcacctgcctaaacccacgctgtgggcagagcctgggagcgtcattattcagggcagtccagttacactgaggtgccagggctcattacaggctgaggagtaccacctttacagagaaaacaagtctgcttcgtgggtcagacgcattcaggaacctggcaaaaatggtcagttccccataccctcgattacatgggagcatgcgggccggtaccactgccagtactattcccacaatcactccagcgaatattccgatcccctcgaattggtggtgactggagcatactcaaagcctacccttagcgctctgcccagtccagtcgtgacccttggtgggaacgtgaccttacaatgcgtttcacaggtggcatttgacggcttcatcctctgcaaggagggcgaagacgaacatcctcagcgtctgaactcccacagccacgccagggggtggagctgggccatcttttcagtggggcctgtgagccccagcaggagatggagctaccgctgctacgcctacgactcaaactccccatatgtatggagcctgccatccgatttgctcgaactcctggtgccaggggtctcaaagaaacccagcttaagcgtgcagccaggacctatggtcgccccaggtgaatccctcaccctgcaatgcgtgtctgacgtcggatatgaccggttcgtactgtacaaggaaggtgaacgggattttttgcagcggcctggctggcaaccccaggccgggctctctcaggccaatttcaccttagggcctgtttcgccgagccacggggggcagtacaggtgctactccgcccacaatctttcatctgagtggagcgccccaagcgaccccctggacatcctcatcactggtcagttctacgacaggccctccctgagctag

SEQ ID NO: 344143 - DNA, 1452 bp, Artificial Sequence
  derived and/or modified sequence
atgacccccatcctgactgtgctgatctgcctgggcctgagcctgggccccaggacccacgtgcaggccggccacctgcccaagcccaccctgtgggccgagcccggcagcgtcatcatccagggcagccctgtgaccctgcgctgccagggcagcctgcaggccgaggagtaccacctgtaccgggagaacaagagcgcctcctgggtgcggcgcatccaggagcccgggaagaatggccagttccccatccccagcatcacctgggagcacgccggccgctaccactgccagtactacagccacaaccacagcagcgagtacagcgaccccctggagctggtggtgactggagcctacagcaagcccaccctgagcgccctgcccagccctgtggtgaccctgggcggcaatgtgaccctgcagtgtgtgtcccaggtggcctttgatggcttcatcctgtgcaaggagggagaagatgagcacccccagaggctgaacagccacagccacgcccggggctggagctgggccatcttctctgtgggccctgtgagccccagccgccgctggagctaccgctgctacgcctatgacagcaacagcccctacgtgtggagcctgcccagcgacctgctggagctgctggtgcctggggtgtccaagaagcccagcctgtctgtgcagcccggccccatggtggcccctggagagagcctgaccctgcagtgtgtgtctgatgtgggctatgacagatttgtgctgtacaaggagggggagcgggacttcctgcagaggcctggctggcagccccaggccggcctgagccaggccaacttcaccctgggccctgtgagccccagccatggaggccagtaccgctgctacagcgcccacaacctgagcagcgagtggagcgcccccagcgaccccctggacatcctgatcaccggccagttctatgaccggcccagcctgtctgtgcagcctgtgcccaccgtggcccctgggaagaatgtgaccctgctgtgccagagccggggccagttccacaccttcctgctgaccaaggagggcgccggccacccccccctgcacctgcggtctgagcaccaggcccagcagaaccaggccgagttcaggatgggccctgtgaccagcgcccacgtgggcacctaccgctgctacagcagcctgagcagcaacccctacctgctgagcctgcccagcgaccccctggagctggtggtgtctgaggccgctgagaccctgagccccagccagaacaagacagacagcaccaccaccagcctgggccagcacccccaggactacacagtggagaacctgatccgcatgggcgtggccggcctggtgctggtggtgctgggcatcctgctgtttgaggcccagcacagccagaggagcctgcaggatgctgctggaagatag

SEQ ID NO: 344144 - DNA, 984 bp, Artificial Sequence
  derived and/or modified sequence
atgacccccatcctgactgtgctgatctgcctgggcctgagcctgggccccaggacccacgtgcaggccggccacctgcccaagcccaccctgtgggccgagcccggcagcgtcatcatccagggcagccctgtgaccctgcgctgccagggcagcctgcaggccgaggagtaccacctgtaccgggagaacaagagcgcctcctgggtgcggcgcatccaggagcccgggaagaatggccagttccccatccccagcatcacctgggagcacgccggccgctaccactgccagtactacagccacaaccacagcagcgagtacagcgaccccctggagctggtggtgactggagcctacagcaagcccaccctgagcgccctgcccagccctgtggtgaccctgggcggcaatgtgaccctgcagtgtgtgtcccaggtggcctttgatggcttcatcctgtgcaaggagggagaagatgagcacccccagaggctgaacagccacagccacgcccggggctggagctgggccatcttctctgtgggccctgtgagccccagccgccgctggagctaccgctgctacgcctatgacagcaacagcccctacgtgtggagcctgcccagcgacctgctggagctgctggtgcctggggtgtccaagaagcccagcctgtctgtgcagcccggccccatggtggcccctggagagagcctgaccctgcagtgtgtgtctgatgtgggctatgacagatttgtgctgtacaaggagggggagcgggacttcctgcagaggcctggctggcagccccaggccggcctgagccaggccaacttcaccctgggccctgtgagccccagccatggaggccagtaccgctgctacagcgcccacaacctgagcagcgagtggagcgcccccagcgaccccctggacatcctgatcaccggccagttctatgaccggcccagcctgtcctag

SEQ ID NO: 344145 - DNA, 1799 bp, Artificial Sequence
  derived and/or modified sequence
gcgtctctgctgatctgagtctaactgcagcatggacctgggttttccctgaagcatctccagggctggagggacgaccgccatgcactgagggctcatccatccgcagagcagggcagtgggaggagacgccatgacccccatcctcacggtcctgatctgtctcgggctgagtctgggccccaggacccacgtgcaggcagggcacctccccaagcccaccctctgggctgagccaggctctgtgatcatccagggaagtcctgtgaccctcaggtgtcaggggagccttcaggctgaggagtaccatctatatagggaaaacaaatcagcatcctgggttagacggatacaagagcctgggaagaatggccagttccccatcccatccatcacctgggaacacgcagggcggtatcactgtcagtactacagccacaatcactcatcagagtacagtgaccccctggagctggtggtgacaggagcctacagcaaacccaccctctcagctctgcccagccctgtggtgaccttaggagggaacgtgaccctccagtgtgtctcacaggtggcatttgacggcttcattctgtgtaaggaaggagaagatgaacacccacaacgcctgaactcccattcccatgcccgtgggtggtcctgggccatcttctccgtgggccccgtgagcccgagtcgcaggtggtcgtacaggtgctatgcttatgactcgaactctccctatgtgtggtctctacccagtgatctcctggagctcctggtcccaggtgtttctaagaagccatcactctcagtgcagccaggtcctatggtggcccccggggagagcctgaccctccagtgtgtctctgatgtcggctacgacagatttgttctgtataaggagggagaacgtgacttcctccagcgccctggttggcagccccaggctgggctctcccaggccaacttcaccctgggccctgtgagcccctcccacgggggccagtacagatgctacagtgcacacaacctctcctccgagtggtcggcccccagtgaccccctggacatcctgatcacaggacagttctatgacagaccctctctctcggtgcagccggtccccacagtagccccaggaaagaacgtgaccctgctgtgtcagtcacgggggcagttccacactttccttctgaccaaggagggggcaggccatcccccactgcatctgagatcagagcaccaagctcagcagaaccaggctgaattccgcatgggtcctgtgacctcagcccacgtggggacctacagatgctacagctcactcagctccaacccctacctgctgtctctccccagtgaccccctggagctcgtggtctcagaagcagctgagaccctcagcccatcacaaaacaagacagactccacgactacatccctaggccaacacccccaggattacacagtggagaatctcatccgcatgggtgtggctggcttggtcctggtggtcctcgggattctgctatttgaggctcagcacagccagagaagcctacaagatgcagccgggaggtgaacagcagagaggacaatgcatccttcagcgtggtggagcctcagggacagatctgatgatcccaggaggctctggaggacaatctaggacctacattatctggactgtatgctggtcatttctagagacagcaatcaatatttgagtgtaaggaaactgtctggggtgattcctagaagatcattaaactgtggtacatttttttgtctatgaa

SEQ ID NO: 344146 - DNA, 1753 bp, Artificial Sequence
  derived and/or modified sequence
ctccgagtgtccacaccctgtgcgtctctctgtcctgccagcactgagggctcatccatccgcagagcagggcagtgggaggagacgccatgacccccatcctcacggtcctgatctgtctcgggctgagtctgggccccaggacccacgtgcaggcagggcacctccccaagcccaccctctgggctgagccaggctctgtgatcatccagggaagtcctgtgaccctcaggtgtcaggggagccttcaggctgaggagtaccatctatatagggaaaacaaatcagcatcctgggttagacggatacaagagcctgggaagaatggccagttccccatcccatccatcacctgggaacacgcagggcggtatcactgtcagtactacagccacaatcactcatcagagtacagtgaccccctggagctggtggtgacaggagcctacagcaaacccaccctctcagctctgcccagccctgtggtgaccttaggagggaacgtgaccctccagtgtgtctcacaggtggcatttgacggcttcattctgtgtaaggaaggagaagatgaacacccacaacgcctgaactcccattcccatgcccgtgggtggtcctgggccatcttctccgtgggccccgtgagcccgagtcgcaggtggtcgtacaggtgctatgcttatgactcgaactctccctatgtgtggtctctacccagtgatctcctggagctcctggtcccaggtgtttctaagaagccatcactctcagtgcagccaggtcctatggtggcccccggggagagcctgaccctccagtgtgtctctgatgtcggctacgacagatttgttctgtataaggagggagaacgtgacttcctccagcgccctggttggcagccccaggctgggctctcccaggccaacttcaccctgggccctgtgagcccctcccacgggggccagtacagatgctacagtgcacacaacctctcctccgagtggtcggcccccagtgaccccctggacatcctgatcacaggacagttctatgacagaccctctctctcggtgcagccggtccccacagtagccccaggaaagaacgtgaccctgctgtgtcagtcacgggggcagttccacactttccttctgaccaaggagggggcaggccatcccccactgcatctgagatcagagcaccaagctcagcagaaccaggctgaattccgcatgggtcctgtgacctcagcccacgtggggacctacagatgctacagctcactcagctccaacccctacctgctgtctctccccagtgaccccctggagctcgtggtctcagaagcagctgagaccctcagcccatcacaaaacaagacagactccacgactacatccctaggccaacacccccaggattacacagtggagaatctcatccgcatgggtgtggctggcttggtcctggtggtcctcgggattctgctatttgaggctcagcacagccagagaagcctacaagatgcagccgggaggtgaacagcagagaggacaatgcatccttcagcgtggtggagcctcagggacagatctgatgatcccaggaggctctggaggacaatctaggacctacattatctggactgtatgctggtcatttctagagacagcaatcaatatttgagtgtaaggaaactgtctggggtgattcctagaagatcattaaactgtggtacatttttttgtctatg

SEQ ID NO: 344147 - DNA, 1571 bp, Artificial Sequence
  derived and/or modified sequence
ggctggaatgctaaggggtgatcatagctccctgcagcctccgcctcccaggccgaagtattcctcccacctcagcctcctgagtagctgggactagagatgtgagctgccatgcctggctaattttttgctttttttatacagacaaggtcttgctatgtggcccagggtaatctgaagctcctggcctctagccttcacccacctcagcctcctgaagtgctgggattccaggcatgagccaccatggtagaccctgcattactcctctgtgctcactgccacacgcagctcaacctgagctacacagccaggtgtcaggtgcgtctctgctgatctgagtctaactgcagcatggacctgggttttccctgaagcatctccagggctggagggacgaccgccatgccctaaaggtatgacagccaggctcctgagagggcagttgcacttcctgtgtggttgcacataacaaaaccccatgacaagaaggatccagcctccgagtgtccacaccctgtgcgtctctctgtcctgccagcactgagggctcatccatccgcagagcagggcagtgggaggagacgccatgacccccatcctcacggtcctgatctgtctcgggctgagtctgggccccaggacccacgtgcaggcagggcacctccccaagcccaccctctgggctgagccaggctctgtgatcatccagggaagtcctgtgaccctcaggtgtcaggggagccttcaggctgaggagtaccatctatatagggaaaacaaatcagcatcctgggttagacggatacaagagcctgggaagaatggccagttccccatcccatccatcacctgggaacacgcagggcggtatcactgtcagtactacagccacaatcactcatcagagtacagtgaccccctggagctggtggtgacaggagcctacagcaaacccaccctctcagctctgcccagccctgtggtgaccttaggagggaacgtgaccctccagtgtgtctcacaggtggcatttgacggcttcattctgtgtaaggaaggagaagatgaacacccacaacgcctgaactcccattcccatgcccgtgggtggtcctgggccatcttctccgtgggccccgtgagcccgagtcgcaggtggtcgtacaggtgctatgcttatgactcgaactctccctatgtgtggtctctacccagtgatctcctggagctcctggtcccaggtgtttctaagaagccatcactctcagtgcagccaggtcctatggtggcccccggggagagcctgaccctccagtgtgtctctgatgtcggctacgacagatttgttctgtataaggagggagaacgtgacttcctccagcgccctggttggcagccccaggctgggctctcccaggccaacttcaccctgggccctgtgagcccctcccacgggggccagtacagatgctacagtgcacacaacctctcctccgagtggtcggcccccagtgaccccctggacatcctgatcacaggacagttctatgacagaccctctctctcgg

SEQ ID NO: 344148 - DNA, 1452 bp, Artificial Sequence
  derived and/or modified sequence
atgacccccatcctgaccgtgctgatctgcctgggcctgagcctgggccccaggacccatgtccaggcagggcatctgcccaagcccaccctgtgggcggagcccgggagcgtgattattcaaggatctcctgtcacactgcggtgccaggggagtctccaggctgaagagtaccacctgtatcgcgagaacaagtcggcttcctgggtaaggagaatccaggaaccaggtaagaacggccagttccctataccatctatcacttgggaacatgccggacggtaccactgccaatactatagccataatcacagttcggaatacagcgaccctctggaacttgttgtcacgggggcctatagcaaaccaacattgtctgcattaccttcacctgtcgtaactctcggcggcaatgtcaccctccaatgcgtttcgcaggtggccttcgacggatttattctttgcaaggagggagaagatgaacaccctcaaaggctaaactcccacagtcacgcacgtggatggagttgggccatcttcagcgtgggacctgtttcgcctagtaggaggtggtcttataggtgctatgcttacgattccaactcaccttatgtctggagcctaccttctgatttgctggaactcctggtgccaggcgtctcgaagaagccttccctaagcgttcagcctggcccaatggtcgcccctggcgagagtttgactctgcagtgcgtgagcgacgtcggttatgatcgtttcgtgctgtacaaggagggggagagagatttcctgcaacgccccggctggcagccccaagccggactgagtcaggccaatttcaccctgggacctgtgtctcccagccacggtgggcagtaccgatgctactccgcgcacaatctgtccagtgagtggtctgccccctccgaccctctggatatcttgatcaccggccagttttatgatcggccctctctgagtgtccaaccagtgccaacggtggcccctggcaagaacgttacattgctctgccaaagccgagggcagttccacactttcttgcttactaaggaaggggcaggacacccacctttacacctgagaagcgagcaccaagcccaacagaaccaggctgagttcagaatggggcccgtcacttccgcccacgttggcacatatcgctgttactcctcgctttcgtctaatccttacctattgtctctcccttcagaccccttggaactcgtggtttcagaagcagcagagactctctctccttcgcagaacaagacagatagtacaaccactagtcttggacaacatccccaagactacactgttgagaatcttatccggatgggcgtggcaggcctggtgttggttgtattaggcatcctgttgtttgaagcccaacactcccagaggagtctgcaggatgccgctgggcgttag

SEQ ID NO: 344149 - DNA, 1452 bp, Artificial Sequence
  derived and/or modified sequence
atgacccccatcctgaccgtgctgatctgcctgggcctgagcctggggcccagaacacatgtgcaggccggacacttaccgaagcctaccttatgggctgagcctgggagtgtgatcatccagggctccccagttaccttacgctgccagggctctctgcaggcagaggagtaccatctctacagagagaataagtctgcctcttgggtgagacggatccaagaaccaggaaaaaacgggcagttccctattccatctatcacttgggaacatgcaggccgctatcactgccaatactattcacacaatcactcaagtgaatatagtgatccactggaattagtcgtgaccggtgcgtacagcaaaccaacattgtcagccctgccaagtcccgtagtgactttgggtgggaatgtcactcttcagtgcgtgagccaggtggccttcgacggttttatcttatgtaaagaaggcgaggatgaacatcctcagagattgaattctcattcccacgcccgagggtggtcatgggccattttctcagtcggtcctgtcagcccatcccggaggtggtcctacaggtgctatgcatacgatagcaactcaccttatgtttggtccctccccagcgacctcctggagctgttggtcccaggggtttctaagaagccaagcctgtcagtccaaccagggcctatggttgcccctggcgagtcactgactctccagtgcgtgtccgatgtgggctatgataggttcgtgctctacaaggagggagagcgggattttttgcagcgcccgggttggcagccccaggccgggctatcccaagccaacttcacactggggcccgtctcaccatcacatggggggcagtacagatgctattcagctcataacctatcttccgaatggtctgcaccttccgatccactagacatcttgattacagggcagttctacgacagaccatctttatctgtccagccagtccctactgtggctccgggcaagaacgttaccctgctctgccagagccggggtcagttccatacatttctcctgacgaaggagggagctggacatccacctctgcaccttaggtccgagcaccaggcccagcaaaatcaggctgagtttagaatgggcccagtgacaagcgcccacgtgggaacctatcgctgctattcgtcgctgagctcaaacccataccttctgtccttgccgagcgatccccttgagttagtggtgtctgaagctgccgagaccctgtctccctctcagaataaaactgactccaccacaacgagtctgggccagcaccctcaggattacactgtggaaaacttgataaggatgggagtcgctggcttggtgctggtggtgctgggtatactcttgttcgaagcacagcattcacagcgaagcttgcaggacgctgccggccggtag

SEQ ID NO: 344150 - DNA, 984 bp, Artificial Sequence
  derived and/or modified sequence
atgacccccatcctgaccgtgctgatctgcctgggcctgagcctgggcccccggacccacgtgcaggccggacacttgcccaagccaacactgtgggccgagcccgggtcagtgatcatccagggttctccggttaccctgcgatgtcagggtagtctgcaggctgaagagtaccacctctacagagagaacaagtcggcttcctgggtgcgcaggatccaggagccaggaaaaaacggacaattcccgataccaagcatcacatgggagcacgctgggcggtatcactgccagtattatagccacaaccacagctcagagtactctgatccccttgagctggttgtgaccggggcttactcaaagcctacgttgtccgcgctgccttccccagttgtcaccctaggagggaatgttaccctccaatgcgtcagccaagtagccttcgatggctttatattatgcaaggagggcgaagacgaacaccctcagcggcttaattcacatagtcacgcccgcggctggagctgggctattttttccgtaggtcccgtaagcccgtcccggcgctggtcttatagatgttacgcatatgatagcaatagtccctatgtctggtcactgcctagcgatctgctcgagctgttagtccctggcgtcagcaaaaaaccaagcttgagtgtgcaaccagggcccatggtggcccctggtgagagcctgacactgcaatgtgtctcagacgtgggttatgatagattcgttctctacaaggagggggaacgcgattttctgcagagacctggctggcaaccacaagcaggcctatcacaggctaacttcacactggggcctgtctccccctcacatgggggccaatataggtgttattccgctcacaacctatcatcggaatggtccgcaccatccgatcccctagacatcctcatcaccggacaattttatgacaggcccagtctcagttag

SEQ ID NO: 344151 - DNA, 1452 bp, Artificial Sequence
  derived and/or modified sequence
atgactcccattttgaccgtcctcatctgcttaggcctttcattgggcccacggacgcacgtgcaagcgggacatctgcccaaacctacgctgtgggcagagccgggaagcgttatcattcaaggatcacccgtgacgctgagatgtcagggtagcctgcaggccgaggagtaccatctgtatagggagaacaagtccgcgagctgggtgcgaaggattcaggaacctggtaagaatggtcagtttcctattccgtctattacttgggagcacgctggccgatatcactgccaatattatagccacaatcactcctcggaatatagcgatcccttagagctcgtggtgaccggggcttattccaagccgaccttgtctgccttacccagcccggtagtgaccctgggtggcaacgtcaccctgcagtgcgtatcacaggtggccttcgacggcttcattctgtgtaaggagggcgaagatgagcacccgcaacgtctcaactctcatagccatgccaggggctggtcctgggcaattttctcagtgggccctgtgtcaccaagcagaagatggtcctatcgctgctacgcatacgattcgaattctccctacgtatggtctcttccatccgatttgctcgagctcttggtacccggagtgtctaaaaaaccgagtttaagcgttcagcccggacctatggttgcccctggcgagagtctgaccctccagtgtgtttcggatgtgggatacgaccggtttgtgctgtacaaggaaggggagagagacttcttgcagagacctgggtggcaacctcaggctggcctgtcccaggctaactttactctgggcccagttagtccatcccacggcggacaataccggtgctatagtgctcataacctgagctctgaatggtcagctccatcagatccattggacattcttatcactggccagttctacgataggccttccctcagcgttcaaccagttccgacagtggcccctggtaaaaatgtaacattgctgtgccagtctcgaggccagttccataccttcctgcttaccaaggagggggctggccacccccctcttcacttgcggtcggaacaccaggcgcagcagaaccaggccgaatttaggatgggccctgtgaccagcgctcacgtggggacatatagatgttacagcagtttgtcaagcaatccttacctcctttccctgccctctgacccgctggaattggtagtgtccgaggctgcagagacattgagccccagccagaacaagactgacagcactactacctctctcggccagcatccacaggattataccgttgagaacctcatccggatgggggtggccggtcttgtccttgtggttttaggaattctcctcttcgaagctcagcactcacagaggagcctgcaggatgccgctgggagatag

SEQ ID NO: 344152 - DNA, 1452 bp, Artificial Sequence
  derived and/or modified sequence
atgacccccattcttactgttctcatatgtttgggcctgtctctcggaccgaggacccacgttcaagccggtcacctacctaagccgacactgtgggccgaacccggttctgtgattattcagggtagcccagtaaccttgcggtgccaaggatcactccaggccgaggaataccacctttaccgggagaacaaatcggcctcctgggtcaggcgtatccaagagccagggaaaaatgggcagtttccaattccctcaatcacatgggagcatgccggaagatatcattgtcagtattattcgcacaaccattctagcgaatactccgatcctctggagctagtggtgaccggcgcatattctaagcctacactgagtgcgctgcccagcccagtggtgaccttgggcggaaacgttactttgcaatgtgtctcgcaagtggctttcgacggatttatactctgcaaggagggagaagacgaacatccacaaagactgaacagtcactctcacgccagagggtggtcctgggcaatctttagtgttggacctgtgtccccgtcgcgcaggtggtcttatcgctgttatgcttatgatagcaactccccctacgtatggtctttaccctcggacttacttgaactcttggtgcctggagtctccaaaaaaccctcgctgtccgtgcagccgggacccatggttgcccctggggagtcgctcaccctgcagtgtgtcagcgacgttggatacgataggtttgtattgtacaaagaaggtgagcgggatttcctacagagacctggctggcagccccaggcaggcctgagccaggccaattttacgctagggcctgtcagtccctcccatggtggccagtatcgctgctactcagcacacaatctcagctctgagtggtcagccccaagcgaccctctcgacattctgattactggtcagttttacgatagaccctctctctcagtacagccagtgcctaccgtggccccaggaaaaaatgttaccctgctatgtcagtctcgaggccagtttcacacctttctgctgacgaaggaaggtgcaggacacccaccccttcacctgaggtccgagcatcaggcacagcagaatcaagctgagttccggatgggccctgtgacctccgcccacgtcggaacatacagatgctacagcagtctgagttcaaacccttatttgttaagccttccctccgatcccctggagcttgtcgtttccgaagctgcagagaccctgtcaccctcgcagaacaagaccgatagtacgacaactagccttggtcaacatccacaggattacaccgtggaaaatctaataagaatgggggtcgccggactggtcctagtggtgctgggcattctgttgtttgaggctcaacattcccagaggtctttgcaggatgccgcaggccgatag

SEQ ID NO: 344153 - DNA, 984 bp, Artificial Sequence
  derived and/or modified sequence
atgacacccatcctcacagtactaatctgcctcggcctgtctctgggcccaagaacccacgtgcaggcaggccacctgcctaagcccaccctgtgggccgaacctggaagcgtgataatccagggtagtccagtaactcttagatgccaaggatcactgcaagctgaggagtaccacctgtatagagagaacaaatctgcttcatgggttagacgtatccaggagccgggaaagaatggacaattcccaataccttcgattacctgggaacatgcagggcgttatcactgtcagtactattcacacaaccactcttcagaatatagcgatccgctcgaactcgtagtcacgggggcatacagcaagcccaccctctccgctttgccaagccccgtagtgaccctgggcggaaacgtgacgcttcagtgcgtctctcaggttgcttttgacggttttatcctgtgtaaagagggagaagacgaacatccacagcgcctgaatagtcattctcacgccagaggttggtcttgggcaatatttagcgttggcccagtgtccccatcccggagatggtcgtaccgctgctatgcctacgactctaatagtccctatgtctggagtctgccttccgatctccttgagctgctggtgcccggtgtcagtaaaaagccatctctctccgttcaacctgggcctatggtggcccctggagaatctttgacactgcaatgtgtgagtgatgtgggctacgacagatttgtactgtacaaggaaggggaaagggactttctccagcgcccaggctggcagccacaggccggattgtctcaggcaaactttactcttgggcctgtttcgccctcccatggcggacaataccgatgctattctgcgcataacctatcaagtgaatggtctgctccctccgatcccctggacatccttatcacggggcagttctatgatcggccaagcctgtcctag

SEQ ID NO: 344154 - DNA, 1452 bp, Artificial Sequence
  derived and/or modified sequence
atgacccccatcctgaccgtgctgatctgcctgggcctgagcctgggccccagaacccacgtgcaggccggccacctgcccaagcccaccctgtgggccgagcccggcagcgtgatcatccagggcagccccgtgaccctgagatgccagggcagcctgcaggccgaggagtaccacctgtacagagagaacaagagcgccagctgggtgagaagaatccaggagcccggcaagaacggccagttccccatccccagcatcacctgggagcacgccggcagataccactgccagtactacagccacaaccacagcagcgagtacagcgaccccctggagctggtggtgaccggcgcctacagcaagcccaccctgagcgccctgcccagccccgtggtgaccctgggcggcaacgtgaccctgcagtgcgtgagccaggtggccttcgacggcttcatcctgtgcaaggagggcgaggacgagcacccccagagactgaacagccacagccacgccagaggctggagctgggccatcttcagcgtgggccccgtgagccccagcagaagatggagctacagatgctacgcctacgacagcaacagcccctacgtgtggagcctgcccagcgacctgctggagctgctggtgcccggcgtgagcaagaagcccagcctgagcgtgcagcccggccccatggtggcccccggcgagagcctgaccctgcagtgcgtgagcgacgtgggctacgacagattcgtgctgtacaaggagggcgagagagacttcctgcagagacccggctggcagccccaggccggcctgagccaggccaacttcaccctgggccccgtgagccccagccacggcggccagtacagatgctacagcgcccacaacctgagcagcgagtggagcgcccccagcgaccccctggacatcctgatcaccggccagttctacgacagacccagcctgagcgtgcagcccgtgcccaccgtggcccccggcaagaacgtgaccctgctgtgccagagcagaggccagttccacaccttcctgctgaccaaggagggcgccggccacccccccctgcacctgagaagcgagcaccaggcccagcagaaccaggccgagttcagaatgggccccgtgaccagcgcccacgtgggcacctacagatgctacagcagcctgagcagcaacccctacctgctgagcctgcccagcgaccccctggagctggtggtgagcgaggccgccgagaccctgagccccagccagaacaagaccgacagcaccaccaccagcctgggccagcacccccaggactacaccgtggagaacctgatcagaatgggcgtggccggcctggtgctggtggtgctgggcatcctgctgttcgaggcccagcacagccagagaagcctgcaggacgccgccggcagatag

SEQ ID NO: 344155 - DNA, 984 bp, Artificial Sequence
  derived and/or modified sequence
atgacccccatcctgaccgtgctgatctgcctgggcctgagcctgggccccagaacccacgtgcaggccggccacctgcccaagcccaccctgtgggccgagcccggcagcgtgatcatccagggcagccccgtgaccctgagatgccagggcagcctgcaggccgaggagtaccacctgtacagagagaacaagagcgccagctgggtgagaagaatccaggagcccggcaagaacggccagttccccatccccagcatcacctgggagcacgccggcagataccactgccagtactacagccacaaccacagcagcgagtacagcgaccccctggagctggtggtgaccggcgcctacagcaagcccaccctgagcgccctgcccagccccgtggtgaccctgggcggcaacgtgaccctgcagtgcgtgagccaggtggccttcgacggcttcatcctgtgcaaggagggcgaggacgagcacccccagagactgaacagccacagccacgccagaggctggagctgggccatcttcagcgtgggccccgtgagccccagcagaagatggagctacagatgctacgcctacgacagcaacagcccctacgtgtggagcctgcccagcgacctgctggagctgctggtgcccggcgtgagcaagaagcccagcctgagcgtgcagcccggccccatggtggcccccggcgagagcctgaccctgcagtgcgtgagcgacgtgggctacgacagattcgtgctgtacaaggagggcgagagagacttcctgcagagacccggctggcagccccaggccggcctgagccaggccaacttcaccctgggccccgtgagccccagccacggcggccagtacagatgctacagcgcccacaacctgagcagcgagtggagcgcccccagcgaccccctggacatcctgatcaccggccagttctacgacagacccagcctgagctag

SEQ ID NO: 344156 - DNA, 2148 bp, Artificial Sequence
  derived and/or modified sequence
ctgctccacgcaatttctcagtgatcctctgcatctctgcctacaagggcctccctgacacccaagttcatattgctcagaaacagtgaacttgagtttttcgttttatcttgatctctctctgacaaagaaatccagatgatgcgagacctgatgaagacaatacatggaaaatgacagtcttggaaataactttggctgtcatcctgactctactgggacttgccatcctggctattttgttaacaagatgggcacgacgtaagcaaagtgaaatgtatatctccagatacagttcagaacaaagtgctagacttctggactatgaggatggtagaggatcccgacatgcatattcaacacaaagtgacacttcatatgataaccgagagagatccaaaagagattacacaccatcaaccaactctctagtgtctatggcatctaagttctccctgggacaaacagaactcattcttcttttgatgtgttttattttagcactgtctcgatcaagtattggtagtataaaatgtttacaaacaactgaagaacctccttccagaactgcaggagccatgatgcaattcacagcccctattcccggagctacaggacctttcaagctctctcaaaaaaccattgtgcaaactctaggacctattgtacaatatcctggatccaatgctggtccaccttcagcaccccgcggtccacccatggcacccataataatttcacagagaaccgcaagaatacctcaagttcacactatggacagttctggaaaaatcacactgactcctgtggttatattaacaggttacatggatgaagaacttgcaaaaaaatcttgttccaaaatccagattctaaaatgtggaggcactgcaaggtctcagaatagccgagaagaaaacaaggaagcactaaagaatgacatcatatttacgaattctgtagaatccttgaaatcagcacacataaaggagccagaaagagaaggaaaaggcactgatttagagaaagacaaaataggaatggaggtcaaggtagacagtgacgctggaataccaaaaagacaggaaacccaactaaaaatcagtgagatgagtgtaccacaaggacagggagcccaaataaagaaaagtgtgtcagatgtaccaagaggacaggagtcccaagtaaagaagagtgagtcaggtgtcccaaaaggacaagaagcccaagtaacgaagagtgggttggttgtactgaaaggacaggaagcccaggtagagaagagtgagatgggtgtgccaagaagacaggaatcccaagtaaagaagagtcagtctggtgtctcaaagggacaggaagcccaggtaaagcagagggagtcagttgtactgaaaggacaggaagcccaggtagagaagagtgagttgaaggtaccaaaaggacaagaaggccaagtagagaagactgaggcagatgtgccaaaggaacaagaggtccaagaaaagaagagtgaggcaggtgtactgaaaggaccagaatcccaagtaaagaacactgaggtgagtgtaccagaaacactggaatcccaagtaaagaagagtgagtcaggtgtactaaaaggacaggaagcccaagaaaagaaggagagttttgaggataaaggaaataatgataaagaaaaggagagagatgcagagaaagatccaaataaaaaagaaaaaggtgacaaaaacacaaaaggtgacaaaggaaaggacaaagttaaaggaaagagagaatcagaaatcaatggtgaaaaatcaaaaggctcgaaaagggcgaaggcaaatacaggaaggaagtacaacaaaaaagtggaagagtaaggataaattttttaaaggcccataagacaagtgattattatgattcccatactccagatacaaaccatatcccagccattgcctaaacagattacaattataaaatccctttcatcttcatatcacagtttctgctcttcagaagtttcaccctttttaatctctcagccacaaacctcagtttccaaatatttgttttataagttaagacgtatatgattccgtcaagaaagactggatactttctgaagtaaaacattttaattaaagaaatatatagtaa

SEQ ID NO: 344157 - DNA, 1692 bp, Artificial Sequence
  derived and/or modified sequence
atgaccgtgctggagatcaccctggccgtgatcctgaccctgctgggcctggccatcctggccatcctgctgaccagatgggccagaagaaagcagagcgagatgtacatcagcagatacagcagcgagcagagcgccagactgctggactacgaggacggcagaggcagcagacacgcctacagcacccagagcgacaccagctacgacaacagagagagaagcaagagagactacacccccagcaccaacagcctggtgagcatggccagcaagttcagcctgggccagaccgagctgatcctgctgctgatgtgcttcatcctggccctgagcagaagcagcatcggcagcatcaagtgcctgcagaccaccgaggagccccccagcagaaccgccggcgccatgatgcagttcaccgcccccatccccggcgccaccggccccttcaagctgagccagaagaccatcgtgcagaccctgggccccatcgtgcagtaccccggcagcaacgccggcccccccagcgcccccagaggcccccccatggcccccatcatcatcagccagagaaccgccagaatcccccaggtgcacaccatggacagcagcggcaagatcaccctgacccccgtggtgatcctgaccggctacatggacgaggagctggccaagaagagctgcagcaagatccagatcctgaagtgcggcggcaccgccagaagccagaacagcagagaggagaacaaggaggccctgaagaacgacatcatcttcaccaacagcgtggagagcctgaagagcgcccacatcaaggagcccgagagagagggcaagggcaccgacctggagaaggacaagatcggcatggaggtgaaggtggacagcgacgccggcatccccaagagacaggagacccagctgaagatcagcgagatgagcgtgccccagggccagggcgcccagatcaagaagagcgtgagcgacgtgcccagaggccaggagagccaggtgaagaagagcgagagcggcgtgcccaagggccaggaggcccaggtgaccaagagcggcctggtggtgctgaagggccaggaggcccaggtggagaagagcgagatgggcgtgcccagaagacaggagagccaggtgaagaagagccagagcggcgtgagcaagggccaggaggcccaggtgaagcagagagagagcgtggtgctgaagggccaggaggcccaggtggagaagagcgagctgaaggtgcccaagggccaggagggccaggtggagaagaccgaggccgacgtgcccaaggagcaggaggtgcaggagaagaagagcgaggccggcgtgctgaagggccccgagagccaggtgaagaacaccgaggtgagcgtgcccgagaccctggagagccaggtgaagaagagcgagagcggcgtgctgaagggccaggaggcccaggagaagaaggagagcttcgaggacaagggcaacaacgacaaggagaaggagagagacgccgagaaggaccccaacaagaaggagaagggcgacaagaacaccaagggcgacaagggcaaggacaaggtgaagggcaagagagagagcgagatcaacggcgagaagagcaagggcagcaagagagccaaggccaacaccggcagaaagtacaacaagaaggtggaggagtag

SEQ ID NO: 344158 - DNA, 1692 bp, Artificial Sequence
  derived and/or modified sequence
atgacagtgctggagatcacacttgcggtcattctgacgctgcttgggctggctatcctcgctatactgctgacaaggtgggcccggagaaagcagtctgaaatgtacatcagcaggtattctagtgagcaaagtgcgcgcctactggactatgaggatgggaggggatcaaggcatgcttattcgactcagtcggacacgagttacgacaacagggaaaggagcaaacgcgactatactcctagtaccaacagtctggtctcgatggcatccaaattcagcctgggacaaaccgagttaattctgctcctgatgtgttttattctggccctttccagatcttccattggctcaatcaagtgtcttcagacgactgaggagcccccctctaggaccgctggtgcgatgatgcagttcaccgcacccatcccaggcgccacggggccttttaagcttagccaaaagactatcgtccagacgctgggcccaattgtgcaatatcccggcagcaacgcaggccctcccagcgcgcctcgcggcccacccatggcaccaattatcatcagccaacgcacagcaagaatcccacaagtgcacactatggacagcagcggaaaaattacactgacgcccgtagtgattctcactggctatatggacgaggagcttgcaaaaaagtcctgctctaagatacagattctcaagtgcgggggcaccgcacggtcacagaattcacgagaggagaataaagaagccctcaagaacgacatcatctttactaactccgtcgagagtttgaaaagcgctcatattaaggagcctgagagagaagggaaggggaccgacttggaaaaagataagattgggatggaagttaaggttgatagtgatgccggaatccccaagcgacaagagacacagctcaaaatttccgaaatgagcgtgccacagggacagggagcccaaatcaaaaaaagtgtgtctgatgtaccaagaggacaggaatctcaggtgaagaagagcgaaagtggcgtccccaaggggcaggaggcgcaggttactaagtctggactggtggtcctcaaaggccaggaagcccaggtagagaagtccgagatgggggtccctcgcaggcaagagagccaggtgaaaaaaagccagtccggtgtatccaaaggccaagaggcacaggtgaaacagcgggagtcagtagtactcaaaggccaggaagcccaggtggagaagagtgaattaaaggtcccaaagggccaagagggccaggtggagaagaccgaagcagacgttcccaaagagcaggaagtacaggaaaagaagtccgaagccggcgtcctaaagggccctgagtcacaggtgaagaatactgaagtttcggttcccgagacgctggaatcccaggtaaagaaatccgagtcaggtgtgttgaaaggacaggaagctcaggagaagaaggagtcctttgaagacaaaggaaacaatgataaagaaaaagaacgggatgccgagaaggatcccaacaaaaaggagaagggagataaaaacactaagggagacaaagggaaagataaggtcaaagggaaacgtgaatcagagatcaacggcgaaaagagtaagggctcaaaacgcgctaaagcgaacaccggcagaaagtacaacaagaaagtggaggagtag

SEQ ID NO: 344159 - DNA, 1692 bp, Artificial Sequence
  derived and/or modified sequence
atgacagtgctggagatcaccctggccgtcatcctgaccctgctgggcctggccatcctggccatcctgctgacccgctgggcccggaggaagcagagcgagatgtacatcagccgctacagcagcgagcagagcgcccggctgctggactatgaagatggccggggcagcagacatgcctacagcacccagagcgacaccagctatgacaaccgggagaggagcaagagggactacacccccagcaccaacagcctggtgtccatggccagcaagttcagcctgggccagacagagctgatcctgctgctgatgtgcttcatcctggccctgagccgcagcagcatcggcagcatcaagtgcctgcagaccacagaggagccccccagcaggacagctggggccatgatgcagttcaccgcccccatccctggggccaccggccccttcaagctgagccagaagaccatcgtgcagaccctgggccccatcgtgcagtacccaggcagcaatgccggcccccccagcgccccccggggcccccccatggcccccatcatcatcagccagaggacagcccgcatcccccaggtgcacaccatggacagcagcggcaagatcaccctgacccctgtggtgatcctgaccggctacatggatgaggagctggccaagaagagctgcagcaagatccagatcctgaagtgtggcggcacagcccggagccagaacagccgggaggagaacaaggaggccctgaagaatgacatcatcttcaccaacagcgtggagagcctgaagagcgcccacatcaaggagcctgagcgggagggcaaaggaacagacctggagaaggacaagattggcatggaggtgaaggtggacagtgatgctggcatccccaagaggcaggagacccagctgaagatcagcgagatgtctgtgccccagggccagggcgcccagatcaagaagtctgtgtctgatgtgccccggggccaggagagccaggtgaagaagtctgagagcggcgtgcccaagggccaggaggcccaggtgaccaagagcggcctggtggtgctgaagggccaggaggcccaggtggagaagtctgagatgggcgtgccccggcggcaggagagccaggtgaagaagagccagagcggcgtgtccaagggccaggaggcccaggtgaagcagcgggagagcgtggtgctgaagggccaggaggcccaggtggagaagtctgagctgaaggtgcccaagggccaggagggccaggtggagaagacagaagcagatgtgcccaaggagcaggaggtgcaggagaagaagtctgaggccggcgtgctgaagggccctgagagccaggtgaagaacacagaggtgtctgtgcctgagaccctggagagccaggtgaagaagtctgagagcggcgtgctgaagggccaggaggcccaggagaagaaggagagctttgaggacaagggcaacaatgacaaggagaaggagagagatgctgagaaggaccccaacaagaaggagaagggggacaagaacaccaagggggacaagggcaaggacaaggtgaagggcaagcgggagagcgagatcaatggagagaagagcaagggcagcaagagggccaaggccaacacaggcaggaagtacaacaagaaggtggaggagtag

SEQ ID NO: 344160 - DNA, 1692 bp, Artificial Sequence
  derived and/or modified sequence
atgaccgtgctggagatcaccctggccgtgatcctgaccctgctgggcctggctattctcgcaattctactcacacgatgggcacgaagaaagcagtctgagatgtatatctcccgctattcctccgaacagagcgcccgacttttggattacgaggacggcagggggagccggcatgcctattccactcagtccgatactagttatgacaaccgcgagaggagtaagagggactatactccatccacgaactcattagtttctatggccagcaagttctcccttggccagactgaactcatactccttctgatgtgctttattctcgccctgagccgctcctccatcggcagcattaagtgtctgcagacaacggaggaacctccatcccgcaccgctggggccatgatgcagttcactgcccctatccccggagccaccgggccctttaaactgtctcagaagaccatcgtccagacccttgggcccattgtgcaatatccgggcagcaatgcagggccaccctcagctcctagggggcctcctatggctcccattataatctcccagcggacggctcggattccacaggtgcataccatggactcatccgggaagatcactctgacaccggtcgtcatcttaaccggttacatggacgaggaacttgcgaaaaagagctgctctaagattcagatccttaaatgcggtggcaccgcccgaagccaaaacagccgagaggaaaataaggaggccttaaagaatgatataatctttaccaacagcgtggagtctctcaaaagcgcgcacattaaagagccagagagggagggaaaaggtaccgatctcgaaaaggacaagatcggtatggaggttaaagtagattcggacgccggtatcccaaagcggcaagagactcagctgaagatcagtgagatgagcgtacctcaggggcagggggctcagataaaaaagagtgtgagtgacgtgccccgcggtcaagagagccaggtcaagaaatccgagagtggagttcccaagggccaggaagcacaggtaacgaagtccggtttggtggtcctgaaggggcaggaagcacaggtggaaaagtccgaaatgggagttcctcgccgacaggagtcccaggtgaagaagtctcaatccggagtcagcaaaggacaggaagctcaggttaaacaaagggagtccgtggtgctgaaggggcaggaagcccaagtggagaaatctgagttgaaggtgccaaagggccaggaaggccaggtggagaaaaccgaggctgatgttcctaaggaacaagaggtacaggagaagaaaagtgaagcgggggttctgaagggacccgaaagtcaagtgaagaacacagaagtgagcgtaccagagacgctggaatcgcaggtcaagaaaagcgaatctggggtcctgaaaggccaggaggctcaggaaaaaaaggagtcttttgaagacaaaggcaacaacgacaaggaaaaggaacgggatgcagaaaaggaccccaataagaaggagaaaggggacaagaacacgaagggagataagggaaaagacaaggtgaagggcaagcgagaatccgagatcaatggagagaaatctaaaggctcaaagagggcgaaagccaacaccgggcggaagtacaacaagaaggtggaggagtag

SEQ ID NO: 344161 - DNA, 1692 bp, Artificial Sequence
  derived and/or modified sequence
atgaccgtgttggaaatcacactagccgtgatcctcacattactaggcctggccatcttggcgattctccttactaggtgggcacggcgtaagcagagtgaaatgtacatcagtcggtactcgagcgaacaaagtgctagactcctcgattatgaagacgggagaggctctcgccatgcatacagtacccagtcagacacatcctatgataatcgtgagcgatctaagcgggactataccccgtcaacaaactcattggttagcatggccagcaagttttccttgggccagacagagcttattctgctgctgatgtgcttcatcctggccttatctaggtccagtatcggttcaataaagtgcctgcagaccacagaagagcccccttccaggactgctggcgcaatgatgcagtttaccgccccaatcccaggggcaacaggaccattcaagctgtcgcaaaagacgattgtccagacacttggccctatcgtccagtaccctgggtctaatgccggacctcccagtgcgcctagggggccacccatggcccctattattataagtcaaaggacagctcgcatccctcaggtgcacacaatggactcctctggcaagattacactgacacctgttgttatcctgacagggtacatggacgaggaattggccaagaagagctgctccaaaattcaaatactgaaatgcgggggaaccgccaggtcacaaaattcccgcgaagaaaacaaagaagcccttaaaaatgacatcatctttacaaacagcgttgagagcctgaaatccgctcacattaaggagcctgagagagagggcaagggtacagacctagagaaggataagattggcatggaagtaaaggtggattccgacgcaggcatccccaagaggcaagaaacacagctcaagatctccgagatgtcagtgccgcagggacaaggcgctcagattaagaaatcggtgagtgatgtgcctagaggccaggaatcacaggttaaaaaaagcgaatcaggggtgccgaaaggtcaggaggctcaagtgaccaaatccgggcttgtcgttctgaagggtcaagaagctcaggtcgagaaatcagagatgggagtgccccgtcgccaggagagtcaggtcaagaagtctcaatcaggcgtttctaagggtcaggaggcccaggttaagcagcgggagtctgtagtgttaaagggacaggaagcccaggtcgaaaagagtgagctgaaggttccaaaaggccaagagggtcaggttgagaagaccgaggcagatgtcccaaaggagcaagaagttcaagagaaaaagagcgaagcaggtgtcctcaaggggccagagagccaagtcaagaatacagaagtgtcagtgcctgaaactctggagtctcaggtgaagaaatctgagagtggcgtactgaagggacaggaggcccaggaaaaaaaagagtcctttgaggacaaaggaaataacgataaggagaaagaacgagacgcggaaaaagatccaaacaaaaaggaaaaaggagacaagaacactaagggggacaaagggaaagacaaggttaagggcaaacgcgaaagcgaaattaatggggaaaaatctaagggaagtaagcgggctaaggctaataccggtagaaaatacaataagaaggtggaggagtag

SEQ ID NO: 344162 - protein, 560 aa, Artificial Sequence
  derived and/or modified sequence
SVLKITLAVILTLLGLAILAILLTRWARCKQSEMYISRYSSEQSARLLDYEDGRGSRHAYSTQSDTSYDNRARYEAPFSPKIEKLAISKSSLALPQGSMSSIKCLQTTEEPPCIPCVMILIFYNVPATRGMGKVVRKHIMQTPGPIGKLPVFSVRSHPHTITGPPSAPRGKPVSTLLISNSVCSYLTQSFQFPEVRTIATKKRATTQGSVILTGYMDEELAKKSCSKIQILKCGGTARSQNSREENKEALKNDIIFTNSVESLKSAHIKEPEREGKGTDLEKDKIGMEVKVDSDAGIPKRQETQLKISEMSIPQGQGAQIKKSVSDVPRGQESQVKKSESGVPKGQEAQVTKSGLVVLKGQEAQVEKSEMGVPRRQESQVKKSQSGVSKGQEAQVKKRESVVLKGQEAQVEKSELKVPKGQEGQVEKTEADVPKEQEVQEKKSEAGVLKGPESQVKNTEVSVPETLESQVKKSESGVLKGQEAQEKKESFEDKGNNDKEKERDAEKDPNKKEKGDKNTKGDKGKDKVKGKRESEINGEKSKGSKRAKANTGRKYNKKVEE

SEQ ID NO: 344163 - protein, 562 aa, Artificial Sequence
  derived and/or modified sequence
MTVLEITLAVILTLLGLAILAILLTRWARCKQSEMYISRYSSEQSARLLDYEDGRGSRHAYSTQSDTSYDNRERSKRDYTPSTNSLALSRSSIALPQGSMSSIKCLQTTEEPPSRTAGAMMQFTAPIPGATGPIKLSQKTIVQTPGPIVQYPGSNVRSHPHTITGPPSAPRGPPMAPIIISQRTASQLAAPIRIPQVHTMDSSGKITLTPVVILTGYMDEELAKKSCSKIQILKCGGTARSQNSREENKEALKNDIIFTNSVESLKSAHIKEPEREGKGTDLEKDKIGMEVKVDSDAGIPKRQETQLKISEMSIPQGQGAQIKKSVSDVPRGQESQVKKSESGVPKGQEAQVTKSGLVVLKGQEAQVEKSEMGVPRRQESQVKKSQSGVSKGQEAQVKKRESVVLKGQEAQVEKSELKVPKGQEGQVEKTEADVPKEQEVQEKKSEAGVLKGPESQVKNTEVSVPETLESQVKKSESGVLKGQEAQEKKESFEDKGNNDKEKERDAEKDPNKKEKGDKNTKGDKGKDKVKGKRESEINGEKSKGSKRAKANTGRKYNKKVEE

SEQ ID NO: 344164 - protein, 562 aa, Artificial Sequence
  derived and/or modified sequence
MTVLEITLAVILTLLGLAILAILLTRWARRKQSEMYISRYSSEQSARLLDYEDGRGSRHAYSTQSDTSYDNRERSKRDYTPSTNSLALSRSSIALPQGSMSSIKCLQTTEEPPSRTAGAMMQFTAPIPGATGPIKLSQKTIVQTLGPIVQYPGSNVRSHPHTITGPPSAPRGPPMAPIIISQRTASQLAAPIRIPQVHTMDSSGKITLTPVVILTGYMDEELAKKSCSKIQILKCGGTARSQNSREENKEALKNDIIFTNSVESLKSAHIKEPEREGKGTDLEKDKIGMEVKVDSDAGIPKRQETQLKISEMSIPQGQGAQIKKSVSDVPRGQESQVKKSESGVPKGQEAQVTKSGLVVLKGQEAQVEKSEMGVPRRQESQVKKSQSGVSKGQEAQVKKRESVVLKGQEAQVEKSELKVPKGQEGQVEKTEADVPKEQEVQEKKSEAGVLKGPESQVKNTEVSVPETLESQVKKSESGVLKGQEAQEKKESFEDKGNNDKEKERDAEKDPNKKEKGDKNTKGDKGKDKVKGKRESEINGEKSKGSKRAKANTGRKYNKKVEE

SEQ ID NO: 344165 - protein, 192 aa, Artificial Sequence
  derived and/or modified sequence
MTVLEITLAVILTLLGLAILAILLTRWARRKQSEMHISRYSSEQSARLLDYEDGRGSRHAYSTQSDTSCDNRERSKRDYTPSTNSLALSRSSIALPQGSMSSIKCLQTTEELPSRTAGAMMQFTAPIPGATGPIKLSQKTIVQTPGPIVQYPGPNVRSHPHTITGPPSAPRGPPMAPIIISQRTASQLAAPI

SEQ ID NO: 344166 - protein, 562 aa, Artificial Sequence
  derived and/or modified sequence
MTVLEITLAVILTLLGLAILAILLTRWARRKQSEMYISRYSSEQSARLLDYEDGRGSRHAYSTQSDTSYDNRERSKRDYTPSTNSLALSRSSIALPQGSMSSIKCLQTTEEPPSRTAGAMMQFTAPIPGATGPIKLSQKTIVQTLGPIVQYPGSNVRSHPHTITGPPSAPRGPPMAPIIISQRTASQLAAPIRIPQVHTMDSSGKITLTPVVILTGYMDEELAKKSCSKIQILKCGGTARSQNSREENKEALKNDIIFTNSVESLKSAHIKEPEREGKGTDLEKDKIGMEVKVDSDAGIPKRQETQLKISEMSVPQGQGAQIKKSVSDVPRGQESQVKKSESGVPKGQEAQVTKSGLVVLKGQEAQVEKSEMGVPRRQESQVKKSQSGVSKGQEAQVKKRESVVLKGQEAQVEKSELKVPKGQEGQVEKTEADVPKEQEVQEKKSEAGVLKGPESQVKNTEVSVPETLESQVKKSESGVLKGQEAQEKKESFEDKGNNDKEKERDAEKDPNKKEKGDKNTKGDKGKDKVKGKRESEINGEKSKGSKRAKANTGRKYNKKVEE

SEQ ID NO: 344167 - protein, 562 aa, Artificial Sequence
  derived and/or modified sequence
MTVLEITLAVILTLLGLAILAILLTRWARRKQSEMYISRYSSEQSARLLDYEDGRGSRHAYSTQSDTSYDNRERSKRDYTPSTNSLALSRSSIALPQGSMSSIKCLQTTEEPPSRTAGAMMQFTAPIPGATGPFKLSQKTIVQTLGPIVQYPGSNVRSHPHTITGPPSAPRGPPMAPIIISQRTASQLAAPIRIPQVHTMDSSGKITLTPVVILTGYMDEELAKKSCSKIQILKCGGTARSQNSREENKEALKNDIIFTNSVESLKSAHIKEPEREGKGTDLEKDKIGMEVKVDSDAGIPKRQETQLKISEMSVPQGQGAQIKKSVSDVPRGQESQVKKSESGVPKGQEAQVTKSGLVVLKGQEAQVEKSEMGVPRRQESQVKKSQSGVSKGQEAQVKQRESVVLKGQEAQVEKSELKVPKGQEGQVEKTEADVPKEQEVQEKKSEAGVLKGPESQVKNTEVSVPETLESQVKKSESGVLKGQEAQEKKESFEDKGNNDKEKERDAEKDPNKKEKGDKNTKGDKGKDKVKGKRESEINGEKSKGSKRAKANTGRKYNKKVEE

SEQ ID NO: 344168 - protein, 562 aa, Artificial Sequence
  derived and/or modified sequence
MTVLEITLAVILTLLGLAILAILLTRWARRKQSEMHISRYSSEQSARLLDYEDGRGSRHAYSTQSDTSCDNRERSKRDYTPSTNSLALSRSSIALPQGSMSSIKCLQTTEELPSRTAGAMMQFTAPIPGATGPIKLSQKTIVQTPGPIVQYPGPNVRSHPHTITGPPSAPRGPPMAPIIISQRTASQLAAPIRIPQVHTMDSSGKITLTPVVILTGYMDEELAKKPCSKIQILKCGGTARSQNSREENKEALKNDIIFTNSVESLKSAHIKEPEREGKGTDLEKDKIGMEVKVDSDAGIPKRQETQLKISEMSIPQGQGAQIKKSVSDVPRGQESQVKKSESGVPKGQEAQVTKSGLVVLKGQEAQVEKSEMGVPRRQESQVKKSQSGVSKGQEAQVKKRESVVLKGQEAQVEKSELKVPKGQEGQVEKTEADVPKEQEVQEKKSEAGVLKGPESQVKNTEVSVPETLESQVKKSESGVLKGQEAQEKKESFEDKGNNDKEKERDAEKDPNKKEKGDKNTKGDKGKDKVKGKRESEINGEKSKGSKRAKANTGRKYNKKVEE

SEQ ID NO: 344169 - DNA, 1683 bp, Artificial Sequence
  derived and/or modified sequence
tctgtactaaaaataactttggctgtcatcctgactctactgggacttgccatcctggctattttgttaacaagatgggcacgatgtaagcaaagtgaaatgtatatctccagatacagttcagaacaaagtgctagacttctggactatgaggatggtagaggatcccgacatgcatattcaacacaaagtgacacttcatatgataaccgagcacgctatgaggcaccattttccccaaagattgagaaactagcaatctccaaaagttctttagctttacctcaaggatccatgagtagtataaaatgtttacaaacaactgaagaacctccttgcataccatgtgtaatgattttgatattctataatgtgcctgctaccagaggaatggggaaggtggtgagaaagcacataatgcaaactccaggacctattggtaagctgcctgttttttcagtcagatcgcatcctcacacaatcactggtccaccttcagcaccccgcggtaaacctgtctctaccctgctcatttctaactctgtgtgcagctacctgactcaaagcttccagtttcctgaagttaggacaatagccaccaagaagagagccacaacccagggctcagttatattaacaggttacatggatgaagaacttgcaaaaaaatcttgttccaaaatccagattctaaaatgtggaggcactgcaaggtctcagaatagccgagaagaaaacaaggaagcactaaagaatgacatcatatttacgaattctgtagaatccttgaaatcagcacacataaaggagccagaaagagaaggaaaaggcactgatttagagaaagacaaaataggaatggaggtcaaggtagacagtgacgctggaataccaaaaagacaggaaacccaactaaaaatcagtgagatgagtataccacaaggacagggagcccaaataaagaaaagtgtgtcagatgtaccaagaggacaggagtcccaagtaaagaagagtgagtcaggtgtcccaaaaggacaagaagcccaagtaacgaagagtgggttggttgtactgaaaggacaggaagcccaggtagagaagagtgagatgggtgtgccaagaagacaggaatcccaagtaaagaagagtcagtctggtgtctcaaagggacaggaagcccaggtaaagaagagggagtcagttgtactgaaaggacaggaagcccaggtagagaagagtgagttgaaggtaccaaaaggacaagaaggccaagtagagaagactgaggcagatgtgccaaaggaacaagaggtccaagaaaagaagagtgaggcaggtgtactgaaaggaccagaatcccaagtaaagaacactgaggtgagtgtaccagaaacactggaatcccaagtaaagaagagtgagtcaggtgtactaaaaggacaggaagcccaagaaaagaaggagagttttgaggataaaggaaataatgataaagaaaaggagagagatgcagagaaagatccaaataaaaaagaaaaaggtgacaaaaacacaaaaggtgacaaaggaaaggacaaagttaaaggaaagagagaatcagaaatcaatggtgaaaaatcaaaaggctcgaaaagggcgaaggcaaatacaggaaggaagtacaacaaaaaagtggaagagtaa

SEQ ID NO: 344170 - DNA, 2173 bp, Artificial Sequence
  derived and/or modified sequence
tcccatcatttgcttaggtctgatcaatctgctccacacaatttctcagtgatcctctgcatctctgcctacaagggcctccctgacacccaagttcatattgctcagaaacagtgaacttgagtttttcgttttatcttgatctctctctgacaaagaaatccagatgatgcgagacctgatgaagacaatacatggaaaatgacagtcttggaaataactttggctgtcatcctgactctactgggacttgccatcctggctattttgttaacaagatgggcacgatgtaagcaaagtgaaatgtatatctccagatacagttcagaacaaagtgctagacttctggactatgaggatggtagaggatcccgacatgcatattcaacacaaagtgacacttcatatgataaccgagagagatccaaaagagattacacaccatcaaccaactctctagcactgtctcgatcaagtattgctttacctcaaggatccatgagtagtataaaatgtttacaaacaactgaagaacctccttccagaactgcaggagccatgatgcaattcacagcccctattcccggagctacaggacctatcaagctctctcaaaaaaccattgtgcaaactccaggacctattgtacaatatcctggatccaatgtcagatcgcatcctcacacaatcactggtccaccttcagcaccccgcggtccacccatggcacccataataatttcacagagaaccgcaagtcagctggcagcacctataagaatacctcaagttcacactatggacagttctggaaaaatcacactgactcctgtggttatattaacaggttacatggatgaagaacttgcaaaaaaatcttgttccaaaatccagattctaaaatgtggaggcactgcaaggtctcagaatagccgagaagaaaacaaggaagcactaaagaatgacatcatatttacgaattctgtagaatccttgaaatcagcacacataaaggagccagaaagagaaggaaaaggcactgatttagagaaagacaaaataggaatggaggtcaaggtagacagtgacgctggaataccaaaaagacaggaaacccaactaaaaatcagtgagatgagtataccacaaggacagggagcccaaataaagaaaagtgtgtcagatgtaccaagaggacaggagtcccaagtaaagaagagtgagtcaggtgtcccaaaaggacaagaagcccaagtaacgaagagtgggttggttgtactgaaaggacaggaagcccaggtagagaagagtgagatgggtgtgccaagaagacaggaatcccaagtaaagaagagtcagtctggtgtctcaaagggacaggaagcccaggtaaagaagagggagtcagttgtactgaaaggacaggaagcccaggtagagaagagtgagttgaaggtaccaaaaggacaagaaggccaagtagagaagactgaggcagatgtgccaaaggaacaagaggtccaagaaaagaagagtgaggcaggtgtactgaaaggaccagaatcccaagtaaagaacactgaggtgagtgtaccagaaacactggaatcccaagtaaagaagagtgagtcaggtgtactaaaaggacaggaagcccaagaaaagaaggagagttttgaggataaaggaaataatgataaagaaaaggagagagatgcagagaaagatccaaataaaaaagaaaaaggtgacaaaaacacaaaaggtgacaaaggaaaggacaaagttaaaggaaagagagaatcagaaatcaatggtgaaaaatcaaaaggctcgaaaagggcgaaggcaaatacaggaaggaagtacaacaaaaaagtggaagagtaaggataaattttttaaaggcccataagacaagtgattattatgattcccatactccagatacaaaccatatcccagccattgcctaaacagattacaattataaaatccctttcatcttcatatcacagtttctgctcttcagaagtttcaccctttttaatctctcagccacaaacctcagtttccaaatatttgttttataagttaagacgtatatgattccgtcaagaaagactggatactttctgaagtaaaacattttaattaaagaaatatatagtaa

SEQ ID NO: 344171 - DNA, 1683 bp, Artificial Sequence
  derived and/or modified sequence
agcgtgctgaagatcaccctggccgtgatcctgaccctgctgggcctggccatcctggccatcctgctgaccagatgggccagatgcaagcagagcgagatgtacatcagcagatacagcagcgagcagagcgccagactgctggactacgaggacggcagaggcagcagacacgcctacagcacccagagcgacaccagctacgacaacagagccagatacgaggcccccttcagccccaagatcgagaagctggccatcagcaagagcagcctggccctgccccagggcagcatgagcagcatcaagtgcctgcagaccaccgaggagcccccctgcatcccctgcgtgatgatcctgatcttctacaacgtgcccgccaccagaggcatgggcaaggtggtgagaaagcacatcatgcagacccccggccccatcggcaagctgcccgtgttcagcgtgagaagccacccccacaccatcaccggcccccccagcgcccccagaggcaagcccgtgagcaccctgctgatcagcaacagcgtgtgcagctacctgacccagagcttccagttccccgaggtgagaaccatcgccaccaagaagagagccaccacccagggcagcgtgatcctgaccggctacatggacgaggagctggccaagaagagctgcagcaagatccagatcctgaagtgcggcggcaccgccagaagccagaacagcagagaggagaacaaggaggccctgaagaacgacatcatcttcaccaacagcgtggagagcctgaagagcgcccacatcaaggagcccgagagagagggcaagggcaccgacctggagaaggacaagatcggcatggaggtgaaggtggacagcgacgccggcatccccaagagacaggagacccagctgaagatcagcgagatgagcatcccccagggccagggcgcccagatcaagaagagcgtgagcgacgtgcccagaggccaggagagccaggtgaagaagagcgagagcggcgtgcccaagggccaggaggcccaggtgaccaagagcggcctggtggtgctgaagggccaggaggcccaggtggagaagagcgagatgggcgtgcccagaagacaggagagccaggtgaagaagagccagagcggcgtgagcaagggccaggaggcccaggtgaagaagagagagagcgtggtgctgaagggccaggaggcccaggtggagaagagcgagctgaaggtgcccaagggccaggagggccaggtggagaagaccgaggccgacgtgcccaaggagcaggaggtgcaggagaagaagagcgaggccggcgtgctgaagggccccgagagccaggtgaagaacaccgaggtgagcgtgcccgagaccctggagagccaggtgaagaagagcgagagcggcgtgctgaagggccaggaggcccaggagaagaaggagagcttcgaggacaagggcaacaacgacaaggagaaggagagagacgccgagaaggaccccaacaagaaggagaagggcgacaagaacaccaagggcgacaagggcaaggacaaggtgaagggcaagagagagagcgagatcaacggcgagaagagcaagggcagcaagagagccaaggccaacaccggcagaaagtacaacaagaaggtggaggagtag

SEQ ID NO: 344172 - DNA, 1689 bp, Artificial Sequence
  derived and/or modified sequence
atgaccgtgctggagatcaccctggccgtgatcctgaccctgctgggcctggccatcctggccatcctgctgaccagatgggccagatgcaagcagagcgagatgtacatcagcagatacagcagcgagcagagcgccagactgctggactacgaggacggcagaggcagcagacacgcctacagcacccagagcgacaccagctacgacaacagagagagaagcaagagagactacacccccagcaccaacagcctggccctgagcagaagcagcatcgccctgccccagggcagcatgagcagcatcaagtgcctgcagaccaccgaggagccccccagcagaaccgccggcgccatgatgcagttcaccgcccccatccccggcgccaccggccccatcaagctgagccagaagaccatcgtgcagacccccggccccatcgtgcagtaccccggcagcaacgtgagaagccacccccacaccatcaccggcccccccagcgcccccagaggcccccccatggcccccatcatcatcagccagagaaccgccagccagctggccgcccccatcagaatcccccaggtgcacaccatggacagcagcggcaagatcaccctgacccccgtggtgatcctgaccggctacatggacgaggagctggccaagaagagctgcagcaagatccagatcctgaagtgcggcggcaccgccagaagccagaacagcagagaggagaacaaggaggccctgaagaacgacatcatcttcaccaacagcgtggagagcctgaagagcgcccacatcaaggagcccgagagagagggcaagggcaccgacctggagaaggacaagatcggcatggaggtgaaggtggacagcgacgccggcatccccaagagacaggagacccagctgaagatcagcgagatgagcatcccccagggccagggcgcccagatcaagaagagcgtgagcgacgtgcccagaggccaggagagccaggtgaagaagagcgagagcggcgtgcccaagggccaggaggcccaggtgaccaagagcggcctggtggtgctgaagggccaggaggcccaggtggagaagagcgagatgggcgtgcccagaagacaggagagccaggtgaagaagagccagagcggcgtgagcaagggccaggaggcccaggtgaagaagagagagagcgtggtgctgaagggccaggaggcccaggtggagaagagcgagctgaaggtgcccaagggccaggagggccaggtggagaagaccgaggccgacgtgcccaaggagcaggaggtgcaggagaagaagagcgaggccggcgtgctgaagggccccgagagccaggtgaagaacaccgaggtgagcgtgcccgagaccctggagagccaggtgaagaagagcgagagcggcgtgctgaagggccaggaggcccaggagaagaaggagagcttcgaggacaagggcaacaacgacaaggagaaggagagagacgccgagaaggaccccaacaagaaggagaagggcgacaagaacaccaagggcgacaagggcaaggacaaggtgaagggcaagagagagagcgagatcaacggcgagaagagcaagggcagcaagagagccaaggccaacaccggcagaaagtacaacaagaaggtggaggagtag

SEQ ID NO: 344173 - DNA, 1683 bp, Artificial Sequence
  derived and/or modified sequence
tctgtgctgaagattacactggctgtcattctgacactgctagggctggccattctggccattctgctgaccaggtgggctcggtgtaaacagtccgagatgtacatttcgcggtactcatctgaacagtcagctcggttgcttgattatgaggatgggcggggttcgaggcacgcctattcaacacagagcgataccagctacgacaatagagccagatacgaagcccctttcagcccgaagatcgaaaagctcgcaatttcaaaatcttctcttgccctcccacaagggagcatgtctagcattaagtgtcttcagactacagaggaacccccctgcatcccatgtgtgatgatcctgatcttctacaacgtgcccgccacaaggggcatgggaaaggtggtgagaaagcacattatgcaaacccccggccctatcgggaagctgccggtattcagcgtacgcagtcatcctcatacaataaccgggccaccttcagcaccacgaggaaagcccgttagcacactgctgataagtaatagcgtgtgcagttacttaacacagagcttccagttccctgaggtccgtactatagccactaaaaagcgcgccactacccaggggagcgtgatcttaacaggatacatggatgaggaactggccaagaagtcctgctctaaaatccaaatcctgaaatgtggggggactgcccgaagccagaattctagggaagagaacaaggaggccttgaagaacgatatcatcttcaccaatagtgttgaatcactcaagagtgctcacataaaggaacctgagcgagaaggtaaggggactgaccttgagaaggataaaataggaatggaggtaaaggtggactcagatgccggcattccaaaaaggcaggaaacccaactgaagattagcgaaatgtccatcccccaaggtcagggagcgcagatcaagaaatcggtttcagatgtgcctcggggccaagagtctcaggtgaaaaaatccgagtctggcgtgccaaagggacaggaagcccaagtcactaaatccggactcgtggttttaaaaggccaagaagctcaggtcgaaaagagcgagatgggggtaccccgaaggcaggaatcacaggttaagaaaagccagagtggagtctctaaggggcaagaggcacaggtgaaaaaacgcgaatccgtggtcctgaaggggcaggaggcccaggtggagaaaagcgagttaaaggtgccaaaaggccaggagggtcaggtggaaaaaaccgaagccgatgttcccaaagagcaggaggtgcaggagaagaagtcagaagctggtgtgttgaagggccctgagtcacaagttaagaacactgaagtgtccgtgcctgaaacactggaaagtcaggttaagaagtctgagagcggcgttttgaagggtcaagaagctcaggagaaaaaggagagcttcgaggacaaggggaacaatgacaaggagaaagagcgtgacgctgagaaagaccctaacaaaaaggaaaagggagacaagaatacaaagggtgacaaaggtaaagacaaggttaagggcaagagggagtcagagatcaacggtgaaaagagcaagggctccaaacgcgctaaagccaataccggccggaagtacaataagaaagtggaggagtag

SEQ ID NO: 344174 - DNA, 1689 bp, Artificial Sequence
  derived and/or modified sequence
atgacagtgctcgaaatcactctggccgtcatcctcacattgctgggcctcgcaatactggcaatcctgctgactagatgggcgaggtgcaaacaatctgaaatgtatataagtaggtatagttcagagcagagcgcccggctcctggattacgaggacggccgagggagcaggcacgcctactcgacacagtcggacacatcctacgacaaccgggagagaagcaagagagactacactcccagcactaattctttagctctatcaagaagctcgatcgctcttccccaggggagcatgagttcaatcaaatgtctgcagaccacagaggagccaccttctcgcactgcgggtgctatgatgcaattcaccgccccaatccctggggcaactggacctattaagctctcccagaaaacaatcgtccagactcctggcccaatagtccaatatccgggctctaacgtccgatcacaccctcatacgatcacaggccccccaagtgcacctagggggcctccaatggcccccattattatcagtcaaaggacagcctcgcagttggctgcgcctatcagaattccccaagtgcacaccatggacagttcaggtaaaattacgctcacgcctgtagtcatactaacgggctacatggatgaggagctcgccaagaagtcctgctcaaagatacagatcctgaaatgtggaggcacggcgcgttcacagaattcgagagaagaaaataaagaggccttaaagaatgatatcatcttcacaaatagtgttgagtccctgaagagcgcccacatcaaggaaccggagcgcgaagggaaaggcacagatctggagaaggacaagataggaatggaagtcaaagttgatagtgacgcaggaatcccaaaacgacaagagacacagttgaaaattagcgagatgtctattcctcagggccagggagcacagattaagaagtcggtgtctgacgttccccggggccaggagtctcaggtcaagaaatctgagtctggtgtaccaaaaggccaggaagcacaggtgacaaagagcggattggttgtgttgaagggccaggaggcccaggtggaaaagagtgagatgggagtacccaggcgccaagaatctcaggtgaagaagtcgcagtcaggcgtgtcgaagggccaagaggctcaggtcaagaagcgtgaaagcgtggtcttgaaaggacaagaagcgcaggtggagaaatcagagctgaaagtgcctaaaggtcaggaaggccaggtggagaagaccgaggctgatgtgcccaaggagcaagaagtgcaagaaaagaaatctgaggcaggggtcctcaaaggccccgagagccaggtgaagaacaccgaggtgtcagttcctgaaacactggaatctcaggtgaagaaaagcgagtccggcgtcctgaaaggccaggaggcccaggagaagaaagaatcatttgaggacaaggggaacaacgataaggaaaaggagagagacgccgagaaggaccctaacaagaaagaaaaaggagataaaaataccaaaggtgataaagggaaagataaagtcaaaggtaaaagggaatcggaaataaatggcgagaagagcaagggctctaagagggccaaagcaaacacaggccgaaagtataacaagaaggtggaggagtag

SEQ ID NO: 344175 - DNA, 1683 bp, Artificial Sequence
  derived and/or modified sequence
agcgtcctcaaaatcaccttagctgtgattcttacacttctgggcttggcaattttggccatcctgctcactcggtgggctcggtgcaaacaaagtgagatgtacatctcaaggtactcaagcgagcagagtgcccgcctgctggactacgaggatggaagaggttcacgacatgcttattccacgcagagtgacactagctacgataacagggcccggtacgaagccccattttctccgaaaattgagaagctggcgatttcgaaaagttctctggccctgcctcaaggaagcatgagtagcatcaagtgcttacaaactaccgaagagccaccttgtattccgtgtgttatgatcttgatcttctataacgtgccggccactcgggggatgggaaaggtggtccgaaaacacataatgcaaacccccggccccattggtaaactccctgtcttcagcgtgcgaagccaccctcacacaatcaccgggccacccagcgcacctagaggaaagcctgtgagcaccttactaatttctaactcagtttgttcctacctcacacaaagctttcagttcccagaagtaagaacaatagccactaagaaaagggccactactcagggcagtgtgatcttaaccggatatatggatgaagaattggcaaaaaagagttgttccaaaatccagatcttgaagtgcggagggacagcaagatcccaaaattcacgcgaagagaacaaggaggctctgaaaaatgacattatcttcactaatagcgtggagagtctgaagtccgcccatattaaggagcctgagagagaaggcaaagggacggacctggagaaagataagatcggaatggaggtgaaggtcgactccgacgccggtattcctaagaggcaggagactcagctgaagatctctgagatgtcaataccgcagggacaaggcgcgcaaatcaagaagtccgtcagcgatgtgcccaggggccaggagtctcaagtcaaaaaatctgaatcaggggtgccgaaaggccaggaagcacaggtgacaaagagcggtttggtcgtattgaaaggccaggaagctcaagtggaaaaatccgaaatgggggtccctcgaaggcaggagtcccaggtgaaaaagagccagagcggtgtgtccaaaggccaggaggcacaggtgaaaaagcgggagtctgtggtcctgaaggggcaggaggcccaggtggaaaagagcgagttgaaagttccaaagggccaggaagggcaggtcgaaaaaacagaggcagacgtacctaaagagcaggaggtgcaggagaaaaaaagcgaggcaggtgtccttaaagggccagagagtcaggtgaaaaatacagaagtgtccgtgcccgaaactttagagagccaggtaaagaagtccgagtccggggtgcttaaaggccaggaagcccaggagaagaaggaatcttttgaagacaagggtaataatgacaaggaaaaagagcgcgacgcagaaaaggatccaaacaagaaggagaaaggggacaaaaacaccaagggagacaaggggaaagacaaagtcaagggcaagagagagtccgagattaatggagagaaatcaaaaggatctaaacgtgccaaggccaacacaggccgaaaatataacaaaaaagtcgaagagtag

SEQ ID NO: 344176 - DNA, 1683 bp, Artificial Sequence
  derived and/or modified sequence
tctgtgctgaagatcaccctggccgtcatcctgaccctgctgggcctggccatcctggccatcctgctgacccgctgggcccgctgcaagcagagcgagatgtacatcagccgctacagcagcgagcagagcgcccggctgctggactatgaagatggccggggcagcagacatgcctacagcacccagagcgacaccagctatgacaacagagcccgctatgaggcccccttcagccccaagattgagaagctggccatcagcaagagcagcctggccctgccccagggctccatgagcagcatcaagtgcctgcagaccacagaggagcccccctgcatcccctgtgtgatgatcctgatcttctacaacgtgcctgccacccggggcatgggcaaggtggtgaggaagcacatcatgcagaccccaggccccatcggcaagctgcccgtcttctctgtgcgcagccacccccacaccatcaccggcccccccagcgccccccggggcaagcctgtgtccaccctgctgatcagcaacagcgtgtgcagctacctgacccagagcttccagtttcctgaggtgaggaccatcgccaccaagaagagggccaccacccagggcagcgtcatcctgaccggctacatggatgaggagctggccaagaagagctgcagcaagatccagatcctgaagtgtggcggcacagcccggagccagaacagccgggaggagaacaaggaggccctgaagaatgacatcatcttcaccaacagcgtggagagcctgaagagcgcccacatcaaggagcctgagcgggagggcaagggcacagacctggagaaggacaagattggcatggaggtgaaggtggacagtgatgctggcatccccaagaggcaggagacccagctgaagatcagcgagatgagcatcccccagggccagggcgcccagatcaagaagtctgtgtctgatgtgccccggggccaggagagccaggtgaagaagtctgagagcggcgtgcccaagggccaggaggcccaggtgaccaagagcggcctggtggtgctgaagggccaggaggcccaggtggagaagtctgagatgggcgtgccccggcggcaggagagccaggtgaagaagagccagagcggcgtgtccaagggccaggaggcccaggtgaagaagcgggagagcgtggtgctgaagggccaggaggcccaggtggagaagtctgagctgaaggtgcccaagggccaggagggccaggtggagaagacagaagcagatgtgcccaaggagcaggaggtgcaggagaagaagtctgaggccggcgtgctgaagggccctgagagccaggtgaagaacacagaggtgtctgtgcctgagaccctggagagccaggtgaagaagtctgagagcggcgtgctgaagggccaggaggcccaggagaagaaggagagctttgaagataaaggaaataatgacaaggagaaggagagagatgctgagaaggaccccaacaagaaggagaagggggacaagaacaccaagggggacaagggcaaggacaaggtgaagggcaagcgggagagcgagatcaacggggagaagagcaagggcagcaagagggccaaggccaacacaggcaggaagtacaacaagaaggtggaggagtag

SEQ ID NO: 344177 - DNA, 1689 bp, Artificial Sequence
  derived and/or modified sequence
atgacagtgctggagatcaccctggccgtcatcctgaccctgctgggcctggccatcctggccatcctgctgacccgctgggcccgctgcaagcagagcgagatgtacatcagccgctacagcagcgagcagagcgcccggctgctggactatgaagatggccggggcagcagacatgcctacagcacccagagcgacaccagctatgacaaccgggagaggagcaagagggactacacccccagcaccaacagcctggccctgagccgcagcagcatcgccctgccccagggctccatgagcagcatcaagtgcctgcagaccacagaggagccccccagcaggacagctggggccatgatgcagttcaccgcccccatccctggggccaccggccccatcaagctgagccagaagaccatcgtgcagaccccaggccccatcgtgcagtacccaggcagcaatgtgcgcagccacccccacaccatcaccggcccccccagcgccccccggggcccccccatggcccccatcatcatcagccagaggacagccagccagctggccgcccccatccgcatcccccaggtgcacaccatggacagcagcggcaagatcaccctgacccctgtggtgatcctgaccggctacatggatgaggagctggccaagaagagctgcagcaagatccagatcctgaagtgtggcggcacagcccggagccagaacagccgggaggagaacaaggaggccctgaagaatgacatcatcttcaccaacagcgtggagagcctgaagagcgcccacatcaaggagcctgagcgggagggcaagggcacagacctggagaaggacaagattggcatggaggtgaaggtggacagtgatgctggcatccccaagaggcaggagacccagctgaagatcagcgagatgagcatcccccagggccagggcgcccagatcaagaagtctgtgtctgatgtgccccggggccaggagagccaggtgaagaagtctgagagcggcgtgcccaagggccaggaggcccaggtgaccaagagcggcctggtggtgctgaagggccaggaggcccaggtggagaagtctgagatgggcgtgccccggcggcaggagagccaggtgaagaagagccagagcggcgtgtccaagggccaggaggcccaggtgaagaagcgggagagcgtggtgctgaagggccaggaggcccaggtggagaagtctgagctgaaggtgcccaagggccaggagggccaggtggagaagacagaagcagatgtgcccaaggagcaggaggtgcaggagaagaagtctgaggccggcgtgctgaagggccctgagagccaggtgaagaacacagaggtgtctgtgcctgagaccctggagagccaggtgaagaagtctgagagcggcgtgctgaagggccaggaggcccaggagaagaaggagagctttgaagataaaggaaataatgacaaggagaaggagagagatgctgagaaggaccccaacaagaaggagaagggggacaagaacaccaagggggacaagggcaaggacaaggtgaagggcaagcgggagagcgagatcaacggggagaagagcaagggcagcaagagggccaaggccaacacaggcaggaagtacaacaagaaggtggaggagtag

SEQ ID NO: 344178 - DNA, 1683 bp, Artificial Sequence
  derived and/or modified sequence
agcgtgctgaagatcaccctggccgtgatcctgaccctgctgggcctcgccattttggccatccttttgacacggtgggctaggtgtaagcagtcagagatgtatatcagcagatattcatccgagcagagcgctagactacttgattatgaagatggccgcggcagcaggcacgcctattccactcaatccgatacttcctatgacaatcgcgcccggtatgaggcaccattttctcccaaaatcgagaagcttgcaatctcaaagagtagcctcgcattgccacagggctctatgtctagtattaagtgcctgcagaccactgaggagccaccgtgcattccttgcgtcatgattctgatattttacaatgtgcctgctacgcgtggaatggggaaagtggtgaggaagcacatcatgcagacccccggacccatcggtaagcttccagtattctctgtacgctcgcacccacacaccatcaccggccccccctcggctccgagaggcaaacccgtaagcactctcctgatatccaatagcgtctgtagctatctgacgcaaagctttcagttccccgaggttcgtaccatcgctactaaaaaaagggcaacaacacagggcagcgttattttaactggatatatggatgaagagctcgcaaagaagtcctgtagcaagatccagattctgaaatgcggcggaaccgcgcgcagccagaactcaagagaggaaaataaagaagcactgaaaaacgatatcatttttacgaactccgtcgagagccttaagtccgcgcacattaaggaaccggaacgggagggcaagggcaccgatctggagaaagacaaaatagggatggaagtcaaagtggattcagacgccggcattccaaaacgccaggagacacagctgaagatatctgaaatgagcattcctcagggccagggggcccagataaaaaagagcgtctcagacgtgcctagagggcaggagtctcaggtgaaaaagtccgagtcaggggtaccaaaagggcaggaggcccaggtgaccaaatctggactagtagtactcaagggccaagaagctcaggtggaaaaaagtgagatgggggtgcctcgtaggcaggagtcccaggttaagaagtcccagtcaggtgtgtcaaagggacaggaggcacaagtgaagaaacgcgaaagtgtggtgctgaaaggccaagaagctcaggtggagaagtccgagctaaaggtgccaaagggtcaggaggggcaagtggaaaagacggaggccgacgtgccaaaggagcaggaagttcaggagaaaaaatccgaggcaggagttcttaaaggcccggaatctcaggtaaaaaataccgaggtgtccgtacctgaaacattggagagccaggttaagaaaagtgagagtggggttctaaaaggccaagaagcacaggagaagaaagagagtttcgaagataagggaaataacgacaaggaaaaggagagggacgcggagaaagatcccaataaaaaagagaaaggcgataagaatactaaaggcgataagggcaaagacaaggtgaagggaaagcgcgaaagtgagatcaatggagagaagtcaaagggttctaagagagccaaagccaacacggggcgcaagtacaacaagaaggtggaagagtag

SEQ ID NO: 344179 - DNA, 1689 bp, Artificial Sequence
  derived and/or modified sequence
atgaccgtgctggagatcaccctggccgtgatcctgaccctgctgggtttggctattctggcaattcttctcactaggtgggctagatgcaagcagtctgagatgtacataagtcgctactcctccgaacaaagcgctcgactgctggattacgaggacggcaggggatccagacatgcctatagcacgcaaagtgacaccagctacgacaaccgggagcgctctaagcgagactacacacccagcaccaactccctcgcactgtcacggagttccatagccctaccacagggttctatgtcgtctatcaagtgtttgcaaacaaccgaagaacccccatcacgtaccgcgggggccatgatgcagttcactgctcccatccctggggcaactgggccaatcaagctgagtcaaaaaaccatcgtgcagacaccaggtccaatcgtccagtatcccggttctaacgtcaggagccacccacatactattaccggtccacccagcgcacccagaggacctcccatggccccgataattataagccagcgtacggcatcacagctggctgctccaataaggatccctcaggttcacaccatggactcctctggtaagattacactgacccctgtggtcatattaaccggctatatggacgaggagcttgccaagaaaagctgttccaaaatccaaatcttgaagtgtggcggtaccgctcggagccagaactcaagggaggaaaacaaggaagcattaaaaaacgatattatatttaccaatagcgtagaaagcttaaaatccgcccatattaaggagcccgaaagggaagggaaaggaactgatttggagaaggataagattggtatggaggtgaaggtggattccgacgccggaatcccaaaacggcaagagacccagctcaaaataagcgaaatgtccattccccagggacagggagcccagatcaagaaaagcgtaagtgatgtaccacgagggcaggaatcccaagtgaaaaaatccgaaagcggagtccctaagggtcaggaggctcaggttactaaaagcggactggtggtgctcaagggccaggaagcccaggttgagaaatcagagatgggcgtgcctcgaaggcaagaaagccaagtgaagaagtctcagagcggagtgagtaaaggacaagaagcgcaggtgaaaaagagggagagcgtagtgctgaaagggcaagaagcccaggtagagaagagcgaactgaaagttcctaagggacaggaagggcaagtggagaaaaccgaagcagatgttcctaaagagcaggaggtgcaggaaaaaaagtcagaagccggcgtgctgaagggccccgagagccaggtgaaaaatacggaagtcagcgtgcccgaaaccttggagtcacaagtcaagaaatctgagtctggagtgcttaagggacaagaagcacaggaaaaaaaggagtctttcgaagacaaaggaaacaatgacaaagagaaagagagagacgctgagaaggatcccaataagaaagagaaaggcgataaaaacacgaagggcgacaaaggtaaagataaagtgaagggaaagagggagagtgaaatcaatggggaaaagtctaaggggagcaaaagagccaaagccaatacaggccggaaatacaataagaaggtggaagagtag

SEQ ID NO: 344180 - DNA, 1683 bp, Artificial Sequence
  derived and/or modified sequence
agcgtgctgaagatcaccctggccgtgatcctgaccctgctgggcttggctattttggcaattttgcttactaggtgggcccgttgcaagcagtctgagatgtacattagtaggtactcttccgagcagtccgcaaggcttcttgactacgaggatggtcgggggagccggcacgcctacagcacacagtctgacacctcgtatgataaccgagccagatacgaggccccttttagcccaaaaatagagaagctcgccatatccaagtccagcctggctcttcctcaaggcagtatgagttccatcaaatgcctacagactacggaagaaccaccctgcatcccctgcgtgatgattctgatcttctataacgtgccagctactcgaggaatgggtaaggtggtgaggaagcatatcatgcagacaccagggcccattggcaagctccccgtgttctctgtgcggagtcacccgcataccattactggacccccgagcgcccccaggggaaagccagtgagcaccttattgatatctaactctgtgtgcagctatctcacccagagcttccaatttcccgaggtgagaacaatcgccacaaagaaacgcgccaccacacaaggctccgtcatcttaaccgggtatatggatgaagaactggctaagaaatcctgctctaagatccagatcctgaaatgtggaggcacagccaggtctcagaattcgcgtgaagaaaacaaagaggctttgaaaaatgacataattttcaccaattcagtggagtcgctgaaatctgctcatataaaggaaccagagagggaggggaagggtactgatttagaaaaagacaagattggaatggaagtgaaggttgactcagacgcgggcatccccaagaggcaggagactcaactcaaaatctcagagatgtcaattccccaggggcaaggagcccagatcaaaaaaagcgttagcgacgtaccgcgtggacaagagagccaagtgaaaaaaagcgagagcggagtccctaaaggccaggaagctcaagtcacgaagagcggattggttgtcctgaaaggacaggaggcccaagtggagaaatctgaaatgggcgtccctaggagacaggaaagccaggtgaaaaaatctcagagcggcgtgtccaagggacaggaagcccaggtgaagaagcgcgagtctgtggtgttgaaaggacaggaagcacaagtcgagaaatctgagctgaaggtgcctaaggggcaggaagggcaggtggaaaagaccgaagcagacgttcctaaagaacaggaggtgcaggaaaaaaaatctgaggccggagtcttgaaaggccccgaatcccaggtgaagaatacggaggtatcagtcccagagaccctggaatcccaagtgaagaaaagcgagagcggggtactgaagggacaggaggcacaagagaaaaaggaaagctttgaggacaaaggtaacaatgacaaagaaaaagagcgggacgcggagaaggatcccaacaaaaaggaaaaaggggataagaatacgaagggagataaggggaaagacaaggtgaaagggaaaagagagtccgagattaatggagagaaaagcaagggcagcaagcgggcaaaggcaaatactggtcgtaagtataataagaaggtagaggaatag

SEQ ID NO: 344181 - DNA, 1683 bp, Artificial Sequence
  derived and/or modified sequence
agcgtgctgaagatcaccttggcagtaattctgacgctgctcgggttagctattctggccattctgctgacacgctgggccaggtgcaagcaaagtgaaatgtacatttcaaggtactcatcagagcagtccgctagactgcttgactacgaggacggcagaggctcgaggcacgcctatagtacacagagtgataccagttacgacaacagggcacgatatgaagccccatttagtcccaagattgagaaactggccattagtaagtcgagcttggcccttcctcagggcagcatgagcagtattaagtgtctccagactaccgaggagcccccttgcatcccatgtgtcatgatactgatcttctataacgtccctgcaacacgcggaatgggcaaggtagtccgtaaacacattatgcagactcctggaccgatcggtaagctgcctgtgttttcggtgcggtctcatccccacacgattacaggtcctccatccgcccctcggggtaagcctgtttccacactgctcataagcaattctgtatgttcgtatctgacccagagttttcagtttcccgaggtgaggaccattgccaccaagaaacgcgctactactcaggggtcagtgattttgactggctatatggatgaggaactggccaagaagagttgctccaagatccaaatcctgaagtgtggcggtaccgctaggtcccagaactctcgggaggaaaataaggaggcactcaagaatgatatcatttttacaaatagtgtggaaagccttaagagcgcccatattaaagagcccgaaagagaggggaaaggcacagacttggaaaaagataagatcggcatggaggtgaaggtagatagcgatgcagggattccgaaaaggcaagaaacgcagttgaaaatttccgagatgagcatccctcaggggcagggagctcagattaaaaagagcgtgtctgacgtgccacgtggccaggaatcacaagtgaagaaatcggaatcaggggtgccaaagggccaggaagcacaggtgacgaaatccgggcttgtagtgctgaaagggcaggaggcacaggtggagaagtctgagatgggcgtgcccaggaggcaggagagtcaagttaagaagagtcagtcaggcgtgtccaaggggcaggaagcccaggtcaaaaagagagagagcgtcgtcctgaagggccaagaggcccaagtggaaaagtccgaactcaaagtccccaaaggccaagagggacaggtcgaaaagacagaggcagatgtccctaaggagcaggaggtgcaggagaaaaaaagcgaggcgggagtgttgaagggcccagagtcacaggtgaagaacacagaggtgtctgtgcctgagactcttgaatctcaggtgaaaaagtctgaatccggggtacttaagggtcaagaggcccaggaaaagaaagagtcctttgaagacaaaggcaacaacgataaggaaaaagaaagggatgccgagaaagatccaaacaagaaagaaaagggcgataagaacactaaaggagacaaaggcaaagataaagttaaggggaagcgggagagcgaaatcaacggtgaaaagtcaaaagggagcaaaagggccaaagccaataccgggaggaagtacaataagaaggtagaggagtag

SEQ ID NO: 344182 - DNA, 1689 bp, Artificial Sequence
  derived and/or modified sequence
atgaccgtgttggaaatcaccttggccgtgatactcaccctgttgggcttagctatactcgccattttgctgacacgatgggctaggtgtaaacaaagcgagatgtacatttctcggtacagctctgaacagtcagctcgccttctcgattatgaagatggacggggaagtcgccatgcatactccacacagtccgatacttcttatgacaaccgcgaacgatctaaaagggattacacacccagcaccaatagcctcgctctctcacgatcctctatagctctaccacagggttccatgtccagtattaaatgtctacagacgactgaagaacctccgagcagaaccgccggagccatgatgcagtttaccgctccgattcccggtgctacagggcctatcaagttaagtcagaagacaattgtccagactccaggccctatcgtgcaatatcccggaagtaatgtgcggtcacacccacataccatcacagggccaccgtccgccccaaggggaccaccaatggctccgattatcatctctcagaggaccgcttcacagctggcagccccaattaggataccccaggtgcacactatggactctagcggcaaaattaccctaacacccgttgtcattctgacaggctacatggacgaagagctggcaaagaagtcgtgttcgaagatccaaattttaaagtgtggagggaccgccaggagccagaactcacgcgaggaaaataaagaagcccttaagaatgatataatttttacaaatagcgttgaaagcctcaagtccgcccatattaaggaacctgaaagagaaggtaaaggcacggacctcgagaaagataaaatagggatggaggtgaaagttgattctgatgcgggtattcccaagcgacaggaaactcaactgaaaatttctgaaatgtctataccacagggacaaggggctcaaattaaaaagtctgtctcagatgtgcccaggggtcaggaatcgcaggtgaagaagtctgaatccggggttccgaaggggcaggaggcccaagtaaccaaatccggcctagttgtacttaaaggtcaggaggcgcaggttgagaagtccgaaatgggggtccctagaaggcaggagagccaggtgaagaaatcccaatccggggtgtctaaggggcaggaagctcaagttaagaagcgcgaatccgtggtgctcaagggtcaggaggcccaggtagagaaaagcgagcttaaagttcccaaaggccaggagggtcaagtggaaaaaactgaagcggacgtgcccaaggagcaagaagttcaggagaagaagtccgaagccggagttctgaaagggcctgaaagtcaggttaagaacacagaagtgagcgtgcccgagacccttgagtctcaggtgaagaaatctgagtccggggtcctgaaagggcaggaggcacaagaaaaaaaagagtctttcgaggataagggtaacaatgacaaagaaaaagaacgagacgctgagaaggaccccaataagaaagagaaaggtgacaagaacaccaaaggcgacaagggcaaggataaggtgaagggcaaaagagagagcgagatcaacggtgaaaaaagcaagggctcaaagcgagcgaaagctaatacaggtaggaagtacaataagaaagtagaggaatag

SEQ ID NO: 344183 - DNA, 1683 bp, Artificial Sequence
  derived and/or modified sequence
agcgtcctcaagatcaccctggctgttattctcactctgttaggacttgcaatccttgctatcctcttaactcgctgggcccgatgcaagcaatcagagatgtatatctctagatattcctccgaacagagcgcccgactgctcgactacgaggatggtcggggatcacggcacgcgtattctacccagtctgacacgtcttatgacaatcgagcacgatacgaggcacctttttccccgaagatcgagaagctcgccatcagcaaaagtagcctggctttgcctcaggggtcgatgtctagcattaagtgtctgcaaacaacagaggagcccccatgtattccgtgcgtgatgattctcatcttttacaatgtgcccgctactaggggaatgggtaaggttgtcagaaagcacataatgcagacgcctggacctatcgggaaattgcctgttttctccgtgcggagccatcctcataccatcaccggcccaccaagtgcccctcgtggaaaacctgtctctacccttctgatttctaactcagtgtgtagctacttaacacaaagttttcagttccccgaggttaggacaattgctaccaagaaacgtgcaactacccagggctcagtgattctaaccgggtatatggacgaggagcttgcgaaaaagagttgctcaaaaatccagatcctgaagtgtggcggaactgccagatcccaaaactctagagaggagaataaagaagctttaaaaaacgatattattttcaccaacagtgtggaaagcctcaaatccgcccacattaaggaacctgaaagagagggcaaagggaccgaccttgagaaggataaaattggcatggaggtgaaggttgatagcgacgccggtattcctaagaggcaggagactcaactgaagatctccgagatgagcattccccaggggcagggggctcagatcaaaaagagcgtgtccgatgtcccacgagggcaggaatctcaggtgaaaaaatctgaaagcggcgtacccaaaggtcaggaagcccaggtgactaaatccggtttggtggtcctgaagggccaggaagcccaggttgagaagagcgaaatgggagtgcctagacgccaggaatctcaggtgaagaagtcacagtcaggagttagcaaaggacaggaggcccaggtgaagaaacgggagtcggtagtactaaaaggccaggaagctcaggtggaaaaaagcgaattgaaagtgcccaaggggcaagagggacaggtggaaaagaccgaggcagatgtacctaaggagcaggaggtgcaggaaaagaagagcgaggccggtgtcttgaagggtcctgaatcccaggtgaagaacacagaggtgagcgtgcccgagacattggagtctcaggttaagaaaagtgaatccggcgtgcttaagggacaggaggctcaggaaaagaaggaaagtttcgaagataagggcaataacgataaggagaaagagcgggacgctgaaaaggatccaaacaaaaaagaaaagggggataaaaataccaagggcgacaaaggaaaagacaaggtgaaaggtaaaagagaatctgagataaacggggaaaagagcaagggatcaaagcgagccaaggcgaatacagggcgaaagtacaataaaaaagttgaagagtag

SEQ ID NO: 344184 - DNA, 2173 bp, Artificial Sequence
  derived and/or modified sequence
tcccatcatttgcttaggtctgatcaatctgctccacacaatttctcagtgatcctctgcatctctgcctacaagggcctccctgacacccaagttcatattgctcagaaacagtgaacttgagtttttcgttttaccttgatctctctctgacaaagaaatccagatgatgcgagacctgatgaagacaatacatggaaaatgacagtcttggaaataactttggctgtcatcctgactctactgggacttgccatcctggctattttgttaacaagatgggcacgacgtaagcaaagtgaaatgtatatctccagatacagttcagaacaaagtgctagacttctggactatgaggatggtagaggatcccgacatgcatattcaacacaaagtgacacttcatatgataaccgagagagatccaaaagagattacacaccatcaaccaactctctagcactgtctcgatcaagtattgctttacctcaaggatccatgagtagtataaaatgtttacaaacaactgaagaacctccttccagaactgcaggagccatgatgcaattcacagcccctattcccggagctacaggacctatcaagctctctcaaaaaaccattgtgcaaactctaggacctattgtacaatatcctggatccaatgtcagatcgcatcctcacacaatcactggtccaccttcagcaccccgcggtccacccatggcacccataataatttcacagagaaccgcaagtcagctggcagcacctataagaatacctcaagttcacactatggacagttctggaaaaatcacactgactcctgtggttatattaacaggttacatggatgaagaacttgcaaaaaaatcttgttccaaaatccagattctaaaatgtggaggcactgcaaggtctcagaatagccgagaagaaaacaaggaagcactaaagaatgacatcatatttacgaattctgtagaatccttgaaatcagcacacataaaggagccagaaagagaaggaaaaggcactgatttagagaaagacaaaataggaatggaggtcaaggtagacagtgacgctggaataccaaaaagacaggaaacccaactaaaaatcagtgagatgagtataccacaaggacagggagcccaaataaagaaaagtgtgtcagatgtaccaagaggacaggagtcccaagtaaagaagagtgagtcaggtgtcccaaaaggacaagaagcccaagtaacgaagagtgggttggttgtactgaaaggacaggaagcccaggtagagaagagtgagatgggtgtgccaagaagacaggaatcccaagtaaagaagagtcagtctggtgtctcaaagggacaggaagcccaggtaaagaagagggagtcagttgtactgaaaggacaggaagcccaggtagagaagagtgagttgaaggtaccaaaaggacaagaaggccaagtagagaagactgaggcagatgtgccaaaggaacaagaggtccaagaaaagaagagtgaggcaggtgtactgaaaggaccagaatcccaagtaaagaacactgaggtgagtgtaccagaaacactggaatcccaagtaaagaagagtgagtcaggtgtactaaaaggacaggaagcccaagaaaagaaggagagttttgaggataaaggaaataatgataaagaaaaggagagagatgcagagaaagatccaaataaaaaagaaaaaggtgacaaaaacacaaaaggtgacaaaggaaaggacaaagttaaaggaaagagagaatcagaaatcaatggtgaaaaatcaaaaggctcgaaaagggcgaaggcaaatacaggaaggaagtacaacaaaaaagtggaagagtaaggataaattttttaaaggcccataagacaagtgattattatgattcccatactccagatacaaaccatatcccagccattgcctaaacagattacaattataaaatccctttcatcttcatatcacagtttctgctcttcagaagtttcaccctttttaatctctcagccacaaacctcagtttccaaatatttgttttataagttaagacgtatatgattccgtcaagaaagactggatactttctgaagtaaaacattttaattaaagaaatatatagtaa

SEQ ID NO: 344185 - DNA, 778 bp, Artificial Sequence
  derived and/or modified sequence
tcccatcatttgcttaggtctgatcaatctgctccacgcaatttctcagtgatcctctgcatctctgcctacaagggcctccctgacacccaagttcatattgctcagaaacagtgaacttgagtttttcgttttatcttgatctctctctgacaaagaaatccagatgatgcgagacctgatgaagacaatacatggaaaatgacagtcttggaaataactttggctgtcatcctgactctactgggacttgccatcctggctattttgttaacaagatgggcacgacgtaagcaaagtgaaatgcatatctccagatacagttcagaacaaagtgctagacttctggactatgaggatggtagaggatcccgacatgcatattcaacacaaagtgacacttcatgtgataaccgagagagatccaaaagagattacacaccatcaaccaactctctagcactgtctcgatcaagtattgctttacctcaaggatccatgagtagtataaaatgtttacaaacaactgaagaacttccttccagaactgcaggagccatgatgcaattcacagcccctattcccggagctacaggacctatcaagctctctcaaaaaaccattgtgcaaactccaggacctattgtacaatatcctggacccaatgtcagatcgcatcctcacacaatcactggtccaccttcagcaccccgcggtccacccatggcacccataataatttcacagagaaccgcaagtcagctggcagcacctataa

SEQ ID NO: 344186 - DNA, 778 bp, Artificial Sequence
  derived and/or modified sequence
tcccatcatttgcttaggtctgatcaatctgctccacacaatttctcagtgatcctctgcatctctgcctacaagggcctccctgacacccaagttcatattgctcagaaacagtgaacttgagtttttcgttttaccttgatctctctctgacaaagaaatccagatgatgcgagacctgatgaagacaatacatggaaaatgacagtcttggaaataactttggctgtcatcctgactctactgggacttgccatcctggctattttgttaacaagatgggcacgacgtaagcaaagtgaaatgcatatctccagatacagttcagaacaaagtgctagacttctggactatgaggatggtagaggatcccgacatgcatattcaacacaaagtgacacttcatgtgataaccgagagagatccaaaagagattacacaccatcaaccaactctctagcactgtctcgatcaagtattgctttacctcaaggatccatgagtagtataaaatgtttacaaacaactgaagaacttccttccagaactgcaggagccatgatgcaattcacagcccctattcccggagctacaggacctatcaagctctctcaaaaaaccattgtgcaaactccaggacctattgtacaatatcctggacccaatgtcagatcgcatcctcacacaatcactggtccaccttcagcaccccgcggtccacccatggcacccataataatttcacagagaaccgcaagtcagctggcagcacctataa

SEQ ID NO: 344187 - DNA, 2173 bp, Artificial Sequence
  derived and/or modified sequence
tcccatcatttgcttaggtctgatcaatctgctccacacaatttctcagtgatcctctgcatctctgcctacaagggcctccctgacacccaagttcatattgctcagaaacagtgaacttgagtttttcgttttaccttgatctctctctgacaaagaaatccagatgatgcgagacctgatgaagacaatacatggaaaatgacagtcttggaaataactttggctgtcatcctgactctactgggacttgccatcctggctattttgttaacaagatgggcacgacgtaagcaaagtgaaatgtatatctccagatacagttcagaacaaagtgctagacttctggactatgaggatggtagaggatcccgacatgcatattcaacacaaagtgacacttcatatgataaccgagagagatccaaaagagattacacaccatcaaccaactctctagcactgtctcgatcaagtattgctttacctcaaggatccatgagtagtataaaatgtttacaaacaactgaagaacctccttccagaactgcaggagccatgatgcaattcacagcccctattcccggagctacaggacctatcaagctctctcaaaaaaccattgtgcaaactctaggacctattgtacaatatcctggatccaatgtcagatcgcatcctcacacaatcactggtccaccttcagcaccccgcggtccacccatggcacccataataatttcacagagaaccgcaagtcagctggcagcacctataagaatacctcaagttcacactatggacagttctggaaaaatcacactgactcctgtggttatattaacaggttacatggatgaagaacttgcaaaaaaatcttgttccaaaatccagattctaaaatgtggaggcactgcaaggtctcagaatagccgagaagaaaacaaggaagcactaaagaatgacatcatatttacgaattctgtagaatccttgaaatcagcacacataaaggagccagaaagagaaggaaaaggcactgatttagagaaagacaaaataggaatggaggtcaaggtagacagtgacgctggaataccaaaaagacaggaaacccaactaaaaatcagtgagatgagtgtaccacaaggacagggagcccaaataaagaaaagtgtgtcagatgtaccaagaggacaggagtcccaagtaaagaagagtgagtcaggtgtcccaaaaggacaagaagcccaagtaacgaagagtgggttggttgtactgaaaggacaggaagcccaggtagagaagagtgagatgggtgtgccaagaagacaggaatcccaagtaaagaagagtcagtctggtgtctcaaagggacaggaagcccaggtaaagaagagggagtcagttgtactgaaaggacaggaagcccaggtagagaagagtgagttgaaggtaccaaaaggacaagaaggccaagtagagaagactgaggcagatgtgccaaaggaacaagaggtccaagaaaagaagagtgaggcaggtgtactgaaaggaccagaatcccaagtaaagaacactgaggtgagtgtaccagaaacactggaatcccaagtaaagaagagtgagtcaggtgtactaaaaggacaggaagcccaagaaaagaaggagagttttgaggataaaggaaataatgataaagaaaaggagagagatgcagagaaagatccaaataaaaaagaaaaaggtgacaaaaacacaaaaggtgacaaaggaaaggacaaagttaaaggaaagagagaatcagaaatcaatggtgaaaaatcaaaaggctcgaaaagggcgaaggcaaatacaggaaggaagtacaacaaaaaagtggaagagtaaggataaattttttaaaggcccataagacaagtgattattatgattcccatactccagatacaaaccatatcccagccattgcctaaacagattacaattataaaatccctttcatcttcatatcacagtttctgctcttcagaagtttcaccctttttaatctctcagccacaaacctcagtttccaaatatttgttttataagttaagacgtatatgattccgtcaagaaagactggatactttctgaagtaaaacattttaattaaagaaatatatagtaa

SEQ ID NO: 344188 - DNA, 2173 bp, Artificial Sequence
  derived and/or modified sequence
tcccatcatttgcttaggtctgatcaatctgctccacgcaatttctcagtgatcctctgcatctctgcctacaagggcctccctgacacccaagttcatattgctcagaaacagtgaacttgagtttttcgttttatcttgatctctctctgacaaagaaatccagatgatgcgagacctgatgaagacaatacatggaaaatgacagtcttggaaataactttggctgtcatcctgactctactgggacttgccatcctggctattttgttaacaagatgggcacgacgtaagcaaagtgaaatgtatatctccagatacagttcagaacaaagtgctagacttctggactatgaggatggtagaggatcccgacatgcatattcaacacaaagtgacacttcatatgataaccgagagagatccaaaagagattacacaccatcaaccaactctctagcactgtctcgatcaagtattgctttacctcaaggatccatgagtagtataaaatgtttacaaacaactgaagaacctccttccagaactgcaggagccatgatgcaattcacagcccctattcccggagctacaggacctttcaagctctctcaaaaaaccattgtgcaaactctaggacctattgtacaatatcctggatccaatgtcagatcgcatcctcacacaatcactggtccaccttcagcaccccgcggtccacccatggcacccataataatttcacagagaaccgcaagtcagctggcagcacctataagaatacctcaagttcacactatggacagttctggaaaaatcacactgactcctgtggttatattaacaggttacatggatgaagaacttgcaaaaaaatcttgttccaaaatccagattctaaaatgtggaggcactgcaaggtctcagaatagccgagaagaaaacaaggaagcactaaagaatgacatcatatttacgaattctgtagaatccttgaaatcagcacacataaaggagccagaaagagaaggaaaaggcactgatttagagaaagacaaaataggaatggaggtcaaggtagacagtgacgctggaataccaaaaagacaggaaacccaactaaaaatcagtgagatgagtgtaccacaaggacagggagcccaaataaagaaaagtgtgtcagatgtaccaagaggacaggagtcccaagtaaagaagagtgagtcaggtgtcccaaaaggacaagaagcccaagtaacgaagagtgggttggttgtactgaaaggacaggaagcccaggtagagaagagtgagatgggtgtgccaagaagacaggaatcccaagtaaagaagagtcagtctggtgtctcaaagggacaggaagcccaggtaaagcagagggagtcagttgtactgaaaggacaggaagcccaggtagagaagagtgagttgaaggtaccaaaaggacaagaaggccaagtagagaagactgaggcagatgtgccaaaggaacaagaggtccaagaaaagaagagtgaggcaggtgtactgaaaggaccagaatcccaagtaaagaacactgaggtgagtgtaccagaaacactggaatcccaagtaaagaagagtgagtcaggtgtactaaaaggacaggaagcccaagaaaagaaggagagttttgaggataaaggaaataatgataaagaaaaggagagagatgcagagaaagatccaaataaaaaagaaaaaggtgacaaaaacacaaaaggtgacaaaggaaaggacaaagttaaaggaaagagagaatcagaaatcaatggtgaaaaatcaaaaggctcgaaaagggcgaaggcaaatacaggaaggaagtacaacaaaaaagtggaagagtaaggataaattttttaaaggcccataagacaagtgattattatgattcccatactccagatacaaaccatatcccagccattgcctaaacagattacaattataaaatccctttcatcttcatatcacagtttctgctcttcagaagtttcaccctttttaatctctcagccacaaacctcagtttccaaatatttgttttataagttaagacgtatatgattccgtcaagaaagactggatactttctgaagtaaaacattttaattaaagaaatatatagtaa

SEQ ID NO: 344189 - DNA, 2173 bp, Artificial Sequence
  derived and/or modified sequence
tcccatcatttgcttaggtctgatcaatctgctccacacaatttctcagtgatcctctgcatctctgcctacaagggcctccctgacacccaagttcatattgctcagaaacagtgaacttgagtttttcgttttatcttgatctctctctgacaaagaaatccagatgatgcgagacctgatgaagacaatacatggaaaatgacagtcttggaaataactttggctgtcatcctgactctactgggacttgccatcctggctattttgttaacaagatgggcacgacgtaagcaaagtgaaatgcatatctccagatacagttcagaacaaagtgctagacttctggactatgaggatggtagaggatcccgacatgcatattcaacacaaagtgacacttcatgtgataaccgagagagatccaaaagagattacacaccatcaaccaactctctagcactgtctcgatcaagtattgctttacctcaaggatccatgagtagtataaaatgtttacaaacaactgaagaacttccttccagaactgcaggagccatgatgcaattcacagcccctattcccggagctacaggacctatcaagctctctcaaaaaaccattgtgcaaactccaggacctattgtacaatatcctggacccaatgtcagatcgcatcctcacacaatcactggtccaccttcagcaccccgcggtccacccatggcacccataataatttcacagagaaccgcaagtcagctggcagcacctataagaatacctcaagttcacactatggacagttctggaaaaatcacactgactcctgtggttatattaacaggttacatggatgaagaacttgcaaaaaaaccttgttccaaaatccagattctaaaatgtggaggcactgcaaggtctcagaatagccgagaagaaaacaaggaagcactaaagaatgacatcatatttacgaattctgtagaatccttgaaatcagcacacataaaggagccagaaagagaaggaaaaggcactgatttagagaaagacaaaataggaatggaggtcaaggtagacagtgacgctggaataccaaaaagacaggaaacccaactaaaaatcagtgagatgagtataccacaaggacagggagcccaaataaagaaaagtgtgtcagatgtaccaagaggacaggagtcccaagtaaagaagagtgagtcaggtgtcccaaaaggacaagaagcccaagtaacgaagagtgggttggttgtactgaaaggacaggaagcccaggtagagaagagtgagatgggtgtgccaagaagacaggaatcccaagtaaagaagagtcagtctggtgtctcaaagggacaggaagcccaggtaaagaagagggagtcagttgtactgaaaggacaggaagcccaggtagagaagagtgagttgaaggtaccaaaaggacaagaaggccaagtagagaagactgaggcagatgtgccaaaggaacaagaggtccaagaaaagaagagtgaggcaggtgtactgaaaggaccagaatcccaagtaaagaacactgaggtgagtgtaccagaaacactggaatcccaagtaaagaagagtgagtcaggtgtactaaaaggacaggaagcccaagaaaagaaggagagttttgaggataaaggaaataatgataaagaaaaggagagagatgcagagaaagatccaaataaaaaagaaaaaggtgacaaaaacacaaaaggtgacaaaggaaaggacaaagttaaaggaaagagagaatcagaaatcaatggtgaaaaatcaaaaggctcgaaaagggcgaaggcaaatacaggaaggaagtacaacaaaaaagtggaagagtaaggataaattttttaaaggcccataagacaagtgattattatgattcccatactccagatacaaaccatatcccagccattgcctaaacagattacaattataaaatccctttcatcttcatatcacagtttctgctcttcagaagtttcaccctttttaatctctcagccacaaacctcagtttccaaatatttgtttcataagttaagacgtatatgattccgtcaagaaagactggatactttctgaagtaaaacattttaattaaagaaatatatagtaa

SEQ ID NO: 344190 - DNA, 1689 bp, Artificial Sequence
  derived and/or modified sequence
atgaccgtgctggagatcaccctggccgtgatcctgaccctgctgggcctggccatcctggccatcctgctgaccagatgggccagaagaaagcagagcgagatgtacatcagcagatacagcagcgagcagagcgccagactgctggactacgaggacggcagaggcagcagacacgcctacagcacccagagcgacaccagctacgacaacagagagagaagcaagagagactacacccccagcaccaacagcctggccctgagcagaagcagcatcgccctgccccagggcagcatgagcagcatcaagtgcctgcagaccaccgaggagccccccagcagaaccgccggcgccatgatgcagttcaccgcccccatccccggcgccaccggccccatcaagctgagccagaagaccatcgtgcagaccctgggccccatcgtgcagtaccccggcagcaacgtgagaagccacccccacaccatcaccggcccccccagcgcccccagaggcccccccatggcccccatcatcatcagccagagaaccgccagccagctggccgcccccatcagaatcccccaggtgcacaccatggacagcagcggcaagatcaccctgacccccgtggtgatcctgaccggctacatggacgaggagctggccaagaagagctgcagcaagatccagatcctgaagtgcggcggcaccgccagaagccagaacagcagagaggagaacaaggaggccctgaagaacgacatcatcttcaccaacagcgtggagagcctgaagagcgcccacatcaaggagcccgagagagagggcaagggcaccgacctggagaaggacaagatcggcatggaggtgaaggtggacagcgacgccggcatccccaagagacaggagacccagctgaagatcagcgagatgagcatcccccagggccagggcgcccagatcaagaagagcgtgagcgacgtgcccagaggccaggagagccaggtgaagaagagcgagagcggcgtgcccaagggccaggaggcccaggtgaccaagagcggcctggtggtgctgaagggccaggaggcccaggtggagaagagcgagatgggcgtgcccagaagacaggagagccaggtgaagaagagccagagcggcgtgagcaagggccaggaggcccaggtgaagaagagagagagcgtggtgctgaagggccaggaggcccaggtggagaagagcgagctgaaggtgcccaagggccaggagggccaggtggagaagaccgaggccgacgtgcccaaggagcaggaggtgcaggagaagaagagcgaggccggcgtgctgaagggccccgagagccaggtgaagaacaccgaggtgagcgtgcccgagaccctggagagccaggtgaagaagagcgagagcggcgtgctgaagggccaggaggcccaggagaagaaggagagcttcgaggacaagggcaacaacgacaaggagaaggagagagacgccgagaaggaccccaacaagaaggagaagggcgacaagaacaccaagggcgacaagggcaaggacaaggtgaagggcaagagagagagcgagatcaacggcgagaagagcaagggcagcaagagagccaaggccaacaccggcagaaagtacaacaagaaggtggaggagtag

SEQ ID NO: 344191 - DNA, 579 bp, Artificial Sequence
  derived and/or modified sequence
atgaccgtgctggagatcaccctggccgtgatcctgaccctgctgggcctggccatcctggccatcctgctgaccagatgggccagaagaaagcagagcgagatgcacatcagcagatacagcagcgagcagagcgccagactgctggactacgaggacggcagaggcagcagacacgcctacagcacccagagcgacaccagctgcgacaacagagagagaagcaagagagactacacccccagcaccaacagcctggccctgagcagaagcagcatcgccctgccccagggcagcatgagcagcatcaagtgcctgcagaccaccgaggagctgcccagcagaaccgccggcgccatgatgcagttcaccgcccccatccccggcgccaccggccccatcaagctgagccagaagaccatcgtgcagacccccggccccatcgtgcagtaccccggccccaacgtgagaagccacccccacaccatcaccggcccccccagcgcccccagaggcccccccatggcccccatcatcatcagccagagaaccgccagccagctggccgcccccatctag

SEQ ID NO: 344192 - DNA, 1689 bp, Artificial Sequence
  derived and/or modified sequence
atgaccgtgctggagatcaccctggccgtgatcctgaccctgctgggcctggccatcctggccatcctgctgaccagatgggccagaagaaagcagagcgagatgtacatcagcagatacagcagcgagcagagcgccagactgctggactacgaggacggcagaggcagcagacacgcctacagcacccagagcgacaccagctacgacaacagagagagaagcaagagagactacacccccagcaccaacagcctggccctgagcagaagcagcatcgccctgccccagggcagcatgagcagcatcaagtgcctgcagaccaccgaggagccccccagcagaaccgccggcgccatgatgcagttcaccgcccccatccccggcgccaccggccccatcaagctgagccagaagaccatcgtgcagaccctgggccccatcgtgcagtaccccggcagcaacgtgagaagccacccccacaccatcaccggcccccccagcgcccccagaggcccccccatggcccccatcatcatcagccagagaaccgccagccagctggccgcccccatcagaatcccccaggtgcacaccatggacagcagcggcaagatcaccctgacccccgtggtgatcctgaccggctacatggacgaggagctggccaagaagagctgcagcaagatccagatcctgaagtgcggcggcaccgccagaagccagaacagcagagaggagaacaaggaggccctgaagaacgacatcatcttcaccaacagcgtggagagcctgaagagcgcccacatcaaggagcccgagagagagggcaagggcaccgacctggagaaggacaagatcggcatggaggtgaaggtggacagcgacgccggcatccccaagagacaggagacccagctgaagatcagcgagatgagcgtgccccagggccagggcgcccagatcaagaagagcgtgagcgacgtgcccagaggccaggagagccaggtgaagaagagcgagagcggcgtgcccaagggccaggaggcccaggtgaccaagagcggcctggtggtgctgaagggccaggaggcccaggtggagaagagcgagatgggcgtgcccagaagacaggagagccaggtgaagaagagccagagcggcgtgagcaagggccaggaggcccaggtgaagaagagagagagcgtggtgctgaagggccaggaggcccaggtggagaagagcgagctgaaggtgcccaagggccaggagggccaggtggagaagaccgaggccgacgtgcccaaggagcaggaggtgcaggagaagaagagcgaggccggcgtgctgaagggccccgagagccaggtgaagaacaccgaggtgagcgtgcccgagaccctggagagccaggtgaagaagagcgagagcggcgtgctgaagggccaggaggcccaggagaagaaggagagcttcgaggacaagggcaacaacgacaaggagaaggagagagacgccgagaaggaccccaacaagaaggagaagggcgacaagaacaccaagggcgacaagggcaaggacaaggtgaagggcaagagagagagcgagatcaacggcgagaagagcaagggcagcaagagagccaaggccaacaccggcagaaagtacaacaagaaggtggaggagtag

SEQ ID NO: 344193 - DNA, 1689 bp, Artificial Sequence
  derived and/or modified sequence
atgaccgtgctggagatcaccctggccgtgatcctgaccctgctgggcctggccatcctggccatcctgctgaccagatgggccagaagaaagcagagcgagatgtacatcagcagatacagcagcgagcagagcgccagactgctggactacgaggacggcagaggcagcagacacgcctacagcacccagagcgacaccagctacgacaacagagagagaagcaagagagactacacccccagcaccaacagcctggccctgagcagaagcagcatcgccctgccccagggcagcatgagcagcatcaagtgcctgcagaccaccgaggagccccccagcagaaccgccggcgccatgatgcagttcaccgcccccatccccggcgccaccggccccttcaagctgagccagaagaccatcgtgcagaccctgggccccatcgtgcagtaccccggcagcaacgtgagaagccacccccacaccatcaccggcccccccagcgcccccagaggcccccccatggcccccatcatcatcagccagagaaccgccagccagctggccgcccccatcagaatcccccaggtgcacaccatggacagcagcggcaagatcaccctgacccccgtggtgatcctgaccggctacatggacgaggagctggccaagaagagctgcagcaagatccagatcctgaagtgcggcggcaccgccagaagccagaacagcagagaggagaacaaggaggccctgaagaacgacatcatcttcaccaacagcgtggagagcctgaagagcgcccacatcaaggagcccgagagagagggcaagggcaccgacctggagaaggacaagatcggcatggaggtgaaggtggacagcgacgccggcatccccaagagacaggagacccagctgaagatcagcgagatgagcgtgccccagggccagggcgcccagatcaagaagagcgtgagcgacgtgcccagaggccaggagagccaggtgaagaagagcgagagcggcgtgcccaagggccaggaggcccaggtgaccaagagcggcctggtggtgctgaagggccaggaggcccaggtggagaagagcgagatgggcgtgcccagaagacaggagagccaggtgaagaagagccagagcggcgtgagcaagggccaggaggcccaggtgaagcagagagagagcgtggtgctgaagggccaggaggcccaggtggagaagagcgagctgaaggtgcccaagggccaggagggccaggtggagaagaccgaggccgacgtgcccaaggagcaggaggtgcaggagaagaagagcgaggccggcgtgctgaagggccccgagagccaggtgaagaacaccgaggtgagcgtgcccgagaccctggagagccaggtgaagaagagcgagagcggcgtgctgaagggccaggaggcccaggagaagaaggagagcttcgaggacaagggcaacaacgacaaggagaaggagagagacgccgagaaggaccccaacaagaaggagaagggcgacaagaacaccaagggcgacaagggcaaggacaaggtgaagggcaagagagagagcgagatcaacggcgagaagagcaagggcagcaagagagccaaggccaacaccggcagaaagtacaacaagaaggtggaggagtag

SEQ ID NO: 344194 - DNA, 1689 bp, Artificial Sequence
  derived and/or modified sequence
atgaccgtgctggagatcaccctggccgtgatcctgaccctgctgggcctggccatcctggccatcctgctgaccagatgggccagaagaaagcagagcgagatgcacatcagcagatacagcagcgagcagagcgccagactgctggactacgaggacggcagaggcagcagacacgcctacagcacccagagcgacaccagctgcgacaacagagagagaagcaagagagactacacccccagcaccaacagcctggccctgagcagaagcagcatcgccctgccccagggcagcatgagcagcatcaagtgcctgcagaccaccgaggagctgcccagcagaaccgccggcgccatgatgcagttcaccgcccccatccccggcgccaccggccccatcaagctgagccagaagaccatcgtgcagacccccggccccatcgtgcagtaccccggccccaacgtgagaagccacccccacaccatcaccggcccccccagcgcccccagaggcccccccatggcccccatcatcatcagccagagaaccgccagccagctggccgcccccatcagaatcccccaggtgcacaccatggacagcagcggcaagatcaccctgacccccgtggtgatcctgaccggctacatggacgaggagctggccaagaagccctgcagcaagatccagatcctgaagtgcggcggcaccgccagaagccagaacagcagagaggagaacaaggaggccctgaagaacgacatcatcttcaccaacagcgtggagagcctgaagagcgcccacatcaaggagcccgagagagagggcaagggcaccgacctggagaaggacaagatcggcatggaggtgaaggtggacagcgacgccggcatccccaagagacaggagacccagctgaagatcagcgagatgagcatcccccagggccagggcgcccagatcaagaagagcgtgagcgacgtgcccagaggccaggagagccaggtgaagaagagcgagagcggcgtgcccaagggccaggaggcccaggtgaccaagagcggcctggtggtgctgaagggccaggaggcccaggtggagaagagcgagatgggcgtgcccagaagacaggagagccaggtgaagaagagccagagcggcgtgagcaagggccaggaggcccaggtgaagaagagagagagcgtggtgctgaagggccaggaggcccaggtggagaagagcgagctgaaggtgcccaagggccaggagggccaggtggagaagaccgaggccgacgtgcccaaggagcaggaggtgcaggagaagaagagcgaggccggcgtgctgaagggccccgagagccaggtgaagaacaccgaggtgagcgtgcccgagaccctggagagccaggtgaagaagagcgagagcggcgtgctgaagggccaggaggcccaggagaagaaggagagcttcgaggacaagggcaacaacgacaaggagaaggagagagacgccgagaaggaccccaacaagaaggagaagggcgacaagaacaccaagggcgacaagggcaaggacaaggtgaagggcaagagagagagcgagatcaacggcgagaagagcaagggcagcaagagagccaaggccaacaccggcagaaagtacaacaagaaggtggaggagtag

SEQ ID NO: 344195 - DNA, 1689 bp, Artificial Sequence
  derived and/or modified sequence
atgaccgttctggaaattacacttgccgtgattcttaccctgttagggcttgctatcctggcgattctgttaacaagatgggctcgaagaaagcaatccgagatgtacatctccaggtactcctctgaacagtccgccagacttcttgactatgaagacggcagaggctcaagacatgcctattctacacagtccgacactagttacgataaccgggaacgctcaaaacgcgattataccccatcgacaaactcgcttgccctatcgagatctagcatcgcccttccacagggctcaatgtcctcaattaaatgtttgcaaactaccgaggaacctccctccagaactgctggagcaatgatgcaatttactgcgcccatcccaggggcgaccggccctattaagctgtcgcagaaaaccattgttcagaccttgggacccattgttcagtaccccggatccaatgtccggtctcacccacacaccatcacaggcccacctagtgccccaagaggacccccaatggccccaataattataagccagcgcaccgccagccagctggccgcccctattcgaatccctcaggtgcacaccatggattccagcggcaaaataactctgactcccgtagtgatactgacaggctatatggatgaggaactcgctaaaaagagttgctccaaaattcagatattgaagtgcggcggaaccgcacgctcgcaaaattccagggaagaaaataaggaggcgttgaagaacgacatcatatttaccaactccgtagaatcgctgaaaagcgcgcacatcaaggaaccagaacgcgagggaaaaggcacagacctggagaaggataaaatcggtatggaagtaaaggtggactccgatgccggcattcccaagcgccaagaaacacaactgaagatatcggaaatgagtatcccccagggtcagggcgcacagattaagaagtccgtctcggacgtaccacggggccaggaaagtcaggtcaagaaatcagaaagtggagtgcccaaaggtcaagaggctcaagttaccaaatcaggccttgttgtactaaagggccaggaagcgcaggttgaaaagagcgagatgggcgttccccgacgccaggagtcacaagtcaagaaatcacagagcggtgtatccaagggacaagaggctcaggtgaagaagcgcgagagcgtagtgcttaaaggacaggaggctcaggtggaaaaatcagaactgaaagttcccaaaggacaggagggtcaagttgagaagacagaagccgatgtgcctaaggagcaagaggtgcaggagaagaaatctgaggcaggggtgcttaaaggccctgagtcacaggtgaaaaataccgaggtttccgtgcccgaaaccctcgaatcccaggtgaaaaaatcagagtcaggcgtgctgaaaggtcaggaagcccaggaaaaaaaggagtcttttgaggacaagggaaataatgacaaggaaaaagagcgtgacgctgaaaaggaccccaataaaaaagagaagggtgacaagaataccaaaggggacaaaggaaaagacaaggtaaaaggtaagagggagagcgaaattaacggggaaaagtccaaaggtagtaaacgggcaaaagcaaacaccgggcgcaagtacaataagaaggttgaagagtag

SEQ ID NO: 344196 - DNA, 579 bp, Artificial Sequence
  derived and/or modified sequence
atgaccgtactcgagataacactggcggtcatactcactttgctgggtctggcaattctcgctattcttcttacaagatgggctcgcagaaaacagtccgaaatgcatatctcgcgatactccagtgagcagagtgctcgattgctagactacgaagatgggagaggaagcaggcatgcgtacagcactcaaagcgatacctcttgcgacaaccgggagcgttctaaaagggattacaccccaagcaccaatagtctggcgctcagtaggtcaagcattgcattgccccaggggtccatgtcgtcaatcaagtgtctccaaaccacagaggagctgcctagtagaacagccggcgcgatgatgcagtttacagccccgataccaggagctactggccccattaaattatcccagaaaaccattgtccagacacccggccccatcgtacagtatcctggccctaacgtgcggagccatccacacacgattacaggtcccccttcagcaccaagaggcccacctatggcccccattataatttcacaacgtacagccagccaactggccgccccaatatag

SEQ ID NO: 344197 - DNA, 579 bp, Artificial Sequence
  derived and/or modified sequence
atgaccgtgctcgagataactctggccgtcatcttgacgctcctcggactggcgattcttgccatactgctcacgcgctgggcccgtcggaaacagagcgaaatgcacatcagccgatactccagtgaacagagtgccagattgctggattatgaggacgggaggggcagtcggcatgcatactcgactcagtccgacactagttgtgataatcgggaaaggtccaaaagagattacacaccttccacaaactctttggccttatctaggagttcgattgctctgccacagggctccatgtcaagcattaagtgtctgcaaacaacagaggagctgcccagtaggacagccggggcgatgatgcaattcacagcccccattccgggcgcgactggtcccattaagctgtcgcagaaaactattgtgcagacccctggccccattgtgcagtaccctgggcctaacgtgaggagtcatccccacacaataaccggccccccatcagcaccccggggccctcccatggcacccatcattatcagccaacggactgcttcccaattagctgctcctatatag

SEQ ID NO: 344198 - DNA, 1689 bp, Artificial Sequence
  derived and/or modified sequence
atgaccgtgctagagattacattagctgtgatcctgactctcttaggcctggccattcttgcaatactgctcaccaggtgggcaaggcgcaagcagtccgaaatgtatatttcgcgttatagttctgagcaaagcgcgcggttactcgattacgaagatgggcgcggctcacgccacgcttattctacccagtccgatacaagctatgacaacagggagcgttctaaacgagattacactccatccactaattccctggccctgagcaggtcctccatagccctacctcaaggcagtatgagcagcattaagtgtctccaaactactgaagagcccccctctcgaacggccggagccatgatgcaatttacagccccgattccaggagccaccgggccgatcaaactctcgcagaaaaccatcgtgcaaaccttaggacccatcgtgcagtatcctgggtctaatgtccggagtcatcctcacaccatcaccggtcccccatcagccccacgcggaccacccatggcccctatcattatcagtcagcgtactgcgtctcagctggctgccccaattcgtattccgcaggtccacaccatggattcaagcgggaaaattacactaacacctgtcgtcatcctgactgggtacatggatgaggaactggccaagaagtcttgtagtaagatccagatcttaaagtgtggaggaactgcacgcagtcaaaactcaagggaagaaaacaaggaggcgcttaagaatgatatcatcttcacaaattccgtggagagcttaaagagtgcccacataaaagagccagagcgtgaagggaagggcacagatctcgagaaagataagataggcatggaggtgaaagtcgattctgatgcagggattccaaagcgacaggaaacacagttaaagatcagtgagatgtccgtgccgcaggggcagggggcccagatcaagaagagtgtgagcgacgtgcctaggggacaggagtctcaggtaaaaaagagcgagagtggcgtaccaaaaggtcaggaggcccaggttaccaagtctgggctcgtcgttttgaaaggacaggaggctcaggtggaaaagtcagagatgggggttccacgaagacaggaaagtcaggtgaaaaagagccagtcaggcgtttcaaagggccaagaggctcaggtcaagaagagagagagcgtcgtacttaagggacaagaggcacaggtggaaaaatctgagctgaaggtgccaaaagggcaggaggggcaggtggaaaaaaccgaggccgacgtgccgaaagagcaagaagtccaagaaaagaagtccgaagctggggtgctgaagggtccagagtcacaggtcaagaataccgaagtgtcagtacctgagacactggaatctcaggtgaagaaatcggagtcaggcgtcctgaaggggcaagaagcacaggagaaaaaagaaagttttgaagataaggggaacaacgacaaggagaaagaacgggatgcggaaaaggatcccaataagaaagagaagggggataaaaacacaaagggggacaagggcaaagataaggtgaaaggaaagagagaatccgagatcaacggtgagaagtcaaagggatcaaaacgtgccaaagctaacacagggagaaagtacaataaaaaggttgaggagtag

SEQ ID NO: 344199 - DNA, 1689 bp, Artificial Sequence
  derived and/or modified sequence
atgactgttctcgagatcactctagccgtgatcctgactctcctgggactcgccatcctggccatcctgctcacaaggtgggctcgcaggaagcagtctgagatgtacatttcccggtattcatcggagcaaagtgcacgcctgttggactacgaggatggccgagggtctaggcacgcctattccacccaatccgacactagttatgacaacagagagcgcagcaaacgggactatactccgtccaccaactctctagcgttgtccaggagctctattgctttgcctcagggttctatgtcctcaattaagtgtctgcagacgacagaagagccaccatctagaacagccggcgccatgatgcaattcaccgcacccattcccggcgccactggcccattcaagctgagtcagaaaacaattgtgcagacactggggcctattgttcagtaccccggtagcaatgtgaggtcacacccccacactatcaccggcccaccatctgcacctcgaggcccccccatggcccctattatcatatcccagcgtaccgcttcccagttggctgcacccatcaggatcccccaggtccacaccatggacagtagtggcaaaattacgttaacacccgtggtaatccttacagggtacatggacgaggagctggcaaagaaatcatgcagcaagattcagatcctgaaatgtggtggaactgcgcggtcccagaacagcagggaagagaataaggaagccctcaagaacgacatcatatttactaactccgtggaaagcttaaagtccgcgcacatcaaggaacctgagagagagggaaaaggaactgacctagagaaggacaaaatcggcatggaggttaaagtggatagtgacgccggcatcccaaagaggcaggagacacaactgaagatctccgaaatgtccgtgccacaaggtcagggagctcaaattaagaagagtgttagcgacgttccacgtggacaagagtctcaagtgaaaaaaagcgaatctggggtgcctaaaggccaggaggcccaggtgaccaaaagcgggctcgtagtgctcaaggggcaggaagcccaggtggagaagagcgagatgggggtgcctcgaaggcaggaatcccaggtgaagaagagtcaaagcggcgtgtccaagggacaggaggcccaggtgaaacagcgagaatccgtcgtgttgaaaggccaggaagcccaggtggagaaaagcgaactcaaagtgcctaagggacaggagggccaagtggaaaagactgaggcggatgtccctaaagagcaggaggtccaggagaaaaagagcgaagccggagttttgaaagggcctgagagtcaggtgaaaaacacagaggtgagcgtacctgaaaccctagagtctcaggtaaaaaagagcgagagcggggtgctgaagggccaggaagctcaggagaaaaaagaatcctttgaagacaagggtaacaacgataaggagaaagagcgggatgctgagaaagatcctaataaaaaagaaaagggcgataagaacacgaaaggggataaaggtaaggataaggtaaaaggtaaaagagagtccgaaatcaacggggagaaatcaaaaggctccaagagggcgaaggcgaatactggcaggaagtacaacaagaaagttgaagagtag

SEQ ID NO: 344200 - DNA, 1689 bp, Artificial Sequence
  derived and/or modified sequence
atgacggtgctggagatcactctcgcagtgattttgactttattgggactggccatcttagccatcctcttgacaaggtgggcacgtcgaaagcagtctgaaatgcacatctccagatattcttcggagcagagcgcgcggcttctggattatgaggacggcaggggatccagacatgcatactctacacagagtgatacgagctgcgataacagagagcgctccaaacgcgactatactccgtctaccaacagcctggccctatctcggagtagtattgcactgccccagggatccatgtcctccatcaaatgcttgcagacgacagaggagttaccctctcgcaccgctggcgctatgatgcagtttacagcacccattcccggcgccaccggaccgatcaaattaagccagaagactattgtgcaaacaccaggtcctattgtccagtaccctggcccgaatgtgaggtcacatcctcacactatcaccggaccccctagtgctccacggggacctcccatggcccccatcattattagtcagcgtactgccagccaactggcggcccccatccgtatcccccaggttcacactatggatagcagcggcaagatcaccctcacaccggtggtgatcctgactggttatatggacgaagagttggccaagaaaccgtgttctaaaatccagattctgaaatgcggcggcacagcccggagtcagaacagtagggaggaaaacaaggaggccctgaaaaatgatatcatctttaccaatagcgtggaatctctgaaatccgctcacattaaagagccggagcgtgaaggaaagggaaccgacctggagaaagataaaataggaatggaagtcaaggtggattccgatgccggtatccccaaacgccaggaaacccaactgaagatctcagagatgtccatccctcagggacagggcgcccagatcaaaaagtccgtatctgacgtgcctcgaggccaggaatcacaggtcaaaaaaagtgagagcggcgtgcctaaaggccaagaggcacaggttacaaagtctgggctggtggtcctcaaaggtcaggaggcccaggtcgagaaatctgagatgggagttccaaggaggcaggaaagtcaagtaaagaaaagccaaagtggcgtgagtaaaggccaggaggcgcaagtgaaaaagcgggaatctgtcgtgcttaagggccaggaagcacaggtggaaaaatccgagctgaaagtaccaaagggacaggaaggacaggtggaaaagaccgaagctgacgtgccaaaggagcaggaggtgcaagaaaaaaagagtgaggccggcgttctgaagggacccgagagccaggtaaaaaacacagaggtatcagtccccgaaaccctagagagccaggtgaaaaaatctgagtctggggtgctgaagggccaagaggcccaagagaagaaggagtccttcgaggataagggcaataatgacaaggagaaggagagggatgccgagaaggacccaaacaaaaaggagaaaggagataaaaacaccaagggtgacaaagggaaggataaagtcaagggtaagcgcgagagcgaaattaacggagaaaaaagcaaaggtagtaagcgcgcaaaggctaatacaggccggaaatacaataaaaaagtggaggagtag

SEQ ID NO: 344201 - DNA, 1689 bp, Artificial Sequence
  derived and/or modified sequence
atgacagtgctggagatcaccctggccgtcatcctgaccctgctgggcctggccatcctggccatcctgctgacccgctgggcccggaggaagcagagcgagatgtacatcagccgctacagcagcgagcagagcgcccggctgctggactatgaagatggccggggcagcagacatgcctacagcacccagagcgacaccagctatgacaaccgggagaggagcaagagggactacacccccagcaccaacagcctggccctgagccgcagcagcatcgccctgccccagggctccatgagcagcatcaagtgcctgcagaccacagaggagccccccagcaggacagctggggccatgatgcagttcaccgcccccatccctggggccaccggccccatcaagctgagccagaagaccatcgtgcagaccctgggccccatcgtgcagtacccaggcagcaatgtgcgcagccacccccacaccatcaccggcccccccagcgccccccggggcccccccatggcccccatcatcatcagccagaggacagccagccagctggccgcccccatccgcatcccccaggtgcacaccatggacagcagcggcaagatcaccctgacccctgtggtgatcctgaccggctacatggatgaggagctggccaagaagagctgcagcaagatccagatcctgaagtgtggcggcacagcccggagccagaacagccgggaggagaacaaggaggccctgaagaatgacatcatcttcaccaacagcgtggagagcctgaagagcgcccacatcaaggagcctgagcgggagggcaagggcacagacctggagaaggacaagattggcatggaggtgaaggtggacagtgatgctggcatccccaagaggcaggagacccagctgaagatcagcgagatgagcatcccccagggccagggcgcccagatcaagaagtctgtgtctgatgtgccccggggccaggagagccaggtgaagaagtctgagagcggcgtgcccaagggccaggaggcccaggtgaccaagagcggcctggtggtgctgaagggccaggaggcccaggtggagaagtctgagatgggcgtgccccggcggcaggagagccaggtgaagaagagccagagcggcgtgtccaagggccaggaggcccaggtgaagaagcgggagagcgtggtgctgaagggccaggaggcccaggtggagaagtctgagctgaaggtgcccaagggccaggagggccaggtggagaagacagaagcagatgtgcccaaggagcaggaggtgcaggagaagaagtctgaggccggcgtgctgaagggccctgagagccaggtgaagaacacagaggtgtctgtgcctgagaccctggagagccaggtgaagaagtctgagagcggcgtgctgaagggccaggaggcccaggagaagaaggagagctttgaagataaaggaaataatgacaaggagaaggagagagatgctgagaaggaccccaacaagaaggagaagggggacaagaacaccaagggggacaagggcaaggacaaggtgaagggcaagcgggagagcgagatcaacggggagaagagcaagggcagcaagagggccaaggccaacacaggcaggaagtacaacaagaaggtggaggagtag

SEQ ID NO: 344202 - DNA, 579 bp, Artificial Sequence
  derived and/or modified sequence
atgacagtgctggagatcaccctggccgtcatcctgaccctgctgggcctggccatcctggccatcctgctgacccgctgggcccggaggaagcagagcgagatgcacatcagccgctacagcagcgagcagagcgcccggctgctggactatgaagatggccggggcagcagacatgcctacagcacccagagcgacaccagctgtgacaaccgggagaggagcaagagggactacacccccagcaccaacagcctggccctgagccgcagcagcatcgccctgccccagggctccatgagcagcatcaagtgcctgcagaccacagaggagctgcccagcaggacagctggggccatgatgcagttcaccgcccccatccctggggccaccggccccatcaagctgagccagaagaccatcgtgcagaccccaggccccatcgtgcagtacccaggccccaacgtgcgcagccacccccacaccatcaccggcccccccagcgccccccggggcccccccatggcccccatcatcatcagccagaggacagccagccagctggccgcccccatctag

SEQ ID NO: 344203 - DNA, 1689 bp, Artificial Sequence
  derived and/or modified sequence
atgacagtgctggagatcaccctggccgtcatcctgaccctgctgggcctggccatcctggccatcctgctgacccgctgggcccggaggaagcagagcgagatgtacatcagccgctacagcagcgagcagagcgcccggctgctggactatgaagatggccggggcagcagacatgcctacagcacccagagcgacaccagctatgacaaccgggagaggagcaagagggactacacccccagcaccaacagcctggccctgagccgcagcagcatcgccctgccccagggctccatgagcagcatcaagtgcctgcagaccacagaggagccccccagcaggacagctggggccatgatgcagttcaccgcccccatccctggggccaccggccccatcaagctgagccagaagaccatcgtgcagaccctgggccccatcgtgcagtacccaggcagcaatgtgcgcagccacccccacaccatcaccggcccccccagcgccccccggggcccccccatggcccccatcatcatcagccagaggacagccagccagctggccgcccccatccgcatcccccaggtgcacaccatggacagcagcggcaagatcaccctgacccctgtggtgatcctgaccggctacatggatgaggagctggccaagaagagctgcagcaagatccagatcctgaagtgtggcggcacagcccggagccagaacagccgggaggagaacaaggaggccctgaagaatgacatcatcttcaccaacagcgtggagagcctgaagagcgcccacatcaaggagcctgagcgggagggcaagggcacagacctggagaaggacaagattggcatggaggtgaaggtggacagtgatgctggcatccccaagaggcaggagacccagctgaagatcagcgagatgtctgtgccccagggccagggcgcccagatcaagaagtctgtgtctgatgtgccccggggccaggagagccaggtgaagaagtctgagagcggcgtgcccaagggccaggaggcccaggtgaccaagagcggcctggtggtgctgaagggccaggaggcccaggtggagaagtctgagatgggcgtgccccggcggcaggagagccaggtgaagaagagccagagcggcgtgtccaagggccaggaggcccaggtgaagaagcgggagagcgtggtgctgaagggccaggaggcccaggtggagaagtctgagctgaaggtgcccaagggccaggagggccaggtggagaagacagaagcagatgtgcccaaggagcaggaggtgcaggagaagaagtctgaggccggcgtgctgaagggccctgagagccaggtgaagaacacagaggtgtctgtgcctgagaccctggagagccaggtgaagaagtctgagagcggcgtgctgaagggccaggaggcccaggagaagaaggagagctttgaagataaaggaaataatgacaaggagaaggagagagatgctgagaaggaccccaacaagaaggagaagggggacaagaacaccaagggggacaagggcaaggacaaggtgaagggcaagcgggagagcgagatcaacggggagaagagcaagggcagcaagagggccaaggccaacacaggcaggaagtacaacaagaaggtggaggagtag

SEQ ID NO: 344204 - DNA, 1689 bp, Artificial Sequence
  derived and/or modified sequence
atgacagtgctggagatcaccctggccgtcatcctgaccctgctgggcctggccatcctggccatcctgctgacccgctgggcccggaggaagcagagcgagatgtacatcagccgctacagcagcgagcagagcgcccggctgctggactatgaagatggccggggcagcagacatgcctacagcacccagagcgacaccagctatgacaaccgggagaggagcaagagggactacacccccagcaccaacagcctggccctgagccgcagcagcatcgccctgccccagggctccatgagcagcatcaagtgcctgcagaccacagaggagccccccagcaggacagctggggccatgatgcagttcaccgcccccatccctggggccaccggccccttcaagctgagccagaagaccatcgtgcagaccctgggccccatcgtgcagtacccaggcagcaatgtgcgcagccacccccacaccatcaccggcccccccagcgccccccggggcccccccatggcccccatcatcatcagccagaggacagccagccagctggccgcccccatccgcatcccccaggtgcacaccatggacagcagcggcaagatcaccctgacccctgtggtgatcctgaccggctacatggatgaggagctggccaagaagagctgcagcaagatccagatcctgaagtgtggcggcacagcccggagccagaacagccgggaggagaacaaggaggccctgaagaatgacatcatcttcaccaacagcgtggagagcctgaagagcgcccacatcaaggagcctgagcgggagggcaagggcacagacctggagaaggacaagattggcatggaggtgaaggtggacagtgatgctggcatccccaagaggcaggagacccagctgaagatcagcgagatgtctgtgccccagggccagggcgcccagatcaagaagtctgtgtctgatgtgccccggggccaggagagccaggtgaagaagtctgagagcggcgtgcccaagggccaggaggcccaggtgaccaagagcggcctggtggtgctgaagggccaggaggcccaggtggagaagtctgagatgggcgtgccccggcggcaggagagccaggtgaagaagagccagagcggcgtgtccaagggccaggaggcccaggtgaagcagcgggagagcgtggtgctgaagggccaggaggcccaggtggagaagtctgagctgaaggtgcccaagggccaggagggccaggtggagaagacagaagcagatgtgcccaaggagcaggaggtgcaggagaagaagtctgaggccggcgtgctgaagggccctgagagccaggtgaagaacacagaggtgtctgtgcctgagaccctggagagccaggtgaagaagtctgagagcggcgtgctgaagggccaggaggcccaggagaagaaggagagctttgaagataaaggaaataatgacaaggagaaggagagagatgctgagaaggaccccaacaagaaggagaagggggacaagaacaccaagggggacaagggcaaggacaaggtgaagggcaagcgggagagcgagatcaacggggagaagagcaagggcagcaagagggccaaggccaacacaggcaggaagtacaacaagaaggtggaggagtag

SEQ ID NO: 344205 - DNA, 1689 bp, Artificial Sequence
  derived and/or modified sequence
atgacagtgctggagatcaccctggccgtcatcctgaccctgctgggcctggccatcctggccatcctgctgacccgctgggcccggaggaagcagagcgagatgcacatcagccgctacagcagcgagcagagcgcccggctgctggactatgaagatggccggggcagcagacatgcctacagcacccagagcgacaccagctgtgacaaccgggagaggagcaagagggactacacccccagcaccaacagcctggccctgagccgcagcagcatcgccctgccccagggctccatgagcagcatcaagtgcctgcagaccacagaggagctgcccagcaggacagctggggccatgatgcagttcaccgcccccatccctggggccaccggccccatcaagctgagccagaagaccatcgtgcagaccccaggccccatcgtgcagtacccaggccccaacgtgcgcagccacccccacaccatcaccggcccccccagcgccccccggggcccccccatggcccccatcatcatcagccagaggacagccagccagctggccgcccccatccgcatcccccaggtgcacaccatggacagcagcggcaagatcaccctgacccctgtggtgatcctgaccggctacatggatgaggagctggccaagaagccctgcagcaagatccagatcctgaagtgtggcggcacagcccggagccagaacagccgggaggagaacaaggaggccctgaagaatgacatcatcttcaccaacagcgtggagagcctgaagagcgcccacatcaaggagcctgagcgggagggcaagggcacagacctggagaaggacaagattggcatggaggtgaaggtggacagtgatgctggcatccccaagaggcaggagacccagctgaagatcagcgagatgagcatcccccagggccagggcgcccagatcaagaagtctgtgtctgatgtgccccggggccaggagagccaggtgaagaagtctgagagcggcgtgcccaagggccaggaggcccaggtgaccaagagcggcctggtggtgctgaagggccaggaggcccaggtggagaagtctgagatgggcgtgccccggcggcaggagagccaggtgaagaagagccagagcggcgtgtccaagggccaggaggcccaggtgaagaagcgggagagcgtggtgctgaagggccaggaggcccaggtggagaagtctgagctgaaggtgcccaagggccaggagggccaggtggagaagacagaagcagatgtgcccaaggagcaggaggtgcaggagaagaagtctgaggccggcgtgctgaagggccctgagagccaggtgaagaacacagaggtgtctgtgcctgagaccctggagagccaggtgaagaagtctgagagcggcgtgctgaagggccaggaggcccaggagaagaaggagagctttgaagataaaggaaataatgacaaggagaaggagagagatgctgagaaggaccccaacaagaaggagaagggggacaagaacaccaagggggacaagggcaaggacaaggtgaagggcaagcgggagagcgagatcaacggggagaagagcaagggcagcaagagggccaaggccaacacaggcaggaagtacaacaagaaggtggaggagtag

SEQ ID NO: 344206 - DNA, 1689 bp, Artificial Sequence
  derived and/or modified sequence
atgaccgtgctggagatcaccctggccgtgatcctgaccctgctgggcctggccatacttgccattttgctgacccggtgggcaagacgcaagcaatctgagatgtatatcagccgctatagcagcgagcagtctgcccgactcttggactacgaggatggtcgtgggtccaggcacgcctactctactcagagtgacacttcctatgacaatcgcgagaggtccaagcgggactacaccccttccaccaactcattggcgctctcaaggagctctatcgctctcccccaaggatcaatgtcttcaattaagtgcctacagaccaccgaggaaccaccttcccgcacagcaggagcaatgatgcagtttaccgcccctatacctggggctaccggcccaattaagctatcccagaagactattgtccagacgctgggccccattgtccagtatcctgggagcaatgtccgcagtcacccccatacgattaccggcccaccctccgcccccaggggcccccctatggcaccaatcatcatttcgcagaggaccgcgtctcagctcgctgccccaattaggatccctcaggtccacaccatggattccagtggcaaaatcacactgacgcctgtagtgatcctcacaggttacatggatgaggagctggccaaaaaaagttgctcaaagatccagattttaaaatgcggcggtacagcgcgaagccaaaattctcgcgaggagaataaagaggccctcaagaacgacatcattttcaccaactcagtcgagtccctgaaaagtgcccacataaaggagccagaacgcgaagggaaggggacagatcttgagaaagacaagattggcatggaggtcaaggtggattcagacgccggcatcccaaaaaggcaagaaactcaactaaaaatatctgagatgagcatcccgcagggccagggtgcacaaattaagaagtcagtgtctgacgttcctcgtggccaggaaagtcaagtgaagaagtctgagtcgggcgtaccaaagggacaggaagctcaagtgacgaagtccggcctggtcgtgctgaaaggccaggaggcacaggtggagaaatcagagatgggcgtgcctaggagacaagaatctcaggtgaagaaatcccagagcggcgtttccaaaggtcaggaggctcaggtcaagaaacgggagtctgtagtactcaaaggccaggaagctcaggtagagaaatccgaattgaaggtgcccaaaggtcaggagggccaggtggagaaaacagaggctgacgtgccaaaagagcaggaagtgcaagagaaaaaaagcgaagccggcgtccttaagggccccgagtcccaggttaaaaacacagaggtctccgtgcctgaaactctggagtcccaggtaaaaaaatcagaatcaggggtactgaagggccaggaggcccaggagaaaaaagaatcattcgaagacaaaggtaataatgataaagagaaggagcgcgacgccgagaaggatccaaataagaaggaaaaaggcgacaaaaacaccaagggcgataaaggcaaggataaggtcaaggggaaaagagaatcagagattaacggcgaaaagtcaaaggggtcaaaaagggcaaaggctaacaccggcagaaaatataacaaaaaagtggaagaatag

SEQ ID NO: 344207 - DNA, 579 bp, Artificial Sequence
  derived and/or modified sequence
atgaccgtgctggagatcaccctggccgtgatcctgaccctgctgggcctcgctatcctggctattttgctaacccgatgggcgagaaggaagcaatctgagatgcatattagtaggtactcaagcgagcagtctgctcgccttctggactacgaagacgggagaggaagcaggcacgcttattcgactcagtcagacactagctgcgataaccgtgaacgatccaagcgggattataccccctccactaactctcttgccctcagcagaagttctattgccctgccacaagggagcatgtctagcatcaaatgtttgcaaactactgaagagctgccttccagaactgcgggggcgatgatgcagttcaccgcacctataccaggcgccacagggcccatcaaattatcccaaaagaccatcgtccagaccccgggtccgatcgttcagtatcccggccccaatgtacgttcacatccacatacaatcacaggaccgccatctgctcctagaggcccacccatggctcctattattatcagccaacgaaccgccagccagcttgctgctccgatttag

SEQ ID NO: 344208 - DNA, 579 bp, Artificial Sequence
  derived and/or modified sequence
atgaccgtgctggagatcaccctggccgtgatcctgaccctgctgggactcgcgatccttgcaattttgctgactaggtgggctcgacggaagcagtctgaaatgcacatcagccggtactcaagcgaacaaagcgcccggttgctggactacgaagacggtcgcgggagccggcacgcctacagtacccagtccgatacatcctgcgataatcgggagagatccaaaagagactatacacccagcacaaactccctggcactatcaaggtcatcaatcgccctgccccaaggcagcatgtccagcatcaagtgcctgcaaactacagaagagcttcctagcagaacagccggggccatgatgcagtttaccgctcctatcccaggggcgaccggccctatcaagctctcccagaagacaatcgtgcaaacccctggacctatcgtgcagtaccccggacctaatgtcagaagtcaccctcatactattactggtcccccttctgcaccaagggggccccctatggctcctatcatcatttcgcaacgcacggcctcgcagctggccgcaccaatatag

SEQ ID NO: 344209 - DNA, 1689 bp, Artificial Sequence
  derived and/or modified sequence
atgaccgtgctggagatcaccctggccgtgatcctgaccctgctgggtctggcaatcttggctattctgctaaccaggtgggctcggaggaagcaatccgaaatgtacatctccagatatagtagcgagcaatcagcccgattattagattatgaggatggtcggggaagccgccacgcctatagtacccagtcagacacctcgtatgataatagagaaaggagtaaacgtgattatactccctcaaccaacagtctcgctctcagccggagctcaatagctctgccacagggatcgatgtcctctatcaagtgcctgcaaaccacagaggagccaccgtcacggaccgccggagcaatgatgcagttcactgcaccaattccaggggcaaccggaccgatcaagctgagccaaaagaccattgtccagacgctcggccccatcgtgcagtacccaggcagcaatgtgagatcgcacccccataccatcactggccctccatctgcccctaggggtccccctatggcgccaatcatcattagccagagaaccgccagccaactggccgcgcctatccggatcccacaggtgcacacaatggattcttccggaaagatcacactgacaccggtggttatactgacaggctacatggacgaggagctagccaagaagagctgttctaaaatacagattcttaagtgcggcggaacggctcgctctcagaattcaagagaagagaataaggaagccctgaaaaacgatatcatctttactaattcggtcgagtctcttaagagcgctcatatcaaagaaccagagcgagagggcaagggcaccgatctcgaaaaagacaagattggaatggaagttaaagtggactccgacgcagggatacctaaacggcaagaaactcaactgaaaatctccgagatgtctgttccccagggtcaaggcgcacagataaaaaagtctgtgtctgacgttccaaggggccaggaatcccaggtgaaaaaatccgaaagtggcgtgccaaaaggccaggaagcccaagtcactaagtcaggactggttgtgttgaagggacaggaggcccaggtggaaaaaagcgaaatgggagttccccgcaggcaggaaagccaggtcaaaaaatcacagtcgggcgtctctaaagggcaggaagcccaggtcaagaaacgggaatcagtagtactcaaagggcaagaggctcaggttgaaaagtctgagttaaaggtgcctaagggtcaggaggggcaggttgagaagacagaggccgacgtccctaaggaacaggaggtgcaagagaaaaaaagcgaagccggcgtgctgaaaggtccagagagtcaggtgaaaaacacagaagtgagtgtcccagagaccctggagtcgcaggtcaagaagtcggaatccggtgtccttaaaggccaggaagcacaggaaaaaaaggaatcatttgaggacaaaggaaataacgacaaagagaaggagcgggatgcagagaaagatccgaacaagaaggagaagggagacaaaaacaccaaaggggacaaaggtaaggacaaggtgaagggcaagagagagtccgagatcaacggcgagaagtccaaaggctctaaaagggctaaggctaacactggcaggaagtataacaaaaaggtggaggaatag

SEQ ID NO: 344210 - DNA, 1689 bp, Artificial Sequence
  derived and/or modified sequence
atgaccgtgctggagatcaccctggccgtgatcctgaccctgctgggtctggccatcttagctatcctgctgacaaggtgggcgcgaagaaagcagtcggaaatgtatatttcccgatacagtagcgagcagtcagcacgcctacttgattacgaggatggcagaggctcgcgtcatgcctacagtactcagtcagatacctcatatgataatcgcgagcgcagtaagcgggattataccccatcaactaattctttggctctctctcgttcctccatcgctctgcctcagggctctatgagctctattaagtgtctgcagactacggaggaaccgcctagtcggactgcaggcgcgatgatgcagttcaccgcacccatccccggagctaccggcccgtttaagctttcacagaagacgattgtgcaaaccctcggtcccatcgtgcaataccctggttctaacgtccgttcacatccccacactataaccggcccaccctcagcacctcgaggccctcccatggctccgattatcattagtcagcgcaccgcatctcagctggctgctccgatccgaatcccccaggtgcatacaatggatagctcaggcaaaattactctgacacctgtggtgatactcactggatatatggacgaggaactggcaaaaaagtcttgctccaaaatccagatactcaaatgcggcggaactgcccgttctcaaaactcccgggaggagaataaagaagccctgaaaaatgacatcattttcaccaacagcgtcgagagcctcaaatcagcgcacatcaaggaaccagagcgtgagggaaaggggaccgatctggaaaaggacaagataggaatggaggtgaaagttgatagtgatgccggcatccccaagagacaggagactcagttaaagatctcagagatgagcgtgccccaaggccagggggcccaaatcaaaaaatctgttagcgatgttccaagagggcaggaaagccaggtcaaaaagtccgagagcggcgtaccaaaagggcaggaggcacaggtgacaaagtccggactggtcgtcctgaagggccaggaggcacaggtggagaaatcggaaatgggcgtgcccaggaggcaggagagtcaagtcaaaaagtcccaatccggcgtgagcaaagggcaggaggctcaagtaaagcagagagagtcagtcgtgctcaagggccaggaggctcaggttgagaagtcagagctgaaagtacctaagggacaggaggggcaggtggagaaaaccgaagcggacgtgccgaaggaacaagaagtccaggaaaagaaatccgaggccggggtgttgaagggccccgagtctcaggtgaagaatacggaggttagtgttccggaaaccctggagtctcaagtgaaaaagagcgagtcgggtgttctgaagggccaggaggcgcaggagaaaaaagaaagttttgaagataagggcaacaatgataaagaaaaggaacgcgacgctgagaaagatccgaataaaaaggagaagggcgataagaatactaagggcgataaaggtaaggataaggttaaggggaagagggaatcggagatcaacggggagaagtcgaaaggttcaaaacgcgcaaaagctaatacaggaagaaaatacaataagaaggtcgaggaatag

SEQ ID NO: 344211 - DNA, 1689 bp, Artificial Sequence
  derived and/or modified sequence
atgaccgtgctggagatcaccctggccgtgatcctgaccctgctgggattggcgatcctggctattctgttaacaaggtgggcccggcggaaacagagcgagatgcacatctctcgctactcctccgagcagtctgcccgcctgctggattatgaggatggaagagggtctcgccacgcgtactcaacgcagtccgacacgtcctgcgacaatcgggagcgtagtaaaagagactacacaccgtccactaactcattggccttatctaggtcttctatcgcacttccacagggatccatgagcagcatcaagtgcctacagacaaccgaagaactgccatccagaaccgccggtgctatgatgcaatttacagccccaattccaggggccacaggtccaatcaaattatcacagaaaactattgtacagacaccgggtccaatagtccagtatcctggtcccaatgtacggagccatcctcacaccatcaccggacccccttctgctcccaggggcccacctatggctcctattattatttcccagcgtacagcaagtcagctggctgccccaattcgcattccccaggttcacacgatggattcctccgggaaaatcactttaacacctgtggtgattctcaccggctacatggatgaagagctggccaaaaagccatgctccaaaattcaaatacttaagtgtggcggcaccgctcggtcacagaattcgcgagaggagaataaggaggccctgaagaacgacattatcttcaccaactctgtcgagtccctgaagtctgcccatatcaaagaaccggagcgggagggaaaagggacagacttggagaaagataagatcggcatggaagttaaggtagattctgacgctggtataccgaaacgacaagagacccaactgaagatctctgaaatgtctatacctcaaggccaaggtgcccagattaagaagtccgtgagcgacgtccccagggggcaggaaagccaggtcaagaagtccgaaagcggggtgcctaagggccaggaggctcaagtgacgaaatccggactggtggtccttaagggccaggaggctcaggttgagaagagtgaaatgggggtgcccagacgtcaggaaagccaagtgaagaagagccagtctggagtgagcaaaggccaggaagctcaggtaaagaagcgagagagcgttgtgctgaaaggacaggaggcccaagttgagaaatctgagttgaaggtgcccaaaggccaggaaggccaggtggagaagactgaggcagatgttcccaaagagcaggaagtccaagagaaaaagtcagaggcaggagtccttaaggggcccgagtcacaggttaaaaataccgaggtctctgtccctgaaacactggaatcccaagtgaagaaatcagaatctggggtgttgaaggggcaggaggcacaggaaaagaaggaaagcttcgaagataaggggaacaatgacaaggagaaggagcgcgacgccgagaaggaccccaataaaaaggagaaaggggacaaaaacacgaagggagataaggggaaagacaaggtaaaggggaaaagagagtccgagataaacggggaaaagtccaaggggtccaagcgggcaaaggctaataccggtcggaagtacaacaagaaggtggaagagtag

SEQ ID NO: 344212 - DNA, 1689 bp, Artificial Sequence
  derived and/or modified sequence
atgaccgtgttagagatcactcttgcggttatactgacgctgctcgggctggccatcctggctatactccttactcgctgggccagacggaagcagtccgaaatgtacattagtcgatatagctctgagcagagcgcacgactgctggactatgaggatgggagagggagccgccacgcttattctacacagtctgacaccagctatgataaccgggagcggtccaagagagattacaccccttctacaaattcactggcgctctcccgatccagtatcgcactaccacaggggtctatgagttcaataaagtgtctccaaacgaccgaggaaccccctagcagaacagccggtgcgatgatgcaattcaccgctccaatccccggagccacaggtcccattaagctctcgcaaaagaccatcgtccagactctagggcctatcgtgcagtatccgggaagcaacgtgcgcagccatccccacaccatcactggacccccaagcgcgcctcgtgggccaccgatggctcctattatcatttcacaaagaacagcaagccagctcgcagccccaattcgcattccccaggtgcacactatggactcctctgggaagatcacgctgacccccgtcgtaatccttacaggttacatggatgaggagctggcaaaaaaatcatgttccaagatccagatcctcaagtgcggcggtaccgccaggtcgcagaatagccgggaagaaaataaagaagcgttaaagaacgatatcatctttacaaattctgtggagagcctgaagtccgcacacattaaagaacctgagcgggaaggaaagggcacagatctcgaaaaggataaaatcggcatggaggtgaaggtggatagcgacgctggtattcctaaacgacaggagacgcagctcaaaatatcagaaatgtcgatcccccaagggcagggcgctcagattaaaaaatctgtttctgacgtgccaaggggccaggaaagccaggtgaagaagtccgaatctggagtccctaaaggccaagaagctcaggtcacaaaaagcggactggtagtgttaaaaggccaagaagctcaagtcgagaaatctgagatgggggtacctagaagacaggaatcacaggttaagaaaagccaaagcggagtgagcaaaggccaggaagcccaagtgaaaaaacgcgaatctgtggttttgaagggccaagaagcgcaagtcgagaaatcagagctcaaagttccgaaaggacaagagggtcaggtggagaagaccgaagcggacgtccctaaggaacaagaggtgcaggaaaagaagtccgaggctggggtgctgaaaggccctgaatctcaggtcaaaaatactgaagtctccgtccccgaaactctggagtcccaggtgaaaaaaagcgagagtggcgttctcaagggccaggaggctcaggaaaagaaggagagtttcgaggacaagggaaataacgacaaagagaaggaacgtgacgccgagaaggaccccaataaaaaggaaaaaggtgacaaaaacacaaaaggtgataaaggcaaagacaaggtgaagggaaagagggaatctgaaattaacggcgagaaaagcaaagggagcaaaagggcgaaggcgaacactggtcgcaagtacaataagaaggtggaggaatag

SEQ ID NO: 344213 - DNA, 579 bp, Artificial Sequence
  derived and/or modified sequence
atgacagttctagaaattacattggccgtgattttgacgcttctcggacttgcgatcctcgccatcctgttgacaaggtgggccagacgaaagcagtcagagatgcacatctccagatattctagcgaacaaagtgcccgactgcttgattatgaggatggtcggggttctcggcatgcctatagtacccagtctgatacttcatgtgataatcgcgagagaagcaagagagattacacgcccagcaccaacagcctcgccctaagtagatcgtcaattgccctgccacagggttccatgtcaagcatcaaatgccttcagacgaccgaggagctccccagcaggacagcaggcgctatgatgcagttcaccgcccctatcccaggtgccaccggacccattaagttgtcccagaaaacgatagtgcagactcctggccctattgtccagtatccaggccctaacgttaggagtcatccacataccattactggtccgccttccgcacccaggggacctcccatggccccaattattatctcccaacgaactgcgtcccaacttgcagcgccaatatag

SEQ ID NO: 344214 - DNA, 579 bp, Artificial Sequence
  derived and/or modified sequence
atgacggtgctggagatcaccttagccgttattctgaccttgttgggactggcaattctggccattctgctgactcgctgggctcggagaaagcagtctgagatgcacatctctcggtattcttccgagcagagtgcccgtctgttggactacgaggatgggcgtggtagtaggcatgcgtactctacccaatctgatacctcttgcgataatcgagaacgctcaaagcgcgactacacccccagtaccaactctttagcgctgtctcggtcttcgattgcattgccccagggcagcatgtcctccataaagtgcttgcagacaactgaagagctgcccagcagaacagcaggagccatgatgcagtttacggccccaattcctggtgccactggcccaatcaaactgagccaaaagacaatagtccagacaccaggccctatcgtgcagtaccccggtcccaacgttagatcccatccacacactatcactggcccaccctccgcccctagaggacctccaatggcacctatcataatatctcagaggacagcctcgcagctcgctgctcctatttag

SEQ ID NO: 344215 - DNA, 1689 bp, Artificial Sequence
  derived and/or modified sequence
atgaccgtgttggaaatcacactcgccgtgattctgacgctgctcggccttgctatcctcgctatcctgctgacacgttgggcccgacgcaaacagagcgagatgtatatttcccgctattccagcgagcagtcagcgcgattactcgattacgaggatggcagggggtctagacacgcctatagtacacaatccgacaccagttatgacaatcgggagagaagcaagagagattataccccctcaaccaactcacttgcgctgagcagaagtagtatcgcattgccgcagggttctatgtccagtatcaaatgcctgcagactacggaggagccaccctcaaggacagctggcgctatgatgcaattcaccgcccctatccccggagctaccggtcccattaagctgagccagaagactatcgtgcaaactttggggcctatcgtgcagtatcctgggtctaacgtccggtcacatccacatacaattaccggacccccatctgccccaagaggccctcctatggcccctatcataatttcacagcgaaccgcatcccagttggccgctccaatccggattccccaggtgcacaccatggattcatccggcaaaatcacgcttacacccgtcgtaattctaaccgggtacatggatgaagaactagcgaaaaagagctgcagtaagatccagatcctgaagtgcggcggtaccgcacgcagccagaacagccgggaagagaacaaggaggccctgaagaacgatattatctttactaacagtgtggaatccctcaagtccgctcacattaaggagccagagcgcgagggaaagggtactgacctcgaaaaagataagattggaatggaggtcaaagtggactccgatgctggaattcccaagcgccaggagacgcagctgaagatctccgaaatgagcgtaccccaaggtcagggcgcacagataaagaaatcggtgtcagatgtcccgaggggacaagaatcacaagtcaagaagtcggaatccggcgtgcctaaaggtcaggaagcacaggtgactaaatccgggctggtcgtcctcaaggggcaagaagcccaagttgagaagtccgaaatgggagtgccaaggagacaggaatcccaggttaaaaaaagccagtctggggtttctaagggtcaagaagcccaagtgaaaaaacgtgaaagcgttgtgttgaagggccaggaggcccaagttgagaaaagcgagctgaaagtgccaaaaggacaggaagggcaagtagagaaaactgaagccgacgttcccaaagagcaagaggtgcaagagaaaaaatccgaagctggggttctgaagggacctgaaagccaggtcaagaatacagaagtgagtgtcccagagacactcgaaagccaggtgaaaaagtctgagtccggcgtgctgaaaggtcaggaggcccaggaaaagaaagaatcattcgaggataagggaaataacgataaagaaaaggaaagggatgccgagaaggaccccaacaaaaaggagaaaggcgacaaaaatacaaaaggcgacaagggcaaagataaagtcaagggcaaacgggaatcagaaataaacggtgagaaatccaaaggctctaaacgggcaaaagcgaacactggcagaaagtataacaaaaaggtggaggagtag

SEQ ID NO: 344216 - DNA, 1689 bp, Artificial Sequence
  derived and/or modified sequence
atgacagtcctggagatcaccctagcggtcatcctaacactcctgggcctcgctatactcgccatcctcctaacccggtgggccagacgtaagcaatcagaaatgtacatctcccgctactccagcgagcagtctgctcgcttattggactacgaggacggcaggggcagccggcacgcttactccacgcagtctgacacttcttacgacaaccgcgagcggagtaagcgggactacaccccttctaccaactcactcgctctcagccgaagcagcattgctctccctcaggggtctatgtcaagcataaagtgtctccagaccaccgaggagcctccttccagaaccgccggtgctatgatgcaatttacagcgccaataccgggagccactggccctttcaagttgagccaaaaaacgatcgtgcagactctcggccctattgtgcagtatcctgggtccaatgtgaggagccatccccatacaatcacaggtccaccctcagccccaagaggtcccccaatggccccaataattatcagccagcggactgcttctcagctcgcagcccctatccggattccgcaggtacataccatggactcctccgggaaaatcacactgactcccgtggtgattctcaccgggtatatggatgaggagttagcaaaaaagtcatgttctaagattcagatcctgaaatgtggaggcaccgcaagatcccagaattcacgcgaggaaaacaaggaggccctgaaaaatgacattatctttaccaatagtgtggagagcttgaagagtgcccacatcaaggagccagaaagagaaggcaaagggacggacctggagaaggataagatcggcatggaagtgaaagtggattccgatgcgggtatacccaagaggcaggagacgcagcttaagatcagtgagatgtctgtgcctcagggccaaggtgcgcagattaagaagtcggtatctgacgtaccaagggggcaggaatctcaggtaaagaaaagtgaatctggagtgcccaaaggccaggaagcccaggtgactaagtctggcctggtcgtgttgaaaggtcaagaggcccaggtcgagaagagcgagatgggcgtgccacggcgtcaagagtcgcaggtgaagaagagccagtctggtgttagcaagggccaggaggctcaggtgaaacagagggagtcagtggtgctaaaggggcaggaggctcaagtagaaaaatccgagctcaaagtcccgaaggggcaggaggggcaggttgaaaagacagaggctgacgttccgaaggagcaggaagttcaagagaaaaaatccgaggccggagtgctcaagggccctgaaagtcaagtgaaaaacaccgaggtatctgtgcccgaaaccttagagtcccaggtgaaaaagtccgagagtggggtgcttaaggggcaggaagcacaagagaaaaaggaatctttcgaggataagggaaacaacgacaaggagaaggaacgcgacgccgagaaagacccgaacaaaaaggaaaaaggtgataaaaacacgaaaggagacaaaggcaaagacaaggttaaaggcaagagagagagcgagatcaacggggagaaatcaaagggttctaaacgagctaaggccaataccgggagaaagtacaacaagaaagttgaagagtag

SEQ ID NO: 344217 - DNA, 1689 bp, Artificial Sequence
  derived and/or modified sequence
atgactgtgctggaaatcacattagctgttatccttacattacttggcctggccatcttggcgatccttcttaccagatgggcgagaaggaagcaaagtgagatgcacataagcaggtattcctcagagcaatctgcaaggctgctggattacgaggacgggaggggaagtcggcacgcttactccactcagagcgatacctcgtgtgacaatagggaacggtcgaagcgagattatactccatctaccaatagccttgcactgtctaggtccagcattgcactgccacagggctctatgagcagcattaaatgcttacagactaccgaagaactcccgagtcgtactgccggtgccatgatgcagtttaccgccccaattcccggtgctacaggcccaattaaactttctcagaagacgatcgtgcagactccaggcccaatcgtccagtacccaggcccaaatgtaagatcccacccccacacaatcacaggccctccctctgccccaaggggtccccctatggcgcctatcatcatatctcagagaactgcatcgcagctggcggcacctattaggattcctcaagtccacaccatggattccagtggtaagatcaccctgaccccagttgtgattctcactggctacatggacgaggagcttgccaaaaagccatgctccaaaatccaaattctaaaatgtggtggaaccgcccgaagtcagaactcgcgcgaagagaataaggaggcattgaagaacgacattatctttaccaattcagtagaatcactgaaatccgctcacatcaaagagccagagcgcgagggcaaaggcaccgacctggaaaaggataagataggaatggaagtgaaagtcgattcagatgcaggaattcccaaaaggcaggagactcagctgaagatatcggaaatgtctattcctcagggccagggtgcccagatcaagaagagcgtctctgacgttccacgtggccaggaaagccaagtgaagaagagcgagagcggcgtccctaagggacaggaggcccaggttactaaaagtgggctggtggtgcttaagggccaagaagcccaggttgaaaagtcagagatgggcgtcccaagacgccaggagtctcaagtgaagaaaagccagtctggagtcagtaaggggcaggaggctcaggtaaaaaaaagagagagcgttgtgttgaaggggcaggaggcacaagtggagaagtccgaattaaaagttccaaaaggccaggaagggcaggtggaaaaaactgaggcggatgtgcctaaggagcaagaagttcaagagaaaaagtctgaggcaggtgttctgaaagggcctgaaagtcaagtcaagaacaccgaggtgtctgtgcccgagacactggaaagtcaggtcaaaaaaagtgagagcggcgtcctaaaaggacaggaggctcaggaaaaaaaggagtcctttgaagacaaaggcaacaacgataaggagaaggagcgtgacgccgagaaagacccaaacaagaaagaaaagggcgacaagaacacaaagggagacaagggaaaggataaggtcaaaggaaaaagagaaagcgaaattaacggagagaagtctaagggaagtaaaagggccaaagctaatacgggccgaaaatataataagaaggtggaggagtag

SEQ ID NO: 344218 - protein, 241 aa, Artificial Sequence
  derived and/or modified sequence
  misc_feature (1)..(1): Xaa can be any naturally occurring amino acid
XPDGRLLRGHNQYAYDGKDYIALNEDLRSWTAADTAAQITQRKWEAARVAEQDRAYLEGTCVEWLRRYLENGKDTLERADPPKTHVTHHPISDHEATLRCWALGFYPAEITLTWQRDGEDQTQDTELVETRPAGDRTFQKWAAVVVPSGEEQRYTCHVQHEGLPKPLTLRWEPSSQSTVPIVGIVAGLAVLAVVVIGAVVAAVMCRRKSSGHFLPTGGKGGSYSQAACSDSAQGSDVSLTA

SEQ ID NO: 344219 - protein, 246 aa, Artificial Sequence
  derived and/or modified sequence
MASAGRSEGTAGGGAGPEEPRREEGRAGLSPSSPPGSHSMRYFDTAMSRPGRGEPRFISVGYVDDTQFVRFDSDAASPREEPRAPWIEQEGPEYWDRNTQIFKTNTQTDRESLRNLRGYYNQSEAGSHTLQSMYGCDVGPDGRLLRGHNQYAYDGKDYIALNEDLRSWTAADTAAQITQRKWEAARVAEQDRAYLEGTCVEWLRRYLENGKDTLERADPPKTHVTHHPISDHEATLRCWALGFYPA

SEQ ID NO: 344220 - protein, 362 aa, Artificial Sequence
  derived and/or modified sequence
MLVMAPRTVLLLLSAALALTETWAGSHSMRYFDTAMSRPGRGEPRFISVGYVDDTQFVRFDSDAASPREEPRAPWIEQEGPEYWDRNTQIFKTNTQTDRESLRNLRGYYNQSEAGSHTLQSMYGCDVGPDGRLLRGHNQYAYDGKDYIALNEDLRSWTAADTAAQITQRKWEAARVAEQDRAYLEGTCVEWLRRYLENGKDTLERADPPKTHVTHHPISDHEATLRCWALGFYPAEITLTWQRDGEDQTQDTELVETRPAGDRTFQKWAAVVVPSGEEQRYTCHVQHEGLPKPLTLRWEPSSQSTVPIVGIVAGLAVLAVVVIGAVVAAVMCRRKSSGGKGGSYSQAACSDSAQGSDVSLTA

SEQ ID NO: 344221 - protein, 224 aa, Artificial Sequence
  derived and/or modified sequence
MLVMAPRTVLLLLSAALALTETWAGSHSMRYFDTAMSRPGRGEPRFISVGYVDDTQFVRFDSDAASPREEPRAPWIEQEGPEYWDRNTQIFKTNTQTDRESLRNLRGYYNQSEAGSHTLQSMYGCDVGPDGRLLRGHNQYAYDGKDYIALNEDLRSWTAADTAAQITQRKWEAARVAEQDRAYLEGTCVEWLRRYLENGKDTLERADQEQKSLFPAQRLELSNE

SEQ ID NO: 344222 - protein, 241 aa, Artificial Sequence
  derived and/or modified sequence
MYGCDVGPDGRLLRGHNQYAYDGKDYIALNEDLRSWTAADTAAQITQRKWEAARVAEQDRAYLEGTCVEWLRRYLENGKDTLERADPPKTHVTHHPISDHEATLRCWALGFYPAEITLTWQRDGEDQTQDTELVETRPAGDRTFQKWAAVVVPSGEEQRYTCHVQHEGLPKPLTLRWEPSSQSTVPIVGIVAGLAVLAVVVIGAVVAAVMCRRKSSGGKGGSYSQAACSDSAQGSDVSLTA

SEQ ID NO: 344223 - DNA, 726 bp, Artificial Sequence
  derived and/or modified sequence
tgacccgacggcagactgctgagaggccacaaccagtacgcctacgacggcaaggactacatcgccctgaacgaggacctgagaagctggaccgccgccgacaccgccgcccagatcacccagagaaagtgggaggccgccagagtggccgagcaggacagagcctacctggagggcacctgcgtggagtggctgagaagatacctggagaacggcaaggacaccctggagagagccgacccccccaagacccacgtgacccaccaccccatcagcgaccacgaggccaccctgagatgctgggccctgggcttctaccccgccgagatcaccctgacctggcagagagacggcgaggaccagacccaggacaccgagctggtggagaccagacccgccggcgacagaaccttccagaagtgggccgccgtggtggtgcccagcggcgaggagcagagatacacctgccacgtgcagcacgagggcctgcccaagcccctgaccctgagatgggagcccagcagccagagcaccgtgcccatcgtgggcatcgtggccggcctggccgtgctggccgtggtggtgatcggcgccgtggtggccgccgtgatgtgcagaagaaagagcagcggccacttcctgcccaccggcggcaagggcggcagctacagccaggccgcctgcagcgacagcgcccagggcagcgacgtgagcctgaccgcctag

SEQ ID NO: 344224 - DNA, 1089 bp, Artificial Sequence
  derived and/or modified sequence
atgctggtgatggcccccagaaccgtgctgctgctgctgagcgccgccctggccctgaccgagacctgggccggcagccacagcatgagatacttcgacaccgccatgagcagacccggcagaggcgagcccagattcatcagcgtgggctacgtggacgacacccagttcgtgagattcgacagcgacgccgccagccccagagaggagcccagagccccctggatcgagcaggagggccccgagtactgggacagaaacacccagatcttcaagaccaacacccagaccgacagagagagcctgagaaacctgagaggctactacaaccagagcgaggccggcagccacaccctgcagagcatgtacggctgcgacgtgggccccgacggcagactgctgagaggccacaaccagtacgcctacgacggcaaggactacatcgccctgaacgaggacctgagaagctggaccgccgccgacaccgccgcccagatcacccagagaaagtgggaggccgccagagtggccgagcaggacagagcctacctggagggcacctgcgtggagtggctgagaagatacctggagaacggcaaggacaccctggagagagccgacccccccaagacccacgtgacccaccaccccatcagcgaccacgaggccaccctgagatgctgggccctgggcttctaccccgccgagatcaccctgacctggcagagagacggcgaggaccagacccaggacaccgagctggtggagaccagacccgccggcgacagaaccttccagaagtgggccgccgtggtggtgcccagcggcgaggagcagagatacacctgccacgtgcagcacgagggcctgcccaagcccctgaccctgagatgggagcccagcagccagagcaccgtgcccatcgtgggcatcgtggccggcctggccgtgctggccgtggtggtgatcggcgccgtggtggccgccgtgatgtgcagaagaaagagcagcggcggcaagggcggcagctacagccaggccgcctgcagcgacagcgcccagggcagcgacgtgagcctgaccgcctag

SEQ ID NO: 344225 - DNA, 726 bp, Artificial Sequence
  derived and/or modified sequence
atgtacggctgcgacgtgggccccgacggcagactgctgagaggccacaaccagtacgcctacgacggcaaggactacatcgccctgaacgaggacctgagaagctggaccgccgccgacaccgccgcccagatcacccagagaaagtgggaggccgccagagtggccgagcaggacagagcctacctggagggcacctgcgtggagtggctgagaagatacctggagaacggcaaggacaccctggagagagccgacccccccaagacccacgtgacccaccaccccatcagcgaccacgaggccaccctgagatgctgggccctgggcttctaccccgccgagatcaccctgacctggcagagagacggcgaggaccagacccaggacaccgagctggtggagaccagacccgccggcgacagaaccttccagaagtgggccgccgtggtggtgcccagcggcgaggagcagagatacacctgccacgtgcagcacgagggcctgcccaagcccctgaccctgagatgggagcccagcagccagagcaccgtgcccatcgtgggcatcgtggccggcctggccgtgctggccgtggtggtgatcggcgccgtggtggccgccgtgatgtgcagaagaaagagcagcggcggcaagggcggcagctacagccaggccgcctgcagcgacagcgcccagggcagcgacgtgagcctgaccgcctag

SEQ ID NO: 344226 - DNA, 726 bp, Artificial Sequence
  derived and/or modified sequence
taacccgacggcagactacttcgtggccataaccagtacgcttacgacggaaaggattatatagcgttaaacgaagatctccggtcgtggacggcagccgataccgccgcccagatcacacagaggaaatgggaggcagccagagttgcagagcaggatcgcgcgtatctggaggggacttgcgtggagtggcttcgtcgctacttagagaacggcaaagacaccctcgagcgggctgatcctcctaagacccacgtgacgcaccacccaatttccgatcacgaagcaacacttcggtgctgggctctcgggttctatcccgctgaaataacccttacatggcagagagacggcgaggaccaaacacaggatactgagctggtggagactcggcccgcgggcgatcgaacctttcagaaatgggcagctgtagttgttcccagtggcgaagagcagcgatatacttgtcacgtccagcatgaggggttacccaagcccctgactctgcgctgggagccatcctcccagtccaccgttcctattgtcgggattgtggctggcctcgccgtgctcgcagttgttgtgatcggtgccgtggtcgccgcggttatgtgcaggcggaagtccagcggccattttctccccaccggggggaagggaggctcttatagtcaggcagcctgtagtgatagcgcacagggctcggatgtctctctcaccgcgtag

SEQ ID NO: 344227 - DNA, 1089 bp, Artificial Sequence
  derived and/or modified sequence
atgttagtgatggctcccagaaccgtcttactactactaagcgccgctctcgccctgactgaaacgtgggctggatcccacagtatgaggtatttcgatacagcgatgagtagacctggtaggggcgagccacggtttatctctgtgggctatgtcgacgacacccagttcgtgagattcgacagcgacgccgctagcccgcgggaagagccaagagcgccttggatcgaacaggagggccctgagtactgggataggaatactcagattttcaaaacaaatactcagacggaccgtgagtcgcttcgaaacctgagagggtactacaaccagtctgaagctggaagccacacattgcagtccatgtatggctgtgatgtcggccccgatggacggctgctgaggggtcacaatcaatatgcctacgatgggaaggattacatcgcgctcaacgaggatctccggtcttggactgcagccgacactgccgcacagattacccagcgaaagtgggaagctgccagggtcgccgagcaggacagagcatacctcgagggcacctgtgtggagtggttgcggaggtatctggagaatggtaaggacacccttgaacgcgccgacccccctaagacccatgtcacacaccacccaatcagcgatcacgaggctacacttcggtgttgggctctgggtttttatcctgccgaaatcactctgacgtggcagcgagacggcgaagaccaaactcaggacaccgagcttgtggagactagacctgctggcgacagaacctttcagaagtgggccgccgtcgtcgtgcctagtggagaagagcagagatacacttgccacgtgcaacatgagggactgcccaagcctctgactctgcgatgggaacccagcagccagagcaccgtgccaattgtggggatcgttgccggcttggctgttttagccgttgttgtgattggtgccgtcgtcgccgccgtcatgtgtcgccggaagtcttcaggcggaaaagggggatcgtactcccaggcagcttgttcagacagcgctcagggaagcgacgtttcgctaactgcatag

SEQ ID NO: 344228 - DNA, 726 bp, Artificial Sequence
  derived and/or modified sequence
atgtatggctgcgatgtcggtccagatggaagacttctgcgaggacacaatcaatatgcatatgacggaaaagactacatcgcgcttaacgaggacttgcgatcatggaccgccgccgacactgccgctcagattacccagaggaaatgggaggctgcccgggtagcggaacaagatcgcgcctacctggagggcacatgcgtagaatggctgcggcggtacctggagaacggaaaagatactttggagcgtgcagaccctcctaagacacatgtgacacaccacccaatatccgaccacgaagccacgttaagatgctgggccctgggcttttacccggctgagataacactgacctggcagcgtgatggcgaggaccagacacaagacaccgagctcgtagagacaagaccggcgggcgaccggactttccagaaatgggctgccgtggttgtccctagcggcgaggagcagcgctacacttgccacgtgcagcacgagggcctgcccaaacccctgactctgagatgggagccatcaagtcagagcacggttcccatcgtaggaattgtcgccgggctcgctgtgctcgccgtggtcgtaattggcgccgtagtcgctgcagtaatgtgcaggcgcaagtcctccggggggaagggaggttcttactctcaggcagcctgttccgacagcgcccaaggcagcgacgtgtccttaacagcatag

SEQ ID NO: 344229 - DNA, 1154 bp, Artificial Sequence
  derived and/or modified sequence
ggccggacgggcgcctcctccgcgggcataaccagtacgcctacgacggcaaggattacatcgccctgaacgaggacctgcgctcctggaccgcggcggacaccgcggctcagatcacccagcgcaagtgggaggcggcccgtgtggcggagcaggacagagcctacctggagggcacgtgcgtggagtggctccgcagatacctggagaacgggaaggacacgctggagcgcgcggaccccccaaagacacacgtgacccaccaccccatctctgaccatgaggccaccctgaggtgctgggccctgggcttctaccctgcggagatcacactgacctggcagcgggatggcgaggaccaaactcaggacactgagcttgtggagaccagaccagcaggagatagaaccttccagaagtgggcagctgtggtggtgccttctggagaagagcagagatacacatgccatgtacagcatgaggggctgccgaagcccctcaccctgagatgggagccgtcttcccagtccaccgtccccatcgtgggcattgttgctggcctggctgtcctagcagttgtggtcatcggagctgtggtcgctgctgtgatgtgtaggaggaagagctcagggcattttcttcccacaggtggaaaaggagggagctactctcaggctgcgtgcagcgacagtgcccagggctctgatgtgtctctcacagcttgaaaagcctgagacagctgtcttgtgagggactgagatgcaggatttcttcacgcctcccctttgtgacttcaagagcctctggcatctctttctgcaaaggcacctgaatgtgtctgcgtccctgttagcataatgtgaggaggtggagagacagcccacccttgtgtccactgtgacccctgttcccatgctgacctgtgtttcctccccagtcatctttcttgttccagagaggtggggctggatgtctccatctctgtctcaactttacgtgcactgagctgcaacttcttacttccctactgaaaataagaatctgaatataaatttgttttctcaaatatttgctatgagaggttgatggattaattaaataagtcaattcctggaatttgagagagcaaataaagacctgagaaccttccagaa

SEQ ID NO: 344230 - DNA, 1605 bp, Artificial Sequence
  derived and/or modified sequence
tctagagaagccaatcagcgtcgccggggtcccagttctaaagtccccacgcacccacccggactcagagtctcctcagacgccgagatgctggtcatggcgccccgaaccgtcctcctgctgctctcggcggccctggccctgaccgagacctgggccggctcccactccatgaggtatttcgacaccgccatgtcccggcccggccgcggggagccccgcttcatctcagtgggctacgtggacgacacgcagttcgtgaggttcgacagcgacgccgcgagtccgagagaggagccgcgggcgccgtggatagagcaggaggggccggagtattgggaccggaacacacagatcttcaagaccaacacacagactgaccgagagagcctgcggaacctgcgcggctactacaaccagagcgaggccgggtctcacaccctccagagcatgtacggctgcgacgtggggccggacgggcgcctcctccgcgggcataaccagtacgcctacgacggcaaggattacatcgccctgaacgaggacctgcgctcctggaccgcggcggacaccgcggctcagatcacccagcgcaagtgggaggcggcccgtgtggcggagcaggacagagcctacctggagggcacgtgcgtggagtggctccgcagatacctggagaacgggaaggacacgctggagcgcgcggaccccccaaagacacacgtgacccaccaccccatctctgaccatgaggccaccctgaggtgctgggccctgggcttctaccctgcggagatcacactgacctggcagcgggatggcgaggaccaaactcaggacactgagcttgtggagaccagaccagcaggagatagaaccttccagaagtgggcagctgtggtggtgccttctggagaagagcagagatacacatgccatgtacagcatgaggggctgccgaagcccctcaccctgagatgggagccgtcttcccagtccaccgtccccatcgtgggcattgttgctggcctggctgtcctagcagttgtggtcatcggagctgtggtcgctgctgtgatgtgtaggaggaagagctcaggtggaaaaggagggagctactctcaggctgcgtgcagcgacagtgcccagggctctgatgtgtctctcacagcttgaaaagcctgagacagctgtcttgtgagggactgagatgcaggatttcttcacgcctcccctttgtgacttcaagagcctctggcatctctttctgcaaaggcacctgaatgtgtctgcgtccctgttagcataatgtgaggaggtggagagacagcccacccttgtgtccactgtgacccctgttcccatgctgacctgtgtttcctccccagtcatctttcttgttccagagaggtggggctggatgtctccatctctgtctcaactttacgtgcactgagctgcaacttcttacttccctactgaaaataagaatctgaatataaatttgttttctcaaatatttgctatgagaggttgatggattaattaaataagtcaattcctggaatttgagagagcaaataaagacctgagaaccttccagaa

SEQ ID NO: 344231 - DNA, 1008 bp, Artificial Sequence
  derived and/or modified sequence
agatgctggtcatggcgccccgaaccgtcctcctgctgctctcggcggccctggccctgaccgagacctgggccggctcccactccatgaggtatttcgacaccgccatgtcccggcccggccgcggggagccccgcttcatctcagtgggctacgtggacgacacgcagttcgtgaggttcgacagcgacgccgcgagtccgagagaggagccgcgggcgccgtggatagagcaggaggggccggagtattgggaccggaacacacagatcttcaagaccaacacacagactgaccgagagagcctgcggaacctgcgcggctactacaaccagagcgaggccgggtctcacaccctccagagcatgtacggctgcgacgtggggccggacgggcgcctcctccgcgggcataaccagtacgcctacgacggcaaggattacatcgccctgaacgaggacctgcgctcctggaccgcggcggacaccgcggctcagatcacccagcgcaagtgggaggcggcccgtgtggcggagcaggacagagcctacctggagggcacgtgcgtggagtggctccgcagatacctggagaacgggaaggacacgctggagcgcgcggatcaggagcagaagtccctgttccccgctcagagactcgaactttccaatgaataggagattatcccagaccccccaaagacacacgtgacccaccaccccatctctgaccatgaggccaccctgaggtgctgggccctgggcttctaccctgcggagatcacactgacctggcagcgggatggcgaggaccaaactcaggacactgagcttgtggagaccagaccagcaggagatagaaccttccagaagtgggcagctgtggtggtgccttctggagaagagcagagatacacatgccatgtacagcatgaggggctgccgaagcccctcaccctgagatgggagccgtcttcccagtccaccgtccccatcgtgggcattgttg

SEQ ID NO: 344232 - DNA, 1406 bp, Artificial Sequence
  derived and/or modified sequence
agagtctcctcagacgccgagatgctggtcatggcgccccgaaccgtcctcctgctgctctcggcggccctggccctgaccgagacctgggccggctcccactccatgaggtatttcgacaccgccatgtcccggcccggccgcgggcgccgtggatagagcaggaggggccggagtattgggaccggaacacacagatcttcaagaccaacacacagactgaccgagagagcctgcggaacctgcgcggctactacaaccagagcgaggccgggtctcacaccctccagagcatgtacggctgcgacgtggggccggacgggcgcctcctccgcgggcataaccagtacgcctacgacggcaaggattacatcgccctgaacgaggacctgcgctcctggaccgcggcggacaccgcggctcagatcacccagcgcaagtgggaggcggcccgtgtggcggagcaggacagagcctacctggagggcacgtgcgtggagtggctccgcagatacctggagaacgggaaggacacgctggagcgcgcggaccccccaaagacacacgtgacccaccaccccatctctgaccatgaggccaccctgaggtgctgggccctgggcttctaccctgcggagatcacactgacctggcagcgggatggcgaggaccaaactcaggacactgagcttgtggagaccagaccagcaggagatagaaccttccagaagtgggcagctgtggtggtgccttctggagaagagcagagatacacatgccatgtacagcatgaggggctgccgaagcccctcaccctgagatgggagccgtcttcccagtccaccgtccccatcgtgggcattgttgctggcctggctgtcctagcagttgtggtcatcggagctgtggtcgctgctgtgatgtgtaggaggaagagctcaggtggaaaaggagggagctactctcaggctgcgtgcagcgacagtgcccagggctctgatgtgtctctcacagcttgaaaagcctgagacagctgtcttgtgagggactgagatgcaggatttcttcacgcctcccctttgtgacttcaagagcctctggcatctctttctgcaaaggcacctgaatgtgtctgcgtccctgttagcataatgtgaggaggtggagagacagcccacccttgtgtccactgtgacccctgttcccatgctgacctgtgtttcctccccagtcatctttcttgttccagagaggtggggctggatgtctccatctctgtctcaactttacgtgcactgagctgcaacttcttacttccctactgaaaataagaatctgaatataaatttgttttctcaaatatttgctatgagaggttgatggattaattaaataagtcaattcct

SEQ ID NO: 344233 - DNA, 726 bp, Artificial Sequence
  derived and/or modified sequence
tgaccagatggccgcctgctgcggggccacaaccagtatgcctatgatggcaaggactacatcgccctgaatgaagacctgcgctcctggacagctgctgacacagctgcccagatcacccagaggaagtgggaggccgcccgggtggccgagcaggaccgggcctacctggagggcacctgtgtggagtggctgcggcgctacctggagaatggcaaggacaccctggagagagctgacccccccaagacccacgtgacccaccaccccatcagtgaccacgaggccaccctgcgctgctgggccctgggcttctacccagctgagatcaccctgacctggcagagagatggagaggaccagacccaggacacagagctggtggagaccaggcctgctggggacaggaccttccagaagtgggccgctgtggtggtgcccagcggggaggagcagcgctacacctgccacgtgcagcacgagggcctgcccaagcccctgaccctgcgctgggagcccagcagccagagcacagtgcccatcgtgggcatcgtggccggcctggccgtgctggccgtggtggtgattggagctgtggtggccgctgtgatgtgcaggaggaagagcagcggccacttcctgcccaccggcggcaaaggaggcagctacagccaggccgcctgcagcgacagcgcccagggcagtgatgtgtccctgacagcctag

SEQ ID NO: 344234 - DNA, 1089 bp, Artificial Sequence
  derived and/or modified sequence
atgctggtgatggcccccaggacagtgctgctgctgctgtctgctgccctggccctgacagagacctgggccggcagccacagcatgagatactttgacacagccatgagcaggcctggccgcggggagccccgcttcatctctgtgggctacgtggatgacacccagtttgtgcgctttgacagtgatgctgccagcccccgggaggagccccgggccccctggattgagcaggagggccctgagtactgggacaggaacacccagatcttcaagaccaacacccagacagaccgggagagcctgaggaacctgcggggctactacaaccagagcgaggccggcagccacaccctgcagagcatgtatggctgtgatgtgggcccagatggccgcctgctgcggggccacaaccagtatgcctatgatggcaaggactacatcgccctgaatgaagacctgcgctcctggacagctgctgacacagctgcccagatcacccagaggaagtgggaggccgcccgggtggccgagcaggaccgggcctacctggagggcacctgtgtggagtggctgcggcgctacctggagaatggcaaggacaccctggagagagctgacccccccaagacccacgtgacccaccaccccatcagtgaccacgaggccaccctgcgctgctgggccctgggcttctacccagctgagatcaccctgacctggcagagagatggagaggaccagacccaggacacagagctggtggagaccaggcctgctggggacaggaccttccagaagtgggccgctgtggtggtgcccagcggggaggagcagcgctacacctgccacgtgcagcacgagggcctgcccaagcccctgaccctgcgctgggagcccagcagccagagcacagtgcccatcgtgggcatcgtggccggcctggccgtgctggccgtggtggtgattggagctgtggtggccgctgtgatgtgcaggaggaagagcagcggcggcaagggcggcagctacagccaggccgcctgcagcgacagcgcccagggcagtgatgtgtccctgacagcctag

SEQ ID NO: 344235 - DNA, 726 bp, Artificial Sequence
  derived and/or modified sequence
atgtatggctgtgatgtgggcccagatggccgcctgctgcggggccacaaccagtatgcctatgatggcaaggactacatcgccctgaatgaagacctgcgctcctggacagctgctgacacagctgcccagatcacccagaggaagtgggaggccgcccgggtggccgagcaggaccgggcctacctggagggcacctgtgtggagtggctgcggcgctacctggagaatggcaaggacaccctggagagagctgacccccccaagacccacgtgacccaccaccccatcagtgaccacgaggccaccctgcgctgctgggccctgggcttctacccagctgagatcaccctgacctggcagagagatggagaggaccagacccaggacacagagctggtggagaccaggcctgctggggacaggaccttccagaagtgggccgctgtggtggtgcccagcggggaggagcagcgctacacctgccacgtgcagcacgagggcctgcccaagcccctgaccctgcgctgggagcccagcagccagagcacagtgcccatcgtgggcatcgtggccggcctggccgtgctggccgtggtggtgattggagctgtggtggccgctgtgatgtgcaggaggaagagcagcggcggcaaaggaggcagctacagccaggccgcctgcagcgacagcgcccagggcagtgatgtgtccctgacagcctag

SEQ ID NO: 344236 - DNA, 726 bp, Artificial Sequence
  derived and/or modified sequence
tgacccgacggccggctgctgcggggccacaaccagtacgcctacgatgggaaagattacattgccttaaacgaagatttgcggtcgtggacagctgccgacactgctgcgcagatcacccagcgaaaatgggaggcggctagggtcgcagagcaggaccgggcgtacttagaagggacctgtgtggagtggttgagacggtatctcgagaacgggaaagacactctggagcgcgccgacccccctaagacgcatgttacacaccaccccatctccgatcacgaggccacattaaggtgctgggcactggggttctatcctgcagagataaccctgacatggcagcgagacggagaggaccagacccaagacactgaattagtggagactaggccagccggcgatcggacattccagaaatgggccgccgtcgtagtaccatccggggaggagcagcgctacacctgccatgttcagcacgagggactgcccaagcccctcacgctccgctgggaaccaagcagtcagagcactgttcctattgtcggcatagtagcagggttagccgtgttggcagtcgtggttataggagcagtcgtcgcggcagtcatgtgtcggcgcaagtctagcggtcacttcttaccaacaggcggcaagggcggctcctatagtcaggccgcatgttcagacagcgcccaggggagcgatgtgagtctgaccgcttag

SEQ ID NO: 344237 - DNA, 1089 bp, Artificial Sequence
  derived and/or modified sequence
atgctggtgatggccccccggaccgtgctgctgctgctgagcgccgcactggcgctgacagaaacctgggctgggtcccattccatgaggtatttcgacaccgccatgtcccggcccgggcgtggagaacccagatttatttccgtagggtatgttgacgacacacaattcgtgaggttcgatagcgacgctgcatcaccacgggaggaacctcgcgctccttggattgaacaagagggaccagaatactgggaccgcaacacccagatcttcaagaccaatacccaaacggaccgcgaatcactgcgcaatctgcgaggttactacaaccagtccgaagccggcagccacacgctccagtccatgtacgggtgcgacgtcggtcctgatggccggcttctgaggggacacaaccagtacgcctatgatggcaaagactacatcgccttgaatgaggatctgcggtcatggacagcagcagacacagctgcacagatcactcagagaaaatgggaggctgccagggttgcggaacaggaccgcgcctatctggaaggaacatgcgtcgagtggttgagacgatacctggaaaacgggaaggacacattggagcgtgcagaccctcctaagacgcacgtgactcaccaccctatttccgatcacgaggccaccctgcgctgttgggccctgggtttttaccccgcggaaatcactctgacatggcagcgcgacggggaggaccaaacgcaggatactgaactggttgagacccgtcccgccggggaccgcacattccagaagtgggcggctgtggtcgtgcctagcggcgaggaacagagatacacgtgccatgtgcaacatgagggactcccaaagcccttgacccttcgttgggaaccctcatcccagagtacagttcctatagttggcatcgtggccggcttggctgtgctggcagtggtcgttattggcgccgttgtcgccgctgtcatgtgccgccgcaagtcttcaggcggaaagggaggctcctactctcaggctgcctgctcagatagcgcccagggtagcgacgtgtccctcaccgcttag

SEQ ID NO: 344238 - DNA, 726 bp, Artificial Sequence
  derived and/or modified sequence
atgtacggctgcgacgtgggccccgacggccggctgctgcggggccacaaccagtacgcctatgacggtaaggactacattgctttaaatgaggatctgcgcagttggaccgccgcagatactgccgctcagattacccagcgaaagtgggaggccgcgagagtggccgagcaggacagagcttatctggaaggtacttgtgttgagtggctgaggagataccttgagaacggaaaggacacgctcgagagagctgatccgccaaagacccatgtcactcaccatccaatcagcgaccatgaggcaacactgcgctgctgggcattagggttttatccagccgagattacacttacttggcagagagacggcgaggaccagacccaggataccgaattggttgagactagacctgctggtgaccggacttttcagaaatgggcggctgtcgttgtgccctccggagaggagcagcgttacacatgccatgtgcagcatgaaggcctgcccaagcccttgaccctgagatgggaacccagctcccagtctaccgtacccatcgtgggcattgtcgcaggtctcgccgtgttagctgtagtagtcataggtgcagtggtagccgccgtcatgtgccgccgaaagtcttctgggggtaaaggcggatcctactctcaggccgcttgctctgacagcgcacagggctcagacgtgtccctgacagcttag

SEQ ID NO: 344239 - DNA, 726 bp, Artificial Sequence
  derived and/or modified sequence
taaccagacgggaggctgttgagagggcataatcaatatgcttatgacggaaaggattacatcgccctcaatgaggatctgaggtcctggacggctgctgatacagctgcacagataacacagcgaaagtgggaggcagctcgggtagccgagcaggatcgcgcatatcttgagggtacttgcgtagagtggctgcgacgctacttggaaaatggaaaggatactctggagcgggctgaccccccaaaaacccacgtgacccaccacccaatctctgaccacgaggccacactgcgatgctgggccctgggtttctatcccgctgagattactctaacgtggcagcgggatggcgaggaccagactcaggataccgagctagtagagacccgcccagccggtgacaggactttccagaaatgggccgcagtagtcgttccgtcaggcgaagagcagcggtatacttgtcatgtgcagcacgaaggcctgccaaagccactgacactgcgctgggagcctagctctcaatccacagttcccattgtgggaattgtcgccggactcgcggtgcttgctgtcgtcgtgattggcgctgtggtcgccgctgtgatgtgtaggcgaaaatcttctgggcactttctgccgacaggtggcaaaggcggaagctatagccaggccgcatgctccgatagtgcacaggggtcagatgtgtctttgactgcctag

SEQ ID NO: 344240 - DNA, 1089 bp, Artificial Sequence
  derived and/or modified sequence
atgctagtgatggctccgagaacggtgctgcttttattatccgctgccctcgctttgacagaaacctgggcgggatctcactccatgcgctactttgatactgcaatgtctagaccaggaagaggcgaaccccgattcatctcggtagggtatgtagatgacactcaattcgtaagattcgattctgacgccgcaagcccacgtgaggagccacgtgctccatggatcgaacaggaaggcccagaatactgggatcggaatacccaaattttcaaaaccaatacccagacagatcgggagagtctccgcaacctgcgaggatactacaatcaaagtgaggctggttctcacaccctgcagtccatgtatgggtgtgacgtcggacccgatgggaggctcttacgagggcacaatcaatatgcgtatgatggtaaggactacatcgcactgaacgaggatttgcgttcctggactgccgcagacaccgctgcacagatcacccaaaggaaatgggaggcggctcgtgttgcagaacaggaccgtgcgtacctggagggcacatgtgtggagtggcttaggcgctaccttgaaaacggaaaggataccctggaacgagccgaccctcccaagacgcatgttacacatcaccctataagtgaccacgaggcaactctacgctgttgggccctgggtttctatcctgccgagatcacattgacctggcagagggacggcgaggaccagacccaggacaccgaactggtggagactcggccagctggcgatcggacatttcagaaatgggccgctgttgtggtcccctcaggtgaggaacagagatacacctgccacgtccagcatgagggtctgcccaagcccttgacactccgctgggagccctcatcacagtcgacagttccaattgtgggcattgtggctggcctggctgtattggcagtggttgtgattggagcggtcgtcgccgctgtgatgtgtagaagaaaatcctcgggtggtaaaggagggtcatactcgcaggctgcctgttctgactccgctcaggggagtgacgtgagccttaccgcgtag

SEQ ID NO: 344241 - DNA, 726 bp, Artificial Sequence
  derived and/or modified sequence
atgtacggctgtgacgtcgggccagatgggcgactgttgcgtggccataaccagtacgcctacgacggaaaggactatatcgctctaaatgaagacttacggtcgtggactgccgcagataccgcagcccagatcactcagaggaagtgggaagccgcacgtgtagctgaacaggaccgagcctatctggaaggaacttgcgtggagtggctgaggcggtatttagaaaacgggaaggacacactggaaagagcggatcctccaaagacacacgtaactcaccatcctatctcagatcatgaggccactctgcggtgctgggcgctgggtttttaccctgcggagatcacattaacctggcagcgggacggcgaggaccagacccaggacaccgagctagtcgaaacccggcctgctggcgaccgaacttttcaaaaatgggccgcagttgtagtgccctctggcgaggaacaacggtacacttgccatgtgcagcacgagggcctgcccaagcccctgactctccgctgggaaccgtcatctcagtccaccgtgcccatagtcggaattgtggctgggctggcagtcttagcagtggtggtgataggtgctgttgtagctgccgtcatgtgtcggaggaaaagttcgggcggtaagggcggatcttattcacaagctgcctgtagtgatagtgcacaggggtccgatgtctctctaacggcgtag

SEQ ID NO: 344242 - DNA, 741 bp, Artificial Sequence
  derived and/or modified sequence
atggccagcgccggcagaagcgagggcaccgccggcggcggcgccggccccgaggagcccagaagagaggagggcagagccggcctgagccccagcagcccccccggcagccacagcatgagatacttcgacaccgccatgagcagacccggcagaggcgagcccagattcatcagcgtgggctacgtggacgacacccagttcgtgagattcgacagcgacgccgccagccccagagaggagcccagagccccctggatcgagcaggagggccccgagtactgggacagaaacacccagatcttcaagaccaacacccagaccgacagagagagcctgagaaacctgagaggctactacaaccagagcgaggccggcagccacaccctgcagagcatgtacggctgcgacgtgggccccgacggcagactgctgagaggccacaaccagtacgcctacgacggcaaggactacatcgccctgaacgaggacctgagaagctggaccgccgccgacaccgccgcccagatcacccagagaaagtgggaggccgccagagtggccgagcaggacagagcctacctggagggcacctgcgtggagtggctgagaagatacctggagaacggcaaggacaccctggagagagccgacccccccaagacccacgtgacccaccaccccatcagcgaccacgaggccaccctgagatgctgggccctgggcttctaccccgcctag

SEQ ID NO: 344243 - DNA, 675 bp, Artificial Sequence
  derived and/or modified sequence
atgctggtgatggcccccagaaccgtgctgctgctgctgagcgccgccctggccctgaccgagacctgggccggcagccacagcatgagatacttcgacaccgccatgagcagacccggcagaggcgagcccagattcatcagcgtgggctacgtggacgacacccagttcgtgagattcgacagcgacgccgccagccccagagaggagcccagagccccctggatcgagcaggagggccccgagtactgggacagaaacacccagatcttcaagaccaacacccagaccgacagagagagcctgagaaacctgagaggctactacaaccagagcgaggccggcagccacaccctgcagagcatgtacggctgcgacgtgggccccgacggcagactgctgagaggccacaaccagtacgcctacgacggcaaggactacatcgccctgaacgaggacctgagaagctggaccgccgccgacaccgccgcccagatcacccagagaaagtgggaggccgccagagtggccgagcaggacagagcctacctggagggcacctgcgtggagtggctgagaagatacctggagaacggcaaggacaccctggagagagccgaccaggagcagaagagcctgttccccgcccagagactggagctgagcaacgagtag

SEQ ID NO: 344244 - DNA, 741 bp, Artificial Sequence
  derived and/or modified sequence
atggccagcgctgggcgctccgagggaacggctggcggaggcgcaggtcccgaggagccccgtcgcgaggagggccgagcaggtctgtctccgtcctctcctccaggaagccattctatgcgatacttcgacaccgccatgtcaagaccagggcgcggggaacctaggtttatctccgtggggtatgtagacgatactcaatttgtaagattcgatagcgatgctgctagtcctagggaggagccgagggccccctggatcgagcaggaaggtcccgagtactgggacagaaacacacaaatttttaagacaaacacccagaccgatagggagagtttacggaacctgagaggatactacaatcaaagtgaggcgggctcacacactctgcaaagcatgtatgggtgcgatgttggccctgacgggagattgttgagaggccacaaccagtacgcatatgacgggaaagattacatcgcccttaacgaggatttgagaagctggaccgccgccgacacagctgctcaaatcacccagaggaagtgggaggccgcacgcgtggccgagcaagatcgtgcatacctcgagggaacctgtgtggagtggctccggcgctacctagagaacggtaaggacactctggagcgggcggatcctcctaaaacacatgtgacccaccaccccatcagcgaccacgaggccactttgcgatgttgggctctgggattttatcccgcttag

SEQ ID NO: 344245 - DNA, 675 bp, Artificial Sequence
  derived and/or modified sequence
atgctcgtgatggctccacgaaccgtattactgctgctgtctgcggcgctcgctctgaccgaaacttgggcaggaagtcactccatgagatattttgatactgcgatgtcacgaccaggtaggggcgaaccacgctttatatcagtgggttacgtggacgatactcagtttgtgcgctttgacagtgatgccgccagcccacgggaagagcccagagcaccatggatcgagcaggaaggccccgaatattgggacagaaacacccaaatctttaaaactaatacacagaccgaccgcgagtctcttaggaacttacgcggatattacaatcagagtgaggctggctctcataccctgcaatccatgtacggatgcgacgtgggccctgacggccgcctcttgagaggacacaatcaatacgcttatgacggcaaggactatattgcattgaatgaggaccttaggtcctggactgccgctgatacagctgcccagatcactcaacgcaagtgggaggcagccagagtcgcagaacaggatagggcttatttagaaggcacttgtgtggaatggttacggcgttatttggaaaacgggaaggacacactagagcgtgcagaccaagaacagaaaagtctgttcccagcccagcggctggagctcagtaacgagtag

SEQ ID NO: 344246 - DNA, 863 bp, Artificial Sequence
  derived and/or modified sequence
cccggactcagagtctcctcagacgccgagatgctggtcatggcgccccgaaccgtcctcctgctgctctcggcggccctggccctgaccgagacctgggccggtgagtgcgggtcgggagggaaatggcctctgccgggaggagcgaggggaccgcaggcgggggcgcaggacctgaggagccgcgccgggaggagggtcgggcgggtctcagcccctcctcgcccccaggctcccactccatgaggtatttcgacaccgccatgtcccggcccggccgcggggagccccgcttcatctcagtgggctacgtggacgacacgcagttcgtgaggttcgacagcgacgccgcgagtccgagagaggagccgcgggcgccgtggatagagcaggaggggccggagtattgggaccggaacacacagatcttcaagaccaacacacagactgaccgagagagcctgcggaacctgcgcggctactacaaccagagcgaggccgggtctcacaccctccagagcatgtacggctgcgacgtggggccggacgggcgcctcctccgcgggcataaccagtacgcctacgacggcaaggattacatcgccctgaacgaggacctgcgctcctggaccgcggcggacaccgcggctcagatcacccagcgcaagtgggaggcggcccgtgtggcggagcaggacagagcctacctggagggcacgtgcgtggagtggctccgcagatacctggagaacgggaaggacacgctggagcgcgcggaccccccaaagacacacgtgacccaccaccccatctctgaccatgaggccaccctgaggtgctgggccctgggcttctaccctgcg

SEQ ID NO: 344247 - DNA, 741 bp, Artificial Sequence
  derived and/or modified sequence
atggccagcgctggccgctctgagggcacagctgggggcggggccggccctgaggagccccggcgggaggagggccgggccggcctgagccccagcagccccccaggcagccacagcatgagatactttgacacagccatgagccggcccggccgcggggagccccgcttcatctctgtgggctacgtggatgacacccagtttgtgcgctttgacagtgatgctgccagcccccgggaggagccccgggccccctggattgagcaggagggccctgagtactgggacaggaacacccagatcttcaagaccaacacccagacagaccgggagagcctgaggaacctgcggggctactacaaccagagcgaggccggcagccacaccctgcagagcatgtatggctgtgatgtgggcccagatggccgcctgctgcggggccacaaccagtatgcctatgatggcaaggactacatcgccctgaatgaagacctgcgctcctggacagctgctgacacagctgcccagatcacccagaggaagtgggaggccgcccgggtggccgagcaggaccgggcctacctggagggcacctgtgtggagtggctgcggcgctacctggagaatggcaaggacaccctggagagagctgacccccccaagacccacgtgacccaccaccccatcagtgaccacgaggccaccctgcgctgctgggccctgggcttctacccagcctag

SEQ ID NO: 344248 - DNA, 675 bp, Artificial Sequence
  derived and/or modified sequence
atgctggtgatggcccccaggacagtgctgctgctgctgtctgctgccctggccctgacagagacctgggccggcagccacagcatgagatactttgacacagccatgagcaggcctggccgcggggagccccgcttcatctctgtgggctacgtggatgacacccagtttgtgcgctttgacagtgatgctgccagcccccgggaggagccccgggccccctggattgagcaggagggccctgagtactgggacaggaacacccagatcttcaagaccaacacccagacagaccgggagagcctgaggaacctgcggggctactacaaccagagcgaggccggcagccacaccctgcagagcatgtatggctgtgatgtgggcccagatggccgcctgctgcggggccacaaccagtatgcctatgatggcaaggactacatcgccctgaatgaagacctgcgctcctggacagctgctgacacagctgcccagatcacccagaggaagtgggaggccgcccgggtggccgagcaggaccgggcctacctggagggcacctgtgtggagtggctgcggcgctacctggagaatggcaaggacaccctggagagagctgaccaggagcagaagagcctcttccctgcccagaggctggagctgagcaatgaatag

SEQ ID NO: 344249 - DNA, 741 bp, Artificial Sequence
  derived and/or modified sequence
atggccagcgccggccggagcgagggcaccgccggcggcggcgccggtcccgaggaacccaggagggaagagggtcgggccgggttgagccccagcagccctcctgggagccatagcatgagatattttgacacggccatgagcaggcctggacgcggtgaaccccggtttatctctgtggggtatgtcgatgacacccaattcgtcaggtttgacagtgatgcggcaagccccagagaggagcctcgggcgccttggattgagcaagaagggcccgagtattgggaccgaaatacgcagattttcaagacaaatactcagactgaccgcgagagcttgagaaacttgcgtggctactataaccagtctgaagcaggctcacataccttacagagcatgtatggatgcgacgtgggacctgacggcaggctgctaagaggacataaccagtacgcctatgatggaaaggactatattgctctgaatgaggacctgagatcatggactgccgcggatactgcagcccagatcacacagcggaagtgggaggccgcgcgggtggctgagcaggatagggcgtacctggagggcacatgtgtcgagtggctcagacggtacctggaaaatggtaaggacacactcgagagagccgatcctcccaaaacgcatgtgactcatcaccccatatccgaccatgaggctactctccggtgttgggctctggggttctatccagcctag

SEQ ID NO: 344250 - DNA, 675 bp, Artificial Sequence
  derived and/or modified sequence
atgctggtgatggccccccggaccgtgctgctgctgctgagcgccgctttagccctgacggagacctgggcaggttctcatagcatgagatacttcgacaccgccatgagtaggccaggccgtggtgagccacgctttataagtgttggatatgttgatgacacacagtttgtccggtttgactcggacgccgcgtctcctcgcgaagagcctagagcgccctggattgagcaagagggacccgagtattgggatagaaacacacagatctttaagacaaatacacaaacagaccgggaaagcctgcggaacctcaggggttattacaaccagtcagaagccggtagccatacacttcagtctatgtacggctgtgacgtgggcccagacgggaggctgctcaggggccataatcagtatgcatacgacggaaaggactacatagctctcaacgaagacctccgctcttggaccgcagccgacaccgctgcacagataacccaaaggaagtgggaagctgcccgggtggctgagcaggatcgagcatatttggaggggacttgcgtggaatggcttaggagatatctggagaacggaaaagacactctggagcgcgcagaccaggagcagaagtccctcttccccgctcagcggttagagctgagtaacgagtag

SEQ ID NO: 344251 - DNA, 741 bp, Artificial Sequence
  derived and/or modified sequence
atggcgtccgccggtagatcagaaggcacagcaggcggaggagctggccctgaggaacccaggagagaagagggcagagcaggcctctcgccctcatcaccccctggcagccatagcatgaggtactttgatacagccatgagccgccctggccgtggggagccgcgattcatctctgtaggctatgtggacgacacgcagttcgtccgctttgactctgacgccgctagtccacgtgaggaacccagggccccttggatcgagcaggaaggcccagaatactgggatcgcaatactcagatcttcaagaccaatacacagaccgaccgagaatccctgcgtaacctgagggggtactacaatcagagtgaggcaggaagtcatacactgcagagcatgtatgggtgcgacgtgggtcccgacgggagactcctccggggtcataatcagtacgcttacgatggcaaagattatattgccctaaatgaagatctcagaagctggaccgctgccgataccgctgcacagatcacccaaaggaagtgggaagcagccagggtggcggaacaggatcgcgcatacttggagggcacctgcgtggaatggctgcgacggtacttagaaaacggcaaggacaccctcgagagagcggatccaccaaagactcatgtcacccaccatcccatcagtgatcacgaggcgacccttcgatgttgggcgctaggcttttaccccgcatag

SEQ ID NO: 344252 - DNA, 675 bp, Artificial Sequence
  derived and/or modified sequence
atgctggtcatggcaccacggaccgttctcttactgctgtctgccgctctcgccttgaccgaaacgtgggccggatcacattctatgaggtacttcgatacagccatgagcagacctggtcgcggtgagcctcgtttcatttctgtcggttacgttgacgatacacagtttgttcgatttgatagcgacgctgccagccccagagaggaaccgagggccccatggatcgaacaggaggggccagaatattgggatagaaatacacagatattcaaaacaaacactcaaactgatagggagtctctccggaatctgcgtgggtactacaaccaatctgaagcaggttcccataccctccagtccatgtacgggtgtgacgttggccctgatggcagactgcttcgcggacataatcagtatgcctatgacggcaaggattatatcgcgctgaacgaagacctgcggtcctggacagccgcagacaccgctgcccaaattacccaacgtaagtgggaagccgcaagggtggctgaacaagacagggcgtacctggaggggacatgcgtggaatggctcaggcggtacctagagaatggcaaggacacactggaaagagcggaccaggagcagaaaagtctcttccctgctcagcgactggaactctcaaatgagtag

SEQ ID NO: 344253 - protein, 334 aa, Artificial Sequence
  derived and/or modified sequence
MAPRSLLLLLSGALALTDTWAGSHSLRYFSTAVSRPGRGEPRYIAVEYVDDTQFLRFDSDAAIPRMEPREPWVEQEGPQYWEWTTGYAKANAQTDRVALRNLLRRYNQSEAGSHTLQGMNGCDMGPDGRLLRGYHQHAYDGKDYISLNEDLRSWTAADTVAQITQRFYEAEEYAEEFRTYLEGECLELLRRYLENGKETLQRADPPKAHVAHHPISDHEATLRCWALGFYPAEITLTWQRDGEEQTQDTELVETRPAGDGTFQKWAAVVVPSGEEQRYTCHVQHEGLPQPLILRWEQSPQPTIPIVGIVAGLVVLGAVVTGAVVAAVMWRKKSS

SEQ ID NO: 344254 - protein, 338 aa, Artificial Sequence
  derived and/or modified sequence
MAPRSLLLLLSGALALTDTWAGSHSLRYFSTAVSRPGRGEPRYIAVEYVDDTQFLRFDSDAAIPRMEPREPWVEQEGPQYWEWTTGYAKANAQTDRVALRNLLRRYNQSEAGSHTLQGMNGCDMGPDGRLLRGYHQHAYDGKDYISLNEDLRSWTAADTVAQITQRFYEAEEYAEEFRTYLEGECLELLRRYLENGKETLQRADPPKAHVAHHPISDHEATLRCWALGFYPAEITLTWQRDGEEQTQDTELVETRPAGDGTFQKWAAVVVPSGEEQRYTCHVQHEGLPQPLILRWEQSPQPTIPIVGIVAGLVVLGAVVTGAVVAAVMWRKKSSGRKG

SEQ ID NO: 344255 - DNA, 1005 bp, Artificial Sequence
  derived and/or modified sequence
atggcccccagaagcctgctgctgctgctgagcggcgccctggccctgaccgacacctgggccggcagccacagcctgagatacttcagcaccgccgtgagcagacccggcagaggcgagcccagatacatcgccgtggagtacgtggacgacacccagttcctgagattcgacagcgacgccgccatccccagaatggagcccagagagccctgggtggagcaggagggcccccagtactgggagtggaccaccggctacgccaaggccaacgcccagaccgacagagtggccctgagaaacctgctgagaagatacaaccagagcgaggccggcagccacaccctgcagggcatgaacggctgcgacatgggccccgacggcagactgctgagaggctaccaccagcacgcctacgacggcaaggactacatcagcctgaacgaggacctgagaagctggaccgccgccgacaccgtggcccagatcacccagagattctacgaggccgaggagtacgccgaggagttcagaacctacctggagggcgagtgcctggagctgctgagaagatacctggagaacggcaaggagaccctgcagagagccgacccccccaaggcccacgtggcccaccaccccatcagcgaccacgaggccaccctgagatgctgggccctgggcttctaccccgccgagatcaccctgacctggcagagagacggcgaggagcagacccaggacaccgagctggtggagaccagacccgccggcgacggcaccttccagaagtgggccgccgtggtggtgcccagcggcgaggagcagagatacacctgccacgtgcagcacgagggcctgccccagcccctgatcctgagatgggagcagagcccccagcccaccatccccatcgtgggcatcgtggccggcctggtggtgctgggcgccgtggtgaccggcgccgtggtggccgccgtgatgtggagaaagaagagcagctag

SEQ ID NO: 344256 - DNA, 642 bp, Artificial Sequence
  derived and/or modified sequence
tgacccgaccccccccccggcagagtgcccggcgccttcaccgagcacgcctacgacggcaaggactacatcagcctgaacgaggacctgagaagctggaccgccgccgacaccgtggcccagatcacccagagattctacgaggccgaggagtacgccgaggagttcagaacctacctggagggcgagtgcctggagctgctgagaagatacctggagaacggcaaggagaccctgcagagagccgacccccccaaggcccacgtggcccaccaccccatcagcgaccacgaggccaccctgagatgctgggccctgggcttctaccccgccgagatcaccctgacctggcagagagacggcgaggagcagacccaggacaccgagctggtggagaccagacccgccggcgacggcaccttccagaagtgggccgccgtggtggtgcccagcggcgaggagcagagatacacctgccacgtgcagcacgagggcctgccccagcccctgatcctgagatgggagcagagcccccagcccaccatccccatcgtgggcatcgtggccggcctggtggtgctgggcgccgtggtgaccggcgccgtggtggccgccgtgatgtggagaaagaagagcagctag

SEQ ID NO: 344257 - DNA, 1017 bp, Artificial Sequence
  derived and/or modified sequence
atggcccccagaagcctgctgctgctgctgagcggcgccctggccctgaccgacacctgggccggcagccacagcctgagatacttcagcaccgccgtgagcagacccggcagaggcgagcccagatacatcgccgtggagtacgtggacgacacccagttcctgagattcgacagcgacgccgccatccccagaatggagcccagagagccctgggtggagcaggagggcccccagtactgggagtggaccaccggctacgccaaggccaacgcccagaccgacagagtggccctgagaaacctgctgagaagatacaaccagagcgaggccggcagccacaccctgcagggcatgaacggctgcgacatgggccccgacggcagactgctgagaggctaccaccagcacgcctacgacggcaaggactacatcagcctgaacgaggacctgagaagctggaccgccgccgacaccgtggcccagatcacccagagattctacgaggccgaggagtacgccgaggagttcagaacctacctggagggcgagtgcctggagctgctgagaagatacctggagaacggcaaggagaccctgcagagagccgacccccccaaggcccacgtggcccaccaccccatcagcgaccacgaggccaccctgagatgctgggccctgggcttctaccccgccgagatcaccctgacctggcagagagacggcgaggagcagacccaggacaccgagctggtggagaccagacccgccggcgacggcaccttccagaagtgggccgccgtggtggtgcccagcggcgaggagcagagatacacctgccacgtgcagcacgagggcctgccccagcccctgatcctgagatgggagcagagcccccagcccaccatccccatcgtgggcatcgtggccggcctggtggtgctgggcgccgtggtgaccggcgccgtggtggccgccgtgatgtggagaaagaagagcagcggcagaaagggctag

SEQ ID NO: 344258 - DNA, 1005 bp, Artificial Sequence
  derived and/or modified sequence
atggctccacggagtctgctcctcttgctgtctggagcgctggctctcaccgatacctgggcaggatcccactctctgaggtacttctctaccgcagtgagcaggccaggaagaggagaacctcgctatatagctgtcgagtatgtggatgatacccagtttttgcggttcgattccgatgcagccatcccaaggatggagcctagagaaccttgggtcgaacaggagggacctcagtattgggagtggacaacaggttatgccaaagcaaatgcccagacggatcgtgtggccctccgaaacctgcttcgacggtacaatcagtcagaggcaggcagtcacaccctgcagggcatgaatggctgtgacatgggtcccgacggccgactcctccggggctatcaccaacatgcttacgacggaaaggattacatctcgttgaacgaggatctgcggtcctggactgccgccgatactgttgcgcagatcacccaaaggttctatgaagccgaagaatatgctgaggaattcaggacttaccttgaaggtgaatgcctggagctgctccgtcggtatctggaaaatgggaaggagacactgcagagggccgacccccccaaggcccacgtggcgcaccaccctatcagtgaccacgaggccacactgaggtgctgggccctcggcttttaccctgctgagattaccctcacttggcagcgagacggcgaagagcaaacgcaggacactgagcttgttgagacccgtcctgcgggagacggcacctttcagaagtgggcagccgtggtcgttccaagtggtgaggagcagaggtacacctgccacgtgcagcatgaaggactaccccagcccttaattctgagatgggagcaatccccccagccgacaatcccaatcgtcggaatcgtggcagggctcgttgttctgggagcagttgtgactggagccgttgtggccgcggtgatgtggaggaaaaagagtagctag

SEQ ID NO: 344259 - DNA, 642 bp, Artificial Sequence
  derived and/or modified sequence
tagccggatccccccccgggaagggttccgggggccttcacagagcatgcctatgacggtaaggactacatcagtctgaacgaggatttgcgcagctggactgccgctgacacggtcgcccagatcacccagcgattctatgaagcagaagaatatgctgaggaattcaggacctacctcgagggggaatgcctcgagctcttacgcaggtacctggagaacggaaaagaaacacttcagagggccgatcccccaaaagcacacgtggcccatcatcccatctctgatcacgaggctactttgagatgttgggcgctggggttctacccagcagagatcactttaacctggcagcgtgatggtgaagagcagacccaagacaccgagttggtggaaacacgccctgcaggcgatggcactttccagaaatgggccgctgtcgtggtaccctctggtgaagagcagcgctatacctgtcatgtgcagcacgaggggctgccacagcctttaatcctgcggtgggaacagtcaccgcaacctaccataccaatcgtgggcatcgtagcaggcctagtagtactcggagccgtggttaccggggccgtcgttgcggcggtcatgtggcggaaaaaatcgagctag

SEQ ID NO: 344260 - DNA, 1005 bp, Artificial Sequence
  derived and/or modified sequence
atggctccacgcagtctgctccttctgctcagcggggccctggccctcaccgacacatgggccggcagtcatagtttgcgctatttttccactgctgtctcacggcctgggcgtggagaacctaggtacatagctgtggagtacgtcgatgacacacagtttctaaggtttgactccgatgccgccataccgagaatggagcctcgcgagccctgggtggaacaggagggcccccagtactgggagtggaccacagggtacgccaaagccaacgctcagaccgaccgggtcgccctgcggaatcttctgcgccggtataatcagtctgaagccggatcgcatacactacagggaatgaatgggtgtgacatggggccagacggcagactgcttagggggtatcaccagcacgcttatgacggcaaggattacatatctttgaatgaggacctgagaagctggacagctgccgacactgtggcccaaataacacaaagattttacgaggcggaagaatacgctgaggaatttcgcacatacctggaaggggagtgcctcgaactgctgaggagatacctcgaaaacggcaaggagaccttgcagagggccgacccccccaaggcccacgtggcgcatcacccgattagcgaccatgaagcgaccctccggtgttgggcccttgggttctaccccgccgaaataacactcacgtggcagcgcgacggggaggagcagactcaggatacagagctggttgaaaccaggccggccggggacggtacttttcaaaaatgggccgccgtcgtcgtcccatccggagaagaacaacggtacacctgccacgtgcagcacgaggggctgccccagcccctaattcttcgatgggagcagtcgccacagccgactatccctattgtcggcattgtggccggattggtggtcctgggagccgtagtgacaggggcggtggtcgccgcagttatgtggcgaaaaaagagttcttag

SEQ ID NO: 344261 - DNA, 1017 bp, Artificial Sequence
  derived and/or modified sequence
atggcaccccgcagcttgctgctgctcctgtccggagctttagccttaaccgacacttgggccggctcccacagcctccgatactttagtacggccgtttcaagacccgggcgcggggagccccgctatatagcagtggagtatgtggatgacacgcagttcctcagattcgactctgacgccgcaatacccaggatggaacctagagagccctgggtggagcaggagggtcctcagtattgggaatggacgaccggatacgccaaagccaacgcccagaccgatcgagtggctctccggaatttgctaagacggtacaatcagagtgaggcagggagccacaccttgcagggtatgaacgggtgcgacatgggtcctgacggacgacttcttagagggtatcatcagcacgcctatgatgggaaggactacatatccttgaacgaggatctgcgtagctggacagccgcagataccgtggcacagattacccagcggttttacgaagccgaggagtatgccgaagaattcaggacttatctggagggggaatgcctcgagctgctgcgccggtacctcgagaacggcaaggagacccttcagagagctgacccacctaaggcgcacgtggcgcaccaccccattagcgatcacgaagcaacccttcgctgctgggccctgggattctacccggcggagattacactgacgtggcagcgggacggcgaggagcaaacacaggataccgaacttgtggaaaccaggccagccggggacggcaccttccagaagtgggcggccgtggtggttccttctggcgaggaacagagatacacatgccatgtgcagcatgagggtctcccacagcccttaattttacggtgggaacagagcccgcaacccactattcccattgtcggcatcgtggcggggttagtggtattgggagcggtggtcactggagctgtggtggccgcagtgatgtggcggaagaaatccagcggtcgaaagggctag

SEQ ID NO: 344262 - DNA, 1059 bp, Artificial Sequence
  derived and/or modified sequence
aaagtcccacgcaccccgcgggactcatatttttcccagacgcggaggttggggtcatggcgccccgaagcctcctcctgctgctctcaggggccctggccctgaccgatacttgggcgggctcccactccttgaggtatttcagcaccgctgtgtcgcggcccggccgcggggagccccgctacatcgccgtggagtacgtagacgacacgcaattcctgcggttcgacagcgacgccgcgattccgaggatggagccgcgggagccgtgggtggagcaagaggggccgcagtattgggagtggaccacagggtacgccaaggccaacgcacagactgaccgagtggccctgaggaacctgctccgccgctacaaccagagcgaggctgggtctcacaccctccagggaatgaatggctgcgacatggggcccgacggacgcctcctccgcgggtatcaccagcacgcgtacgacggcaaggattacatctccctgaacgaggacctgcgctcctggaccgcggcggacaccgtggctcagatcacccagcgcttctatgaggcagaggaatatgcagaggagttcaggacctacctggagggcgagtgcctggagttgctccgcagatacttggagaatgggaaggagacgctacagcgcgcagatcctccaaaggcacacgttgcccaccaccccatctctgaccatgaggccaccctgaggtgctgggccctgggcttctaccctgcggagatcacgctgacctggcagcgggatggggaggaacagacccaggacacagagcttgtggagaccaggcctgcaggggatggaaccttccagaagtgggccgctgtggtggtgccttctggagaggaacagagatacacatgccatgtgcagcacgaggggctgccccagcccctcatcctgagatgggagcagtctccccagcccaccatccccatcgtgggcatcgttgctggccttgttgtccttggagctgtggtcactggagctgtggtcgctgctgtgatgtggaggaagaagagctcag

SEQ ID NO: 344263 - DNA, 639 bp, Artificial Sequence
  derived and/or modified sequence
gcccagaccctccacccgggagagtcccaggcgcctttaccgagcacgcgtacgacggcaaggattacatctccctgaacgaggacctgcgctcctggaccgcggcggacaccgtggctcagatcacccagcgcttctatgaggcagaggaatatgcagaggagttcaggacctacctggagggcgagtgcctggagttgctccgcagatacttggagaatgggaaggagacgctacagcgcgcagatcctccaaaggcacacgttgcccaccaccccatctctgaccatgaggccaccctgaggtgctgggccctgggcttctaccctgcggagatcacgctgacctggcagcgggatggggaggaacagacccaggacacagagcttgtggagaccaggcctgcaggggatggaaccttccagaagtgggccgctgtggtggtgccttctggagaggaacagagatacacatgccatgtgcagcacgaggggctgccccagcccctcatcctgagatgggagcagtctccccagcccaccatccccatcgtgggcatcgttgctggccttgttgtccttggagctgtggtcactggagctgtggtcgctgctgtgatgtggaggaagaagagctcag

SEQ ID NO: 344264 - DNA, 1408 bp, Artificial Sequence
  derived and/or modified sequence
gaagaagaagaagaagaagaagaagaagaagaggaagaggaagaggaagaggaagaagaagaagaagaagaagaagaagaagaagaagaagaagaagaagaagaagaagaagaagaagaagaagaagaagaggaagaagaggaagaagaagaaactgtctctagaccttcattctcaggacaagttcattgtctggcaccaagctccttggggtgaattttcttccaaaagagtccggggagtccaggtccttcatcctggatactcataacgcggccccatttctcactcccattgggcgtcgcgtttctagagaagccaatcagtgtcgccgcagttcccaggttctaaagtcccacgcaccccgcgggactcatatttttcccagacgcggaggttggggtcatggcgccccgaagcctcctcctgctgctctcaggggccctggccctgaccgatacttgggcgggctcccactccttgaggtatttcagcaccgctgtgtcgcggcccggccgcggggagccccgctacatcgccgtggagtacgtagacgacacgcaattcctgcggttcgacagcgacgccgcgattccgaggatggagccgcgggagccgtgggtggagcaagaggggccgcagtattgggagtggaccacagggtacgccaaggccaacgcacagactgaccgagtggccctgaggaacctgctccgccgctacaaccagagcgaggctgggtctcacaccctccagggaatgaatggctgcgacatggggcccgacggacgcctcctccgcgggtatcaccagcacgcgtacgacggcaaggattacatctccctgaacgaggacctgcgctcctggaccgcggcggacaccgtggctcagatcacccagcgcttctatgaggcagaggaatatgcagaggagttcaggacctacctggagggcgagtgcctggagttgctccgcagatacttggagaatgggaaggagacgctacagcgcgcagatcctccaaaggcacacgttgcccaccaccccatctctgaccatgaggccaccctgaggtgctgggccctgggcttctaccctgcggagatcacgctgacctggcagcgggatggggaggaacagacccaggacacagagcttgtggagaccaggcctgcaggggatggaaccttccagaagtgggccgctgtggtggtgccttctggagaggaacagagatacacatgccatgtgcagcacgaggggctgccccagcccctcatcctgagatgggagcagtctccccagcccaccatccccatcgtgggcatcgttgctggccttgttgtccttggagctgtggtcactggagctgtggtcgctgctgtgatgtggaggaagaagagctcag

SEQ ID NO: 344265 - DNA, 1191 bp, Artificial Sequence
  derived and/or modified sequence
aggttctaaagtcccacgcaccccgcgggactcatatttttcccagacgcggaggttggggtcatggcgccccgaagcctcctcctgctgctctcaggggccctggccctgaccgatacttgggcgggctcccactccttgaggtatttcagcaccgctgtgtcgcggcccggccgcggggagccccgctacatcgccgtggagtacgtagacgacacgcaattcctgcggttcgacagcgacgccgcgattccgaggatggagccgcgggagccgtgggtggagcaagaggggccgcagtattgggagtggaccacagggtacgccaaggccaacgcacagactgaccgagtggccctgaggaacctgctccgccgctacaaccagagcgaggctgggtctcacaccctccagggaatgaatggctgcgacatggggcccgacggacgcctcctccgcgggtatcaccagcacgcgtacgacggcaaggattacatctccctgaacgaggacctgcgctcctggaccgcggcggacaccgtggctcagatcacccagcgcttctatgaggcagaggaatatgcagaggagttcaggacctacctggagggcgagtgcctggagttgctccgcagatacttggagaatgggaaggagacgctacagcgcgcagatcctccaaaggcacacgttgcccaccaccccatctctgaccatgaggccaccctgaggtgctgggccctgggcttctaccctgcggagatcacgctgacctggcagcgggatggggaggaacagacccaggacacagagcttgtggagaccaggcctgcaggggatggaaccttccagaagtgggccgctgtggtggtgccttctggagaggaacagagatacacatgccatgtgcagcacgaggggctgccccagcccctcatcctgagatgggagcagtctccccagcccaccatccccatcgtgggcatcgttgctggccttgttgtccttggagctgtggtcactggagctgtggtcgctgctgtgatgtggaggaagaagagctcaggtaggaaggggtgaggagtggagtctgagttttcttgtcccactgggggttgcaagccccaagtagaagtgtgccctgcctcattactgggaagcaccatccacactcatgggtctacccagcct

SEQ ID NO: 344266 - DNA, 1005 bp, Artificial Sequence
  derived and/or modified sequence
atggcccccaggagcctgctgctgctgctgagcggggccctggccctgacagacacctgggccggcagccacagcctgcgctacttcagcacagctgtgtcccggcccggccgcggggagccccgctacatcgctgtggagtatgtggatgacacccagttcctgcgctttgacagtgatgctgccatccccaggatggagccccgggagccctgggtggagcaggagggcccccagtactgggagtggaccaccggctacgccaaggccaatgcccagacagacagagtggccctgaggaacctgctgcggcgctacaaccagagcgaggccggcagccacaccctgcagggcatgaatggctgtgacatgggcccagatggccgcctgctgcggggctaccaccagcacgcctatgatggcaaggactacatcagcctgaatgaagacctgcgctcctggacagctgctgacacagtggcccagatcacccagcgcttctatgaggccgaggagtatgcagaggagttccgcacctacctggagggggagtgcctggagctgctgcggcgctacctggagaatggcaaggagaccctgcagagagctgacccccccaaggcccacgtggcccaccaccccatcagtgaccacgaggccaccctgcgctgctgggccctgggcttctacccagctgagatcaccctgacctggcagagagatggagaggagcagacccaggacacagagctggtggagaccaggcctgctggagatggcaccttccagaagtgggccgctgtggtggtgcccagcggggaggagcagcgctacacctgccacgtgcagcacgagggcctgccccagcccctcatcctgcgctgggagcagagcccccagcccaccatccccatcgtgggcatcgtggccggcctggtggtgctgggcgctgtggtgactggagctgtggtggccgctgtgatgtggaggaagaagagcagctag

SEQ ID NO: 344267 - DNA, 642 bp, Artificial Sequence
  derived and/or modified sequence
tgaccagaccccccacctggccgggtgcctggggccttcacagagcacgcctatgatggcaaggactacatcagcctgaatgaagacctgcgctcctggacagctgctgacacagtggcccagatcacccagcgcttctatgaagctgaggagtatgcagaggagttccgcacctacctggagggagaatgtctggagctgctgcggcgctacctggagaatggcaaggagaccctgcagagagctgacccccccaaggcccacgtggcccaccaccccatcagtgaccacgaggccaccctgcgctgctgggccctgggcttctacccagctgagatcaccctgacctggcagagagatggagaggagcagacccaggacacagagctggtggagaccaggcctgctggagatggcaccttccagaagtgggccgctgtggtggtgcccagcggggaggagcagcgctacacctgccacgtgcagcacgagggcctgccccagcccctcatcctgcgctgggagcagagcccccagcccaccatccccatcgtgggcatcgtggccggcctggtggtgctgggcgctgtggtgactggagctgtggtggccgctgtgatgtggaggaagaagagcagctag

SEQ ID NO: 344268 - DNA, 1017 bp, Artificial Sequence
  derived and/or modified sequence
atggcccccaggagcctgctgctgctgctgagcggggccctggccctgacagacacctgggccggcagccacagcctgcgctacttcagcacagctgtgtcccggcccggccgcggggagccccgctacatcgctgtggagtatgtggatgacacccagttcctgcgctttgacagtgatgctgccatccccaggatggagccccgggagccctgggtggagcaggagggcccccagtactgggagtggaccaccggctacgccaaggccaatgcccagacagacagagtggccctgaggaacctgctgcggcgctacaaccagagcgaggccggcagccacaccctgcagggcatgaatggctgtgacatgggcccagatggccgcctgctgcggggctaccaccagcacgcctatgatggcaaggactacatcagcctgaatgaagacctgcgctcctggacagctgctgacacagtggcccagatcacccagcgcttctatgaggccgaggagtatgcagaggagttccgcacctacctggagggggagtgcctggagctgctgcggcgctacctggagaatggcaaggagaccctgcagagagctgacccccccaaggcccacgtggcccaccaccccatcagtgaccacgaggccaccctgcgctgctgggccctgggcttctacccagctgagatcaccctgacctggcagagagatggagaggagcagacccaggacacagagctggtggagaccaggcctgctggagatggcaccttccagaagtgggccgctgtggtggtgcccagcggggaggagcagcgctacacctgccacgtgcagcacgagggcctgccccagcccctcatcctgcgctgggagcagagcccccagcccaccatccccatcgtgggcatcgtggccggcctggtggtgctgggcgctgtggtgactggagctgtggtggccgctgtgatgtggaggaagaagagcagcggcaggaaaggatag

SEQ ID NO: 344269 - DNA, 1005 bp, Artificial Sequence
  derived and/or modified sequence
atggccccccggagcctgctgctgctgctgagcggcgccctggccctcaccgacacctgggccggtagccactccctgcgctacttttcaaccgccgtctccaggccggggcgcggcgagccaagatacattgcggtggagtatgttgatgatacccaatttttgagattcgacagtgacgctgcaatcccccggatggaaccacgtgagccctgggtggagcaggaggggcctcagtactgggaatggacaacaggctatgctaaagccaatgcccagacggatcgcgtcgctttaagaaacctgctgcggcgatataaccagagcgaggccggttcacacaccctgcaaggcatgaatgggtgtgacatggggccggacggcaggctgttacggggctaccatcagcatgcttatgacggaaaagactacatcagcttaaacgaagatctgagatcttggacagcggcagataccgtggctcagataacacagcgtttttatgaggcagaggaatacgccgaggagtttcgtacatatttggaaggcgaatgtctggagctcctgcggaggtatctggaaaacggcaaggagactttgcaacgggccgatcctcccaaagcacacgtggctcatcatcctatctccgaccacgaagctaccctgcggtgctgggctttaggattttaccccgcagaaattactctcacctggcagagggacggtgaggagcagacacaggacaccgagctggtggagactcgcccggctggagatggaacttttcaaaagtgggccgcagttgtcgtgccatctggcgaggagcagcgctatacgtgccatgttcaacacgagggcctgccgcagcccttgatcctccgatgggaacagtcaccgcagcctacaatccccatcgtagggatcgtcgctggtctggttgtcctaggcgccgtagtaaccggggccgtcgtggcagccgttatgtggcggaagaaaagcagctag

SEQ ID NO: 344270 - DNA, 642 bp, Artificial Sequence
  derived and/or modified sequence
tgacccgaccccccccccggccgggtgcccggcgccttcaccgagcacgcttacgatgggaaggattacatctcacttaatgaggacctccggagctggactgcggctgacactgtggcccagattacgcagagattttacgaggcagaggagtacgctgaagagttcagaacctatctggaaggcgagtgccttgaactcttgcgtcggtaccttgagaatgggaaagagactttgcaaagagcggacccacctaaggcgcacgtggcccaccaccctataagtgaccatgaggcaacgctccgatgttgggcgctgggattttatccggctgaaatcaccctgacttggcagcgggacggagaggagcagactcaagataccgagctggtagagacccgccccgctggggatgggactttccagaagtgggccgccgttgtcgtgccctcgggagaggaacagcggtacacctgccacgtccagcacgaagggctgccacagcctctaattttgcgatgggagcagtcaccccagccaacgattcccatcgtaggtattgtggctggcttggtagtgcttggcgcagtcgttactggagccgttgttgcagcagtgatgtggcgcaagaagagctcttag

SEQ ID NO: 344271 - DNA, 1005 bp, Artificial Sequence
  derived and/or modified sequence
atggccccccggagcctgctgctgctgctgagcggcgccctggccctgaccgacacttgggccggttcacacagcctgaggtacttctctactgctgtctctcgacctgggcgcggagagcctcgatatatcgccgtggagtatgtcgatgatacacaattcctgcgctttgatagcgatgcagccattcctcgtatggaacctagggaaccctgggtagaacaagagggcccccagtactgggaatggactaccggatacgccaaggccaatgcacaaaccgacagagtggccctgagaaacctgctgcgtcgctacaaccagtccgaagccggcagccacactctgcagggcatgaacggatgcgatatgggaccagatggtagactgctgcggggatatcaccagcatgcctatgacggaaaggactacatcagcctcaacgaggacttgaggagttggacagctgcagacacagtggcccaaatcacacaacgtttctacgaggcggaagaatatgccgaagaattccggacatatttggagggagagtgcctagaactcctccgccggtatctcgagaatggaaaggagacactgcaacgggctgacccgccaaaggcccacgtcgcccatcacccaatctccgatcatgaggccactttgaggtgctgggcacttggcttttaccccgccgaaataacactgacttggcagcgagatggggaggagcaaacacaggacaccgagctggttgagacccggcccgccggggacggcactttccagaagtgggcggcagttgtggtcccctccggtgaggagcagaggtacacatgccacgtccagcacgagggcctgccacagccacttattctgcgatgggagcaaagtcctcagccaactatccccattgttggcattgtggcgggccttgttgtactgggcgccgtggtaaccggggcagttgtagcagcagtgatgtggagaaaaaaatcatcctag

SEQ ID NO: 344272 - DNA, 1017 bp, Artificial Sequence
  derived and/or modified sequence
atggccccccggagcctgctgctgctgctgagcggcgccctggccctgaccgacacttgggccggttcacatagcctgcggtactttagcacagcggtatcccgccctggcaggggagagcctaggtacattgcagtcgaatatgtcgacgacactcagtttctgagatttgatagcgatgctgcaatccctcggatggaaccacgcgagccctgggtggaacaggaaggcccccagtactgggagtggaccaccggctacgcgaaagccaacgcccagacggatcgcgtcgccctgaggaatcttctgcgccgatacaaccaaagtgaagctgggtcgcatacgttacaggggatgaatggctgtgacatgggtcctgacggacggctgctgaggggataccaccaacatgcatatgatgggaaggactacatctctctcaacgaggacctaagaagctggacagcggccgacactgtcgcccagatcacacagagattctatgaagcagaggagtacgccgaagagttcagaacttacttggaaggcgagtgcttggagttgctgagacgttacctggagaacggcaaggagacattgcagcgggcggatcctccgaaggctcacgtggcgcaccatcccatctccgatcatgaggccacactccggtgctgggcgctagggttttatccggccgagataacgctgacatggcagagggatggcgaagagcagacacaagataccgagctagttgaaacccgacctgcaggtgatggcacattccagaaatgggctgccgttgtggtcccgtctggagaggagcaacgctatacttgtcacgtgcagcacgagggactcccacagcctctcatactgcggtgggaacaatcacctcagcctaccatcccaattgtcggcatagtggccgggctggtggtgctaggcgccgtggtcacgggagccgtggtagccgccgtaatgtggcggaagaaatcctcaggcagaaagggctag

SEQ ID NO: 344273 - DNA, 1005 bp, Artificial Sequence
  derived and/or modified sequence
atggcccctcggtccctcctgctgctcttatccggagcgctggctctgacggacacatgggctggctcccacagcctaaggtactttagcacagccgtatcacgcccaggcagaggcgaaccccgatacatcgccgtggagtacgttgacgacacgcagttcctaagattcgattctgacgccgcaattcctcgtatggaaccacgagagccctgggtggaacaggaaggaccccagtattgggagtggactacgggctacgccaaggcaaatgcccagaccgaccgtgtggctcttagaaatcttctccgtcgctataaccagtctgaagctgggtctcatacgctacagggaatgaatggatgcgatatgggcccagacgggcgtttgctccgaggctaccaccagcatgcctacgatgggaaggactatatctctctcaatgaggacctcagaagctggacagcagctgacacagtggcccagataacccaaaggttttacgaagccgaggaatacgcagaagaattccggacatatttggagggagaatgcctcgagctcctgcggaggtacctggagaacgggaaagaaaccctgcagagagccgaccctccaaaagcccacgttgcacaccatccaatttccgaccatgaggcaaccctccgctgttgggccctcgggttctatcccgcagaaatcaccctcacttggcaaagggatggagaagaacagacacaagacacggagctcgtagaaacaaggccagctggagatgggactttccagaaatgggccgctgttgtggtgccatctggggaagagcagcggtatacctgtcatgtccagcacgaggggctgccccagcccttgatactgagatgggagcaatcccctcagcctaccatccccatcgtggggattgtggccggtttagttgtgttgggcgcagtggtcaccggcgctgttgtcgcagccgtgatgtggagaaaaaagtcctcgtag

SEQ ID NO: 344274 - DNA, 642 bp, Artificial Sequence
  derived and/or modified sequence
tagcctgaccccccacctggtcgcgttcccggtgcttttactgaacacgcttatgatgggaaggactacatcagtcttaacgaagatttgcgtagttggacggccgcagatactgtcgcacagatcacacagcggttttacgaggcggaggagtacgccgaagagttccgcacgtaccttgagggggaatgcctggaactgttgcgcaggtatttggagaacggcaaggagacactgcagcgggcagatcctccgaaggcacacgtggcccaccatccaatatcagaccatgaagctacactgcgatgctgggccttgggcttctatcctgccgagattactctgacttggcaacgtgacggcgaagagcaaactcaagataccgaactcgtggagactagacccgctggagatggaaccttccagaagtgggccgcagttgtggtcccatccggcgaagaacagaggtacacgtgccacgttcaacatgaaggcctcccccaacctctgatactcaggtgggaacaatctccacagccaacaatcccgatagtcggtattgtagctggtctggtagttctgggcgcagtggtgactggcgcagtggtggctgccgttatgtggcgcaaaaaatctagctag

SEQ ID NO: 344275 - DNA, 1005 bp, Artificial Sequence
  derived and/or modified sequence
atggcccctcgatcgctgctgttgctgctgtcaggggctctagcactcactgatacttgggctgggtctcactccctaagatacttctccaccgcagtgagtagacccggacgtggcgaaccaagatatatcgcggtagaatatgtggatgacacgcagttccttaggtttgatagtgacgcggcaattcctaggatggaacctcgggagccatgggtcgagcaggagggaccacagtactgggagtggactaccggttatgctaaggcaaatgcgcagaccgaccgggtggcactccgaaatctactcaggcggtataaccagtctgaagcgggttcacacacattacagggtatgaacgggtgcgacatgggtccagacggaaggctcctgagaggttaccatcaacacgcctacgatggtaaagactacatctccctgaacgaggacttacggtcctggaccgctgctgacacagtggcccagatcacacaacggttctatgaggccgaagaatatgccgaggagtttcggacttatctggagggagaatgtctggagcttttaagaagatatctagaaaacggcaaggagaccctgcagagagcggatccgcctaaagcgcatgtggcacatcacccaatctccgaccacgaggccacactccgctgctgggccctcgggttttaccccgcagagattacacttacctggcaacgcgacggggaggaacaaacacaggacactgaacttgtggagacgaggcccgctggggatggaacttttcagaagtgggctgccgtagtcgttcccagcggggaggaacagaggtatacctgccacgtgcagcacgagggactgccacaaccactcattcttcgctgggaacagagcccgcagcccaccataccaatagtcggaattgtggcgggtttggtcgtcttaggagccgttgtgactggcgctgtggtcgccgcagtcatgtggcgaaaaaaatcatcctag

SEQ ID NO: 344276 - DNA, 1017 bp, Artificial Sequence
  derived and/or modified sequence
atggccccacgctcccttttgctgttgctcagcggagcacttgcactgacagatacatgggccggaagtcatagcctgagatacttcagtacggctgtgtcccggcctggccgaggcgagcccagatacattgccgtggagtacgtggacgacacccagtttctcagattcgactccgacgccgctatcccccgaatggagccgagagaaccgtgggttgaacaggaggggcctcaatactgggagtggaccacaggatatgccaaggctaacgctcagacggaccgtgtcgccctgcggaatctgttgcgaagatacaatcagtctgaagcaggttcacataccctgcaggggatgaatggctgcgacatgggccctgacggacgccttttacgtggatatcaccaacatgcctacgatgggaaggattatatctcgttaaacgaggatctgaggtcatggactgcagccgataccgtcgctcaaattactcagcggttttatgaggctgaggagtatgcagaagagttccgaacttacctcgaaggtgaatgcctggagctgctacgccgttatctagagaatgggaaggaaaccctgcagcgcgcagatccaccgaaggcccatgtggctcatcatccaatttctgaccacgaagccacccttcgctgctgggccctgggattctaccctgcagagatcacactcacctggcaacgcgacggagaggagcagacacaggatacagaactcgtcgaaacgcgaccagcaggtgatggcaccttccagaagtgggctgcagttgtggtgccctccggagaggaacagcgctacacttgccacgtgcagcatgagggactgcctcagccactcatcctccgctgggagcagagtccacaacccaccattcctatcgtggggattgtagcaggcctggtggtgctgggtgccgttgtgactggagccgtggttgccgctgtcatgtggaggaagaagagctcgggcaggaagggctag

SEQ ID NO: 344277 - DNA, 1599 bp, Artificial Sequence
  derived and/or modified sequence
atggccaccgccaagggcatcgccatcggcatcgacctgggcaccacctacagctgcgtgggcgtgttccagcacggcaaggtggagatcatcgccaacgaccagggcaacagaaccacccccagctacgtggccttcaccgacaccgagagactgatcggcgacgccgccaagaaccaggtggccatgaacccccagaacaccgtgttcgacgccaagagactgatcggcagaaagttcaacgaccccgtggtgcaggccgacatgaagctgtggcccttccaggtgatcaacgagggcggcaagcccaaggtgctggtgagctacaagggcgagaacaaggccttctaccccgaggagatcagcagcatggtgctgaccaagctgaaggagaccgccgaggccttcctgggccaccccgtgaccaacgccgtgatcaccgtgcccgcctacttcaacgacagccagagacaggccaccaaggacgccggcgtgatcgccggcctgaacgtgctgagaatcatcaacgagcccaccgccgccgccatcgcctacggcctggacaagggcggccagggcgagagacacgtgctgatcttcgacctgggcggcggcaccttcgacgtgagcatcctgaccatcgacgacggcatcttcgaggtgaaggccaccgccggcgacacccacctgggcggcgaggacttcgacaacagactggtgagccacttcgtggaggagttcaagagaaagcacaagaaggacatcagccagaacaagagagccgtgagaagactgagaaccgcctgcgagagagccaagagaaccctgagcagcagcacccaggccaacctggagatcgacagcctgtacgagggcatcgacttctacaccagcatcaccagagccagattcgaggagctgtgcgccgacctgttcagaggcaccctggagcccgtggagaaggccctgagagacgccaagatggacaaggccaagatccacgacatcgtgctggtgggcggcagcaccagaatccccaaggtgcagagactgctgcaggactacttcaacggcagagacctgaacaagagcatcaaccccgacgaggccgtggcctacggcgccgccgtgcaggccgccatcctgatgggcgacaagagcgagaaggtgcaggacctgctgctgctggacgtggcccccctgagcctgggcctggagaccgccggcggcgtgatgaccgccctgatcaagagaaacagcaccatccccaccaagcagacccagatcttcaccacctacagcgacaaccagcccggcgtgctgatccaggtgtacgagggcgagagagccatgaccaaggacaacaacctgctgggcagattcgacctgaccggcatcccccccgcccccagaggcgtgccccagatcgaggtgaccttcgacatcgacgccaacggcatcctgaacgtgaccgccatggacaagagcaccggcaaggtgaacaagatcaccatcaccaacgacaagggcagactgagcaaggaggagatcgagagaatggtgctggacgccgagaagtacaaggccgaggacgtgtag

SEQ ID NO: 344278 - DNA, 1599 bp, Artificial Sequence
  derived and/or modified sequence
atggctaccgccaagggaattgccatcggcattgacttgggcaccacttacagctgtgtgggggtgtttcagcatgggaaagttgagatcattgccaatgaccaagggaaccgaaccaccccatcctacgtcgcctttaccgataccgagcggttgatcggggacgctgctaagaaccaggtggccatgaacccccagaacacagtgtttgacgccaaaagacttatcgggaggaaattcaacgaccccgtggtgcaggccgacatgaagctttggccatttcaagtgatcaacgagggggggaaacccaaggtgctggtctcttataagggcgaaaacaaagccttttacccagaggagatcagttcgatggtcttaactaaactcaaggaaaccgccgaggcctttctgggacatccggtgacaaacgcggtgattacagttcccgcctacttcaatgacagccagcggcaggcgacaaaagatgcaggagttatagcaggcctgaatgtgctgcgcattataaacgaacctacagctgctgccattgcctacggcctggacaaaggggggcagggcgagcggcatgtgctcatttttgacctgggcggaggcacctttgacgtgtctatactgacaatcgatgacggaatttttgaagtgaaggccaccgccggggatacccacttgggcggtgaagattttgataacagacttgtcagtcacttcgtagaagagtttaaacgaaagcacaaaaaggatattagccaaaacaagagagcagttcggagactgagaaccgcttgcgagcgggccaagagaaccctctccagtagtacacaggctaaccttgagatcgatagtttatatgaaggcattgacttctacacaagcatcaccagagcccgtttcgaggagctgtgtgcagacttatttaggggaaccctggaacctgtcgaaaaggccctgagagacgctaaaatggacaaggcaaagatccacgatatcgttttagtgggcgggtctacacgcatcccgaaggtgcaaagactcttgcaagattattttaatgggcgggacctaaataagagtatcaatcctgatgaggctgtggcatacggagctgccgtgcaggccgcaatcttgatgggggacaagtcagagaaagtacaggatctcttgctcctcgacgttgctccattgtccttgggattagaaacagccgggggagtaatgacagcgctgatcaaacggaattccacaattcccaccaaacaaacccaaatctttacgacatactccgacaaccagccgggcgtgctcatacaggtctatgagggtgagcgtgccatgaccaaagataacaatctgctgggcaggtttgacctaaccggtatcccccccgcgccaagaggtgttccacagatagaagtcacgtttgatattgatgccaacggtattctgaatgtgacagcgatggataaatctaccgggaaagtgaacaaaattacaatcacaaacgacaaagggagactgtccaaggaagagattgaaaggatggtgctcgacgctgagaagtacaaagccgaagacgtttag

SEQ ID NO: 344279 - DNA, 1984 bp, Artificial Sequence
  derived and/or modified sequence
aaatttgcagggagggacggggtggggggtggggggaccccggttgtgcagtttgatattgagggagcccccacctactcgctggggctgcgtaatctggacgtttccaaactgaagcgaaggcgtcgggagactaggcctcagagaaccatggctactgccaagggaatcgccataggcatcgacctgggcaccacctactcctgtgtgggggtgttccagcacggcaaggtggagatcatcgccaacgaccagggcaaccgcaccacccccagctacgtggccttcacagacaccgagcggctcattggggatgcggccaagaaccaggtagcaatgaatccccagaacactgtttttgatgctaaacgtctgatcggcaggaaatttaatgatcctgttgtacaagcagatatgaaactttggccttttcaagtgattaatgaaggaggcaagcccaaagtccttgtgtcctacaaaggggagaataaagctttctaccctgaggaaatctcttcgatggtattgactaagttgaaggagactgctgaggcctttttgggccaccctgtcaccaatgcagtgattaccgtgccagcctatttcaatgactctcaacgtcaggctactaaggatgcaggtgtgattgctggacttaatgtgctaagaatcatcaatgagcccacggctgctgccattgcctatggtttagataaaggaggtcaaggagaacgacatgtcctgatttttgatctgggtggaggcacatttgatgtgtcaattctgaccatagatgatgggatttttgaggtaaaggccactgctggggacactcacctgggtggggaggactttgacaacaggcttgtgagccacttcgtggaggagttcaagaggaaacacaaaaaggacatcagccagaacaagcgagccgtgaggcggctgcgcaccgcctgcgagagggccaagaggaccctgtcgtccagcacccaggccaacctagaaattgattcactttatgaaggcattgacttctatacatccatcaccagagctcgatttgaagagttgtgtgcagacctgtttaggggtaccctggagcctgtagaaaaagcgcttcgggatgccaagatggataaggctaaaatccatgacattgttttagtagggggctccacccgcatccccaaggtgcagcggctgcttcaggactacttcaatggacgtgatctcaacaagagcatcaaccctgatgaggccgtagcatatggggctgcggtacaagcagccatcctgatgggggacaagtctgagaaggtacaggacctgctgctgctggacgtggctcccctgtccctggggctggagacggctgggggcgtgatgactgccctgataaagcgcaactccaccatccccaccaagcagacacagattttcaccacctactctgacaaccaacccggggtgctgatccaggtgtatgagggcgagagggccatgacaaaggacaacaacctgctggggcggtttgacctgactggaatccctccagcacccaggggagttcctcagatcgaggtgacgtttgacattgatgccaatggtattctcaatgtcacagccatggacaagagcaccggcaaggtgaacaagatcaccatcaccaatgacaagggccgcctgagcaaggaggagattgagcgcatggttctggatgctgagaaatataaagctgaagatgtgtaaccctatcatcacaaaactctaccaaggaggatgcactgggcctgcctgcggaacagggtatgtgcctggaaggcctgccacaggccccacaattgaagaagtagattaattctttttagaactgaagcatcctaggatgcctctacatgtatttcattcccctcatcttcaaacatcattattattcttgaccagacctgaatctaagttaccatcccttggaaattctggagaa

SEQ ID NO: 344280 - DNA, 1599 bp, Artificial Sequence
  derived and/or modified sequence
atggccacagccaagggcatcgccatcggcatcgacctgggcaccacctacagctgtgtgggcgtcttccagcacggcaaggtggagatcatcgccaatgaccagggcaacagaaccacccccagctatgtggccttcacagacacagagcggctgattggagatgctgccaagaaccaggtggccatgaacccccagaacacagtgtttgatgccaagaggctcatcggcaggaagttcaatgaccctgtggtgcaggccgacatgaagctgtggcccttccaggtgatcaatgaaggaggcaagcccaaggtgctggtgtcctacaagggggagaacaaggccttctacccagaggagatcagctccatggtgctgaccaagctgaaggagacagctgaggccttcctgggccaccctgtgaccaatgctgtgatcaccgtgcctgcctacttcaatgacagccagaggcaggccaccaaggatgctggggtgattgctggcctgaatgtgctgcgcatcatcaatgagcccacagctgctgccatcgcctacggcctggacaagggcggccagggcgagcggcacgtgctgatctttgacctgggcggcggcacctttgatgtgtccatcctgaccattgatgatggcatctttgaggtgaaggccacagctggggacacccacctgggcggagaagattttgacaaccggctggtgagccactttgtggaggagttcaagaggaagcacaagaaggacatcagccagaacaagagagctgtgcggcggctgaggacagcctgtgagcgggccaagaggaccctgagcagcagcacccaggccaacctggagattgacagcctgtatgagggcatcgacttctacaccagcatcacccgggccaggtttgaggagctgtgtgccgacctcttccggggcaccctggagcctgtggagaaggccctgagagatgccaagatggacaaggccaagatccatgacatcgtgctggtgggcggcagcacccgcatccccaaggtgcagaggctgctgcaggactacttcaacggccgggacctgaacaagagcatcaacccagatgaggccgtggcctatggagctgctgtgcaggccgccatcctgatgggagacaagtctgagaaggtgcaggacctgctgctgctggatgtggcccccctgagcctgggcctggagacagctgggggcgtgatgacagccctgatcaagaggaacagcaccatccccaccaagcagacccagatcttcaccacctacagcgacaaccagcccggggtgctgatccaggtgtatgaaggagagcgggccatgaccaaggacaacaacctgctgggccgctttgacctgaccggcatccccccagccccccggggcgtgccccagatcgaggtgacctttgatattgatgccaacggcatcctgaatgtgacagccatggacaagagcacaggcaaggtgaacaagatcaccatcaccaatgacaagggccgcctgagcaaggaggagattgaaagaatggtgctggatgctgagaagtacaaggccgaggatgtgtag

SEQ ID NO: 344281 - DNA, 1599 bp, Artificial Sequence
  derived and/or modified sequence
atggccaccgccaagggcatcgccatcggcatcgacctgggcaccacatattcgtgcgtgggggtgtttcaacatgggaaggtcgaaatcattgctaatgatcaggggaaccgcaccactcctagctacgttgcattcacagacacagagcggcttatcggagacgcagccaaaaatcaggtcgcgatgaatccccagaacaccgtgtttgacgccaaacgattgattgggcgtaaattcaatgaccccgttgttcaggctgacatgaagctgtggccgtttcaggtgatcaatgagggaggcaagccgaaggttctagtgtcatataagggggagaacaaagcattttatcccgaagaaatctcatctatggtgttaacaaaattgaaagaaactgcagaggcatttttgggacatcctgtgactaatgcagtaattaccgttcctgcctactttaatgactctcagcgccaggctactaaggacgccggggtcattgcagggttgaacgtgctgagaatcatcaacgagccaaccgcagcagccattgcatacggcttggataagggaggtcagggagagcgccacgtcctgatttttgaccttggagggggaacatttgatgtttccatactcacaatcgacgacggcatctttgaagtcaaggctacagctggcgatacccacctcggaggagaagattttgataacagactcgtgtcacacttcgtcgaggaatttaaacggaagcacaagaaggacatctcacagaataaaagagccgtgagacgcctgcgcaccgcatgcgagcgagctaagcgcactctgagttccagcacacaggccaatctggagattgacagcctgtatgagggaatcgacttttatactagcatcacgcgggctcggtttgaagagctctgtgcagacctgttccggggcaccctcgaaccagtggaaaaggcccttagggacgccaaaatggataaggcaaagatacacgatatagtcctggtaggcggatccacccggatcccaaaggtgcagaggcttcttcaggactacttcaacggacgcgatctgaataagtccattaatcctgacgaggctgtagcttacggagccgcagttcaggccgcaatcttgatgggtgacaaaagcgaaaaagtgcaggacctcttgctgctggacgtggctcctctctctctcggcctggaaacggccggcggcgttatgaccgcactcatcaagaggaatagcaccattcccacaaagcagacccagatcttcaccacatactctgacaaccaacccggggtgttgatccaagtgtatgagggagagcgtgcaatgactaaggacaataatcttctggggagattcgatttaacagggatcccccccgccccaagaggagtaccccagatcgaggtgacattcgacatcgatgctaacggcatcctgaacgtgactgcgatggataaatctactggcaaggtaaacaagatcactattactaatgataagggaaggctgtccaaggaagagatcgagcgcatggtgttagatgccgaaaagtataaggccgaggacgtatag

SEQ ID NO: 344282 - DNA, 1599 bp, Artificial Sequence
  derived and/or modified sequence
atggcaacggcaaaggggatcgccattggaattgacctaggtaccacatacagttgcgtcggagtgtttcagcatggcaaggtcgagataatcgctaacgaccagggtaatcggaccaccccatcttacgtcgctttcaccgacactgagagacttatcggcgatgcagctaagaaccaggtggccatgaaccctcagaataccgttttcgatgccaaacgtcttatcggacggaaattcaatgaccccgtcgtgcaggctgacatgaagctctggccattccaagtgattaacgagggtggcaagcccaaggtgctggtaagctataagggggaaaataaggctttctaccctgaggagatctcgtccatggttctgacgaaactcaaggaaacagccgaggccttcctcgggcatcctgtgacgaatgctgttattaccgtacctgcgtatttcaacgacagccagcgacaggcaacaaaggacgccggagtgatagcagggcttaatgtgctcagaattataaacgagccaacagccgctgccatcgcttacggcctcgataagggagggcaaggtgaacgacacgtactgatcttcgacctgggaggaggaacttttgatgtgtccatccttacaatcgacgacggaattttcgaagtgaaggcaactgctggtgatacgcacctgggaggcgaggactttgacaaccggctggtgtcccattttgtggaggagttcaaaagaaaacacaagaaagatatctcacaaaataaacgggctgtccgaagattgaggaccgcttgcgaaagagcaaagcgaacattgagttctagtacacaggccaatctggagatcgattccctgtatgagggtatagatttctacaccagcataacccgggcacgctttgaggagctgtgtgctgatttgttccgaggaaccttggagcccgtggagaaagctctgcgggatgccaaaatggataaggccaaaattcatgacatcgtgttggtcggaggctccactaggattcccaaagtgcagagactgttacaagattactttaacggtcgggatctaaacaaatcaataaatcctgacgaagctgtggcctatggcgctgccgtgcaggcagcaatacttatgggagataaatcagagaaagtgcaggatctgctgttactggacgtggccccactgagcctcgggctggagacagccggaggggtcatgacggccttaatcaagcggaatagtacaatcccaacaaaacaaactcagattttcactacttacagtgataatcagccgggagtcctcatccaggtgtacgaaggagagcgggctatgaccaaggataacaaccttctggggagattcgatcttaccggcatacccccagctcccaggggcgtgcctcagatcgaggtgactttcgacattgacgctaacggtatccttaatgtcacggcaatggacaaaagcactggtaaggttaacaagattaccattacgaatgataaagggagattgtccaaggaggagattgagaggatggtcctggatgcagagaagtacaaggcagaggacgtctag

SEQ ID NO: 344283 - DNA, 1926 bp, Artificial Sequence
  derived and/or modified sequence
atggccaccgcaaaggggattgcgatcggcatagacctcgggacgacctacagctgcgtcggtgtcttccaacacggcaaagtcgagattatcgccaatgatcagggcaatcgcaccacgcccagttacgtggcgttcacagatacagagaggctaatcggggacgctgccaagaatcaagtggccatgaatcctcaaaacacggtgttcgacgccaagaggctgatcggacgcaaatttaacgatcctgtagtgcaggcggatatgaagctgtggcctttccaggtcatcaatgaagggggaaaaccaaaggtgctggtgagttataagggcgagaataaagcattttatccggaggaaatttcatcaatggtgctgacgaagctgaaagaaaccgcagaagcttttctggggcatcctgtcacaaacgccgttattacagttccagcttattttaacgatagccaaagacaggctacaaaagacgctggggtgatcgcagggctaaacgtcctgagaatcataaatgaacctactgcggctgctattgcctatgggctggataagggaggccagggcgaacgacatgtgctgatctttgatcttggcggtgggacctttgatgttagtatcttgactattgatgacggcattttcgaggtaaaagcaactgctggagacactcatctgggcggggaagatttcgacaaccgcctcgtgtcccatttcgtggaagagttcaagcgcaagcataaaaaggacatatcccagaataagagggcagtgaggagacttcgaaccgcctgcgagagagctaaacgcacgctcagttcctctacacaggccaatttagagatagattcgctttacgaaggaatcgatttctacactagtatcactcgcgcaaggtttgaggaactgtgcgccgatctattccgggggaccttagagccggtggagaaagctctgcgcgacgcaaaaatggacaaggccaagatccacgatatagttctggtggggggctctaccaggattcctaaggtccagagattgctgcaggactacttcaacggcagggacctgaacaagtctatcaatcccgacgaagcagtggcctatggcgctgctgtgcaggcggctatactgatgggagataagagtgagaaagtgcaggatctcctgctgctggacgtggcccctctgagcttagggctcgagacagcggggggggtaatgaccgccctgattaagcgcaactccacaatccccacaaaacaaacacagatattcaccacatactccgacaatcagccaggcgtcctgatacaggtttacgagggcgaaagagcgatgactaaggataataacctcctgggacgttttgatctcactggcattccgcctgctccacggggtgtaccccagatcgaggtaacattcgacattgatgctaacggaatcctgaatgtgacagccatggataagagtacgggaaaggtgaataagattacaattaccaacgataagggccggctgtctaaggaggagatagagcggatggtcctcgacgccgagaagtataaggccgaggatgaggtccagagggagaaaatcgccgcaaagaatgcactcgaatcttacgcgtttaatatgaaaagcgtcgttagcgatgaaggattgaagggcaaaatttctgagtccgacaaaaataagatcctggacaaatgtaatgagctgctctcttggctggaagtgaatcagttagccgagaaggatgagttcgaccataaacgcaaggagctcgagcaaatgtgtaacccgattatcaccaagctttaccaaggtggttgcaccggtccggcatgtggcaccggatatgtgcctggtcgaccagctaccgggcccaccattgaagaagtggattag

SEQ ID NO: 344284 - DNA, 1926 bp, Artificial Sequence
  derived and/or modified sequence
atggctaccgcaaaagggatagcaattggcattgaccttgggacaacttactcctgtgtcggtgtgtttcagcacggaaaagttgagatcattgctaatgaccaaggcaataggactacaccttcttatgttgcctttaccgatacagagaggctaatcggggacgcagcaaagaaccaggtcgccatgaatccccagaacactgtgtttgacgccaagagacttatagggaggaaattcaacgatcccgtcgtgcaggcagatatgaagctgtggcccttccaagtgataaacgaaggcggcaagccaaaagtgctggtgagctataaaggagagaataaagccttttaccccgaagagatctcgtccatggttctcacaaagctaaaggagaccgcagaggcatttctgggccaccccgttaccaatgccgtcattaccgttcccgcctacttcaatgatagccagcgccaggctaccaaggacgctggcgttattgctggcctgaacgtcttgagaattattaatgagcctacagccgcggccattgcctatggcctggacaagggtgggcagggtgaacgtcacgtcttaatcttcgacctcgggggggggacgttcgacgtgtccattcttaccatcgacgatggtatttttgaggtgaaagccacggcgggagatactcatcttggcggagaagacttcgataataggttagtgtcacatttcgttgaggagtttaagcggaagcacaagaaagacatatcgcaaaacaagagggctgtgagaaggctgcgtaccgcctgcgagcgagctaagcgtaccctgtctagttcaacccaggccaacttggagattgatagtctgtatgaaggcatagacttttacacttccattacacgtgcccgatttgaggagctatgtgcggatctgttccggggcacactagaacctgtggaaaaggccctgagagacgcgaaaatggataaggcaaagatccacgacatagtcctggtgggcggatccacccggatccccaaggttcaaaggctgctccaggactactttaacggcagggatctgaacaagtccattaatccagatgaagcagtcgcatacggggccgccgtccaggcggccatcctaatgggggacaaaagcgaaaaagttcaggaccttctcctgctggacgtggccccgctgagcctgggcttagagacagctggcggtgtgatgacagctctgatcaaaaggaatagcacaattcccaccaagcaaacccaaatttttaccacctactccgacaatcagcccggagtgctcatccaggtgtacgaaggagaacgcgctatgactaaggacaacaacctactggggcgtttcgacctgacggggatccctcccgcccctcgcggtgtccctcagatcgaggtgactttcgatatcgacgccaatggcattctgaatgtgaccgctatggacaaatcaacaggtaaagtaaacaagatcacaatcacaaatgataagggtcgcctctccaaggaggaaatagagcgcatggtgttagacgccgaaaaatataaagctgaggacgaagtgcagcgcgaaaagatcgccgctaagaatgcattggagagctatgctttcaatatgaaatcagttgtgagtgacgaaggtttgaagggaaagatttcagagtccgacaaaaataaaattctggataagtgtaacgaactgcttagctggttggaagtgaatcagctcgcagagaaagacgagtttgatcacaaaagaaaagagctggagcaaatgtgcaaccccattattactaaactgtaccaaggtggctgcactggtcctgcatgcggaacaggttatgttcccggcagacctgccactggtccaactatcgaagaagtggattag

SEQ ID NO: 344285 - DNA, 1599 bp, Artificial Sequence
  derived and/or modified sequence
atggctactgctaagggaattgcaataggcatcgacttgggaactacttattcttgtgttggtgtgtttcaacacggcaaggtggagataatcgccaatgaccaagggaataggactaccccttcctacgttgcctttacagataccgagaggttgattggcgatgctgcgaaaaaccaagttgctatgaatccccaaaacacagtgtttgacgcgaaacgacttatagggcggaagtttaatgacccagtcgtgcaggcagacatgaaactttggcccttccaggtgatcaatgaggggggcaaacccaaagttctggtgagctacaaaggagagaacaaggctttctaccccgaggaaatatctagcatggtactcactaaactgaaggagacggcggaagcattcctgggccaccccgttactaatgccgttatcacagtaccagcttactttaacgactctcagcggcaggcgaccaaggacgccggcgtgattgcgggccttaatgtgttacgaatcatcaacgagcccactgcagccgccatcgcttatggcttggataaaggaggtcaaggcgaacgacatgttctcatctttgacctgggagggggcacgtttgacgtgtcaatactgactatagacgacggaatattcgaagtgaaggcaactgccggggatacccacctcggcggggaggactttgataacaggcttgtttcccactttgtggaagaattcaagcgcaaacacaagaaagatatctctcagaacaagagggccgtgcgtagactgagaacggcctgcgaacgcgccaaaaggaccctcagctctagcacgcaggccaatctcgagattgattccctctacgagggtattgatttctacacaagcatcacacgcgcccggttcgaggagctatgcgcagacctgttccgcggtaccctggagcctgtggaaaaagccttgagagatgcgaaaatggacaaggcaaaaatacacgatatcgtgctggtcggaggtagcacacggatcccaaaagtgcaacggctgctgcaggactattttaatgggcgcgatctgaataagtctattaaccccgacgaagccgtcgcgtacggcgctgcagtgcaggccgcgattctgatgggagataagagcgagaaggttcaggacttactcctgctggacgtcgctccactatcgctagggctagagactgcaggtggcgtcatgacagccttaattaagcgcaactctactatccctacgaagcaaacgcaaatctttactacgtactcagataaccaaccaggcgtgcttattcaagtctacgagggagaaagagccatgacgaaggacaacaatctgctgggccgctttgatctgacagggattcccccagccccacgcggggtcccacagattgaggtaacattcgatatagacgctaatgggatactgaatgtcaccgcaatggataagagtacaggtaaggtcaacaagattaccatcactaatgataagggtcgcttaagtaaggaggagatagagcgtatggttttggacgctgagaaatacaaagccgaggacgtctag

SEQ ID NO: 344286 - DNA, 1599 bp, Artificial Sequence
  derived and/or modified sequence
atggccaccgcgaaaggcattgcaataggaattgacctgggcacaacatactcatgcgtgggggtgttccaacatgggaaagtggaaataattgcaaacgaccaggggaaccgaaccaccccttcttacgtggcttttaccgatacagaacggctgattggcgacgctgccaagaatcaggtcgcaatgaatccacagaacacggtgtttgacgccaaaaggctcattggccggaagttcaatgacccagttgtacaggccgatatgaaactgtggccttttcaggttatcaacgaggggggaaagcccaaagtgttggtgtcctacaagggtgaaaataaagctttctaccccgaggagatttcatccatggtgctgaccaagctgaaggagacggccgaggcattcttgggtcatccagttacgaatgcggtcattactgtgcccgcctacttcaatgattcccaacggcaagccaccaaagacgcaggggtgatcgccggactcaacgtcctcaggataattaacgaacccaccgccgctgctattgcttatggcctggataaagggggacagggcgaacgacatgtgttaatttttgatctgggaggtggcacattcgacgtgtcgatcctaacaatcgacgatggaattttcgaagtcaaagccaccgccggcgatacccatcttggtggtgaagacttcgacaatcgactggtgtcccacttcgtggaggaattcaagaggaaacacaaaaaggacatctctcagaataagcgggccgtgagacgtttgaggacagcgtgcgaacgcgccaagcgcaccttgtcatcttcaactcaggccaacctcgaaatcgatagcctgtacgaaggaattgatttttataccagcatcacccgtgctcgttttgaggaactgtgtgccgatctctttaggggtactctggaacccgtggagaaagccctacgtgacgctaagatggataaggctaagattcacgatatagtgttggttggcggatcaacacgcatccccaaagtccagagattgctccaggactactttaatggccgcgacctgaacaagagcatcaatcccgatgaggcggtcgcctacggagccgctgtgcaggctgccattctgatgggcgataagtccgaaaaagttcaagatctgctgcttctggacgtcgcacctctcagcttgggcctggagacagccggcggcgtaatgaccgccctaatcaagagaaacagtaccattcctacgaagcagacccagatttttaccacatattctgataaccaacctggagtcttaattcaagtgtacgaaggcgaaagggccatgaccaaggataataacctactcggccgattcgatttgaccggtattccacccgctccaagaggtgtacctcagatcgaggtgaccttcgatatcgacgccaatggcattctgaacgttactgctatggataagagcaccggcaaagtgaataagatcaccataacaaacgacaaaggccggttgagcaaggaggagatcgaacgcatggtgctggacgcagaaaagtataaagccgaagatgtgtag

SEQ ID NO: 344287 - DNA, 1926 bp, Artificial Sequence
  derived and/or modified sequence
atggctaccgcgaaaggaatcgctatcgggattgatttgggaaccacctatagctgtgtgggagtcttccaacatggaaaagttgaaataattgcgaatgaccaagggaacaggacaactccgagctacgtggccttcaccgataccgaaaggctgatcggcgacgccgcgaagaatcaggttgccatgaacccccagaacactgtgttcgacgccaagcgtctcattggcagaaaatttaatgatcctgtggtacaggctgatatgaaattatggccatttcaagtaatcaatgaaggcggaaaacccaaggtgctggtgtcctacaaaggggaaaacaaggccttctaccccgaggaaatttcctccatggtcctgacgaagcttaaagaaaccgccgaggccttcctgggacaccccgtgaccaatgcagtgatcaccgtgcctgcgtacttcaacgattcacagagacaggccacgaaagatgctggtgtgatagccggcttgaacgttctacgcatcattaatgaaccaaccgccgcggctattgcatacggtctagacaaggggggtcaaggggaaaggcatgtgctaattttcgacttagggggcgggacatttgatgtgtcaatattaacaatagatgatggcatcttcgaggtcaaggctacagcaggagacactcacctgggtggggaggacttcgataatcggcttgtaagccacttcgtagaggagttcaaaagaaagcataaaaaggacatctcccagaacaagagagccgttcggcgcttgcgcacggcctgcgaaagagctaaacgcacattgagttcaagtacccaggcgaacctggagattgactctctgtacgaggggatagatttctacactagcattactcgggctcgctttgaagagttgtgcgccgatttgttcaggggaacccttgaaccagttgagaaggctttgagggacgccaaaatggacaaagctaagatccacgacatcgttctagtgggaggttctacccgtatccctaaagtgcaacgcttgttacaggactactttaatgggcgcgacctaaataagtctatcaaccctgatgaagcagtagcttatggcgcagcagtgcaggctgctattttaatgggcgacaaaagcgaaaaggtccaggacctgctcctgctcgacgtagcgcctttatcactggggcttgaaacagctgggggagtgatgaccgcgctaattaagcggaacagcacgattcccacgaaacagacccagattttcacaacctattcggataaccaacctggcgtcctgatccaagtatacgagggggaacgggcgatgacgaaggataataatctgctgggaagattcgatctcacaggtatcccccctgcccctaggggcgtgccacagatcgaagtgaccttcgacatcgacgcaaacggcatcctcaacgtaactgcaatggataagagcactggtaaagtcaacaagataactatcaccaacgacaaagggcgcctgtctaaggaggaaatcgaaagaatggtgcttgacgccgagaaatacaaagcggaagacgaggtccagagggagaaaatcgccgcaaaaaacgcactggaatcctacgcatttaatatgaagtcagtggtatccgatgagggactcaagggtaaaattagtgagagcgacaaaaacaagatccttgataagtgcaacgagttactctcatggctcgaggtgaatcagttggcagagaaggacgaattcgatcacaagagaaaagagctggagcagatgtgcaacccgattatcacgaagctttatcagggcgggtgcaccggtccagcatgtggtactggatacgtgcctggccggccggcgaccggaccaacaatcgaggaggtggattag

SEQ ID NO: 344288 - DNA, 1926 bp, Artificial Sequence
  derived and/or modified sequence
atggctactgccaaggggatcgccattggtatagatctcgggactacttatagttgtgtgggggtttttcagcacggcaaggttgagatcatcgccaacgaccagggcaacagaaccactccatcttatgtcgcgtttacggacaccgagagactgattggagacgctgccaagaatcaggtcgctatgaacccccagaacaccgtattcgacgccaaacgccttattggccgcaagtttaatgacccagtggttcaggcggacatgaaactttggccttttcaggtgatcaatgagggtggaaaacctaaggtcctggtgtcatataagggggaaaacaaggccttttatcccgaagagatttcgtcaatggtgctgacaaagctgaaggagactgccgaggctttcctgggacacccagtcacaaacgcggtcatcacagttcccgcttactttaacgattcacagagacaggcaaccaaggacgccggtgtgatcgccggcctgaacgtgctgaggatcataaacgagcctacagcggctgccattgcctacggcttggataagggaggacagggcgaacggcacgtgctgatctttgatctgggcggggggaccttcgacgttagtatcctcaccatagatgacggcatatttgaggtcaaagctacagccggagatacccacttggggggtgaagacttcgataatcgactggtgagccattttgtcgaggagttcaagagaaaacacaagaaggatatcagccaaaataaaagagctgttcggcgactgcgtaccgcttgcgagcgggcgaaaagaacgctgtcaagctccacccaggctaacctagagattgatagtctgtacgagggaatcgacttctacacctccatcacccgcgccaggttcgaagaactgtgtgcagacctttttagaggtaccctcgagcccgtggagaaagccctgagggatgctaaaatggacaaggctaagatccacgacatagtactcgtgggcgggagtacacggatccccaaagtccagcggctactacaagattattttaatggccgggatctaaataaaagcatcaacccagatgaggcggtagcctacggagctgctgtgcaggcggctatcctgatgggcgataagagcgaaaaggtccaggaccttttactgctagatgtcgcaccattgtcactagggttagagactgccggtggagttatgacggctctgattaaacgtaatagcacgatcccaacaaagcagacacagatttttacaacatacagcgataatcagcctggcgtgctgattcaggtgtacgagggggaacgcgctatgacaaaagacaataatttactaggaaggtttgaccttacaggcatccctcctgccccaaggggggtcccacagatcgaagttacctttgatatagacgctaatgggatcttgaatgtaacggccatggacaagagcacgggcaaagtcaataagatcaccataactaatgacaaaggacggctcagcaaagaagagattgagagaatggtgttagacgctgagaaatataaagcagaggacgaagtccagcgggaaaagattgccgccaagaatgctctggagagttatgctttcaacatgaaatccgtagtgagcgatgaaggactcaagggcaagatatccgagagcgacaagaataagattctggacaaatgcaacgaactcctttcctggctggaagttaatcagctcgccgaaaaggatgagttcgaccacaagcggaaggagctagagcagatgtgtaaccctatcatcacaaaactgtatcaaggaggctgtaccggcccagcctgtggaaccggatatgtgccggggcggcccgcaacaggtccgactattgaggaagttgattag

SEQ ID NO: 344289 - DNA, 2544 bp, Artificial Sequence
  derived and/or modified sequence
gggccagtttggaaaaagattactgagttggagccgtctcaaatttgcagggagggacggggtggggggtggggggaccccggttgtgcagtttgatattgagggagcccccacctactcgctggggctgcgtaatctggacgtttccaaactgaagcgaaggcgtcgggagactaggcctcagagaaccatggctactgccaagggaatcgccataggcatcgacctgggcaccacctactcctgtgtgggggtgttccagcacggcaaggtggagatcatcgccaacgaccagggcaaccgcaccacccccagctacgtggccttcacagacaccgagcggctcattggggatgcggccaagaaccaggtagcaatgaatccccagaacactgtttttgatgctaaacgtctgatcggcaggaaatttaatgatcctgttgtacaagcagatatgaaactttggccttttcaagtgattaatgaaggaggcaagcccaaagtccttgtgtcctacaaaggggagaataaagctttctaccctgaggaaatctcttcgatggtattgactaagttgaaggagactgctgaggcctttttgggccaccctgtcaccaatgcagtgattaccgtgccagcctatttcaatgactctcaacgtcaggctactaaggatgcaggtgtgattgctggacttaatgtgctaagaatcatcaatgagcccacggctgctgccattgcctatggtttagataaaggaggtcaaggagaacgacatgtcctgatttttgatctgggtggaggcacatttgatgtgtcaattctgaccatagatgatgggatttttgaggtaaaggccactgctggggacactcacctgggtggggaggactttgacaacaggcttgtgagccacttcgtggaggagttcaagaggaaacacaaaaaggacatcagccagaacaagcgagccgtgaggcggctgcgcaccgcctgcgagagggccaagaggaccctgtcgtccagcacccaggccaacctagaaattgattcactttatgaaggcattgacttctatacatccatcaccagagctcgatttgaagagttgtgtgcagacctgtttaggggtaccctggagcctgtagaaaaagcgcttcgggatgccaagatggataaggctaaaatccatgacattgttttagtagggggctccacccgcatccccaaggtgcagcggctgcttcaggactacttcaatggacgtgatctcaacaagagcatcaaccctgatgaggccgtagcatatggggctgcggtacaagcagccatcctgatgggggacaagtctgagaaggtacaggacctgctgctgctggacgtggctcccctgtccctggggctggagacggctgggggcgtgatgactgccctgataaagcgcaactccaccatccccaccaagcagacacagattttcaccacctactctgacaaccaacccggggtgctgatccaggtgtatgagggcgagagggccatgacaaaggacaacaacctgctggggcggtttgacctgactggaatccctccagcacccaggggagttcctcagatcgaggtgacgtttgacattgatgccaatggtattctcaatgtcacagccatggacaagagcaccggcaaggtgaacaagatcaccatcaccaatgacaagggccgcctgagcaaggaggagattgagcgcatggttctggatgctgagaaatataaagctgaagatgaggtccagagggagaaaattgctgcaaagaatgccttagaatcctatgcttttaacatgaagagtgttgtgagtgatgaaggtttgaagggcaagattagtgagtctgataaaaataaaatattggataaatgcaacgagctcctttcgtggctggaggtcaatcaactggcagagaaagatgagtttgatcataagagaaaggaattggagcagatgtgtaaccctatcatcacaaaactctaccaaggaggatgcactgggcctgcctgcggaacagggtatgtgcctggaaggcctgccacaggccccacaattgaagaagtagattaattctttttagaactgaagcatcctaggatgcctctacatgtatttcattcccctcatcttcaaacatcattattattcttgaccagacctgaatctaagttaccatcccttggaaattctggagaaggagtctcatgcaccacctatcacactccctcacatcctgtttctgactttggaatggactcaggaaaactaggcccctctttaaaccgtgtgatgtatttgaatgtctgttatttccagccaccctaacattcttcttcctgtgtggatgcttatttgtcaatcagtaaatttgttcgtaaagaaaattacttctggtatttaggctgtgaatgtaccttgaaggggagagttcatggagagagcatgtgttctctgattgtgaggtcactgtgaatgattaaattggtaagggtaaagta

SEQ ID NO: 344290 - DNA, 2019 bp, Artificial Sequence
  derived and/or modified sequence
aaactcgacgcgccggtgcctgcagccgcacaggttcgctctgggaagccttgggacaacgggagtcactctcgaaaaaggcctcagagaaccatggctactgccaagggaatcgccataggcatcgacctgggcaccacctactcctgtgtgggggtgttccagcacggcaaggtggagatcatcgccaacgaccagggcaaccgcaccacccccagctacgtggccttcacagacaccgagcggctcattggggatgcggccaagaaccaggtagcaatgaatccccagaacactgtttttgatgctaaacgtctgatcggcaggaaatttaatgatcctgttgtacaagcagatatgaaactttggccttttcaagtgattaatgaaggaggcaagcccaaagtccttgtgtcctacaaaggggagaataaagctttctaccctgaggaaatctcttcgatggtattgactaagttgaaggagactgctgaggcctttttgggccaccctgtcaccaatgcagtgattaccgtgccagcctatttcaatgactctcaacgtcaggctactaaggatgcaggtgtgattgctggacttaatgtgctaagaatcatcaatgagcccacggctgctgccattgcctatggtttagataaaggaggtcaaggagaacgacatgtcctgatttttgatctgggtggaggcacatttgatgtgtcaattctgaccatagatgatgggatttttgaggtaaaggccactgctggggacactcacctgggtggggaggactttgacaacaggcttgtgagccacttcgtggaggagttcaagaggaaacacaaaaaggacatcagccagaacaagcgagccgtgaggcggctgcgcaccgcctgcgagagggccaagaggaccctgtcgtccagcacccaggccaacctagaaattgattcactttatgaaggcattgacttctatacatccatcaccagagctcgatttgaagagttgtgtgcagacctgtttaggggtaccctggagcctgtagaaaaagcgcttcgggatgccaagatggataaggctaaaatccatgacattgttttagtagggggctccacccgcatccccaaggtgcagcggctgcttcaggactacttcaatggacgtgatctcaacaagagcatcaaccctgatgaggccgtagcatatggggctgcggtacaagcagccatcctgatgggggacaagtctgagaaggtacaggacctgctgctgctggacgtggctcccctgtccctggggctggagacggctgggggcgtgatgactgccctgataaagcgcaactccaccatccccaccaagcagacacagattttcaccacctactctgacaaccaacccggggtgctgatccaggtgtatgagggcgagagggccatgacaaaggacaacaacctgctggggcggtttgacctgactggaatccctccagcacccaggggagttcctcagatcgaggtgacgtttgacattgatgccaatggtattctcaatgtcacagccatggacaagagcaccggcaaggtgaacaagatcaccatcaccaatgacaagggccgcctgagcaaggaggagattgagcgcatggttctggatgctgagaaatataaagctgaagatgaggtccagagggagaaaattgctgcaaagaatgccttagaatcctatgcttttaacatgaagagtgttgtgagtgatgaaggtttgaagggcaagattagtgagtctgataaaaataaaatattggataaatgcaacgagctcctttcgtggctggaggtcaatcaactggcagagaaagatgagtttgatcataagagaaaggaattggagcagatgtgtaaccctatcatcacaaaactctaccaaggaggatgcactgggcctgcctgcggaacagggtatgtgcctggaaggcctgccacaggccccacaattgaagaagtagattaa

SEQ ID NO: 344291 - DNA, 1926 bp, Artificial Sequence
  derived and/or modified sequence
atggccacagccaagggcatcgccatcggcatcgacctgggcaccacctacagctgtgtgggcgtcttccagcacggcaaggtggagatcatcgccaatgaccagggcaacagaaccacccccagctatgtggccttcacagacacagagcggctgattggagatgctgccaagaaccaggtggccatgaacccccagaacacagtgtttgatgccaagaggctcatcggcaggaagttcaatgaccctgtggtgcaggccgacatgaagctgtggcccttccaggtgatcaatgaaggaggcaagcccaaggtgctggtgtcctacaagggggagaacaaggccttctacccagaggagatcagctccatggtgctgaccaagctgaaggagacagctgaggccttcctgggccaccctgtgaccaatgctgtgatcaccgtgcctgcctacttcaatgacagccagaggcaggccaccaaggatgctggggtgattgctggcctgaatgtgctgcgcatcatcaatgagcccacagctgctgccatcgcctacggcctggacaagggcggccagggcgagcggcacgtgctgatctttgacctgggcggcggcacctttgatgtgtccatcctgaccattgatgatggcatctttgaggtgaaggccacagctggggacacccacctgggcggagaagattttgacaaccggctggtgagccactttgtggaggagttcaagaggaagcacaagaaggacatcagccagaacaagagagctgtgcggcggctgaggacagcctgtgagcgggccaagaggaccctgagcagcagcacccaggccaacctggagattgacagcctgtatgagggcatcgacttctacaccagcatcacccgggccaggtttgaggagctgtgtgccgacctcttccggggcaccctggagcctgtggagaaggccctgagagatgccaagatggacaaggccaagatccatgacatcgtgctggtgggcggcagcacccgcatccccaaggtgcagaggctgctgcaggactacttcaacggccgggacctgaacaagagcatcaacccagatgaggccgtggcctatggagctgctgtgcaggccgccatcctgatgggagacaagtctgagaaggtgcaggacctgctgctgctggatgtggcccccctgagcctgggcctggagacagctgggggcgtgatgacagccctgatcaagaggaacagcaccatccccaccaagcagacccagatcttcaccacctacagcgacaaccagcccggggtgctgatccaggtgtatgaaggagagcgggccatgaccaaggacaacaacctgctgggccgctttgacctgaccggcatccccccagccccccggggcgtgccccagatcgaggtgacctttgatattgatgccaacggcatcctgaatgtgacagccatggacaagagcacaggcaaggtgaacaagatcaccatcaccaatgacaagggccgcctgagcaaggaggagattgaaagaatggtgctggatgctgagaagtacaaggccgaggatgaggtgcagcgggagaagattgctgccaagaatgccctggagagctatgccttcaacatgaagtctgtggtgtctgatgagggcctgaagggcaagatcagcgagagtgacaagaacaagatcctggacaagtgcaatgagctgctgtcctggctggaggtgaaccagctggccgagaaggatgaatttgaccacaagaggaaggagctggagcagatgtgcaaccccatcatcaccaagctgtaccagggcggctgcaccggccctgcctgtggcaccggctacgtgcccggccgcccagccaccggccccaccatcgaggaggtggactag

SEQ ID NO: 344292 - DNA, 1926 bp, Artificial Sequence
  derived and/or modified sequence
atggccaccgccaagggcatcgccatcggcatcgacctgggcaccacctattcatgtgtgggcgtgttccaacatggcaaggtcgaaattatcgccaacgaccaaggcaacaggactacgccttcatacgtggcgttcaccgatactgaaagactgatcggcgacgccgccaagaaccaggtggccatgaatccacaaaacaccgttttcgacgccaagagactgattggtcgaaaattcaatgacccagttgtccaagccgacatgaagctttggcctttccaggtgatcaatgagggaggtaagcctaaggtcctggttagttacaagggggaaaacaaggccttttacccagaggagatttcatccatggtcttgaccaaactcaaagagacagccgaggcctttctgggccacccggtgactaatgccgtcataacggttccagcttacttcaatgactcccagcgccaagcaactaaagatgctggcgtgattgctgggttgaacgttctgcgcatcatcaatgaaccgacagccgcagccatagcttacgggctggacaagggcggtcagggtgagcggcacgtgctcatttttgatctgggaggcggaacgttcgatgtaagcattttaaccattgacgatgggattttcgaggtaaaggccacagctggagacacccatctgggcggcgaggacttcgataacagacttgtcagccacttcgtagaagaattcaagaggaaacacaagaaagacatcagccagaataagcgggctgtgcgcaggctcaggaccgcttgtgagcgcgccaagcgtacactgagtagttctacccaagcgaaccttgaaatcgatagcttgtacgaggggattgatttctacacttctatcaccagagccaggttcgaggagttgtgcgcagacctgttcaggggcaccttggagcccgtcgagaaagcactgcgagacgccaagatggataaagcaaaaatccacgatattgtgctcgtggggggcagtacccggattcccaaagtgcaaagactcttgcaggactatttcaatggtagggatctgaacaagtctattaatcccgacgaagcagtggcctatggggcggctgtgcaggctgcaattctgatgggcgacaaatctgaaaaagtgcaagatctcctactgctagacgtggctccccttagcctgggcctggagacggcaggaggggtcatgacggctttaattaaacgtaatagtactatccccaccaaacagactcagatcttcaccacttactcagataaccagccaggcgtcctgatacaagtgtatgagggggagcgggcaatgactaaggataataatcttcttggccggttcgacctgacaggtatccctcctgcgccacggggggtccctcagatagaggtgaccttcgacattgacgccaatggcatccttaatgtcactgcgatggataagagtacaggcaaggtgaataagattactattaccaacgataaaggacggctcagcaaggaggagattgagcgcatggtactggacgcagaaaaatacaaagccgaggatgaggttcaaagggagaagattgcggccaagaatgcactggagtcgtacgcatttaacatgaaatccgtggtgagtgacgaagggctcaaaggcaagatctcggaaagcgacaagaacaaaattctagataaatgcaatgaactgctgtcatggttggaagtgaaccagctggctgagaaggatgaatttgatcataagcggaaggagctcgagcagatgtgtaatcccataattacaaaactttaccagggggggtgcactggccctgcatgtggcaccggctacgtgccagggcggcccgcaaccgggcccacaatcgaggaagttgactag

SEQ ID NO: 344293 - DNA, 1926 bp, Artificial Sequence
  derived and/or modified sequence
atggccaccgccaagggcatcgccatcggcatcgacctgggcaccacctattcctgcgtgggggtgttccagcacggcaaggtggagatcatcgccaatgatcagggcaacaggacaaccccctcttatgtggcattcactgatacagagcggctcatcggggacgcagcgaaaaatcaggtggcgatgaatccacaaaataccgtgttcgacgcaaaacgactgattgggcgaaagtttaacgaccccgtggtccaagcagatatgaaactgtggccctttcaggtgatcaatgaggggggaaaacccaaagtgttggtgtcctacaagggggagaataaagcattttatcctgaagaaatatcctccatggtgctgaccaaattgaaagaaaccgcagaggcctttttgggccacccagtgacaaacgctgtgatcacagtgcccgcctattttaatgactctcagcgacaggctacgaaagatgcaggtgtgatcgcgggcctgaatgtcctgcggatcattaacgagccaacagctgccgctatcgcctatggactcgataaaggaggacagggcgaacggcacgtgttaatattcgacctcggaggcggcaccttcgacgtgagcatcctcacaatcgacgatgggatattcgaagtgaaagcaacggccggtgatactcacctgggcggggaagacttcgacaatagactagtgagccattttgtagaggaatttaagagaaagcataaaaaggacatatcacagaacaagcgtgctgtgcggcgcctgaggacggcgtgcgaaagggccaagagaaccctcagctcttctacccaggctaacctggagattgattccctgtacgagggtatcgatttctacacctccatcacacgtgccagattcgaagaactgtgcgcagaccttttcagagggacacttgaacctgttgaaaaggctctgcgcgacgctaagatggataaggcaaaaattcacgacattgtcttggtcggtgggtcaacaagaatccctaaggtacagcgactcctccaggattacttcaatggccgagatttaaacaagtcaataaacccggacgaagccgtcgcctatggtgccgctgtgcaggcggcaattttgatgggcgacaaatctgaaaaggtacaagatttactcttgctcgacgtcgcgcccttatccttaggcttagagacagccggaggcgtaatgaccgcgctgatcaaaagaaactcaactattcctaccaaacagacccagatctttacaacatatagcgataatcagcctggcgtgctgattcaggtgtatgaaggtgagcgggccatgaccaaagataacaatctgttgggaaggttcgacctgacggggatcccaccagcgccccgcggcgtgcctcaaatagaggtcaccttcgatatcgatgctaatgggatcctgaatgtgactgcaatggataagtccacagggaaggtgaacaaaatcacaattaccaatgacaaaggacgcttaagtaaggaggagatcgagcgcatggtgctggatgccgagaaatacaaagcagaggatgaggtccagagagaaaagatcgctgccaagaatgcccttgaatcctacgcttttaatatgaaatctgtggtcagtgatgagggccttaaggggaagatatctgagtctgataaaaacaagatcttggacaaatgtaatgaactgctcagttggttagaagtgaaccaacttgccgaaaaggacgagttcgaccataagagaaaggagctggaacagatgtgcaatcctattatcacaaagttataccagggaggctgcacaggacccgcctgcggaaccggctacgttcccggacgacctgccactgggcctacaatcgaggaggtcgactag

SEQ ID NO: 344294 - DNA, 1599 bp, Artificial Sequence
  derived and/or modified sequence
atggccaccgccaagggcatcgccatcggcatcgacctgggcaccacatactcctgtgtcggcgtgtttcagcacgggaaggtcgagatcatcgctaatgaccaaggaaataggacaactccatcttacgtcgcctttacggacacagagagactgatcggagacgccgctaaaaatcaggtggctatgaatccacagaatacggtgttcgacgctaagcggcttatcggtcgaaaattcaatgacccagttgtccaagcggatatgaagctgtggccttttcaggtgataaacgagggcggcaagccaaaagttttggttagttataagggggagaacaaggcgttctaccccgaggagattagcagtatggtactaaccaaattgaaagagaccgctgaggcgttcctggggcatccagttaccaacgctgtcattactgtcccagcttatttcaatgattcccagcgtcaggcgaccaaagatgcaggcgttatcgcaggcctcaacgttttgcggataataaacgagcctaccgcagccgccatagcttacggcctggataaggggggacagggagagcgacatgttctcattttcgatctcggggggggaactttcgacgtgtctattcttacaatcgatgacgggattttcgaggtaaaggccaccgcaggagatacacatctaggcggggaagattttgacaaccgcctggtgagtcatttcgtcgaggaattcaaacgaaaacataagaaagacattagtcagaacaaacgggctgtccgtcgactaagaactgcgtgtgagagagctaagaggaccctctcatcgtctacacaggctaacctcgagatcgacagtctttatgaaggcatcgacttctatacttctatcacgagagcccggttcgaggagttatgcgcagatctgtttcgcggaaccctggagcccgtggagaaggccttaagagatgccaagatggacaaggccaagatccatgatattgtgctggtgggtggttccacacggatccctaaggtacaaagacttttgcaggattatttcaacggccgcgatctgaacaagagcattaatccggatgaagccgtggcctacggcgctgccgtccaggccgcaatcctcatgggcgacaagtccgaaaaagtgcaggatctgcttttactcgatgtagccccattatcattaggactggaaaccgctggaggcgtgatgaccgcactaatcaagcggaatagcaccatcccaactaagcagacccagatcttcaccacatattccgacaaccagccaggagttttgattcaagtgtacgagggagagagagccatgactaaggacaacaacctgttagggcgatttgatctcaccggcattcctccagccccgaggggagtccctcagattgaggtgacgtttgatatcgatgctaatggaatcctgaacgtcaccgctatggataaatctacgggaaaggtcaacaagattactattaccaatgataaggggcgtctaagcaaggaagagatcgagcgcatggtcctagatgccgaaaaatacaaggccgaagacgtgtag

SEQ ID NO: 344295 - DNA, 1599 bp, Artificial Sequence
  derived and/or modified sequence
atggccaccgccaagggcatcgccatcggcatcgacctgggcaccacctatagttgcgttggcgttttccagcatggaaaggtcgaaatcatcgcgaatgaccagggtaatcgtacgacaccttcctatgtggcttttacagatacagagaggctgatcggggatgcagctaaaaaccaggtggccatgaacccgcaaaacaccgtattcgatgctaagaggctaataggacgaaagttcaatgatcctgttgtgcaggcagacatgaaactctggccatttcaggttataaatgaggggggaaagcccaaggtcctcgtttcttacaagggtgagaacaaggccttctaccccgaggagatcagtagcatggttttgactaagttgaaggagactgccgaggctttcctgggtcatcctgtcacgaatgctgttatcaccgttccagcttacttcaatgatagtcaacgacaagccaccaaggatgcgggtgtcatcgcaggtcttaacgtcctcaggattatcaacgaaccgaccgccgctgcaatcgcgtacggactagataaggggggccagggagaacgacatgtgctgatttttgatctcggcggaggtacattcgatgtgtccattctgaccattgacgatggaattttcgaagtgaaggcgactgctggggatacacatctggggggggaagacttcgacaaccggctggtaagtcatttcgtcgaagaattcaaaaggaagcataagaaggatataagccagaataagagggctgtgcgaaggctgcggactgcctgcgaaagagccaaaagaactctgtcctcatcaacacaggccaatttagaaattgattctctttacgaagggattgatttctatacgagcatcacaagggcccggttcgaggagttgtgcgctgacctcttcagagggactctggagcctgttgaaaaagccttgcgggatgctaagatggataaagcaaaaatccatgacatagtgttggtgggaggctctacgcgaatccccaaggtgcaacggctcctgcaggattactttaacggccgtgacctcaacaagagcatcaacccggacgaggccgtcgcatacggcgcggccgtgcaagcagcgatcttgatgggggataagtccgaaaaggtgcaagacctcctcctgctggacgtcgcgccactgtcactgggcttggagaccgccggtggagtcatgacagccttaatcaaacggaatagtaccatcccgacaaagcagacacagatttttacgacctattctgataaccagcccggcgttctcatacaggtatatgagggcgaacgggcaatgactaaggacaataacctgttaggccggttcgacctgacaggcatccctcccgctcccaggggcgttccccagatcgaagtgacatttgatattgatgctaacgggatcctgaacgtgaccgccatggacaaatcgaccgggaaagtaaataaaatcacaatcactaatgacaagggcaggctgtctaaggaagaaatcgagaggatggtccttgatgcagagaaatacaaggccgaggatgtgtag

SEQ ID NO: 344296 - DNA, 1926 bp, Artificial Sequence
  derived and/or modified sequence
atggccaccgccaagggcatcgccatcggcatcgacctgggcaccacctactcttgcgtgggagtgttccaacatggcaaagttgagatcattgctaatgatcagggaaatcgcactaccccaagttatgtggcttttactgacacggaaaggctgatcggcgacgcagccaagaatcaggtcgccatgaatccccagaacacggtgttcgatgccaagagactgatcgggagaaaattcaacgaccctgtagtgcaggcagatatgaagctgtggccatttcaggtcatcaatgaaggcggtaaaccaaaagttctggtcagttataaaggcgaaaataaagccttttatcctgaggagataagcagcatggtccttacaaagcttaaagagaccgcagaggcatttctgggccacccagtgactaatgctgtcatcacggtgccggcctacttcaacgacagccagaggcaagccaccaaagatgctggcgtcatcgccggcctgaacgtcctccggatcataaacgagcctactgccgccgccatcgcttatggcctggataaaggcggtcagggcgaacggcacgtcctgatttttgatctcggtggcggcacctttgacgtcagcattctaactatcgatgatggaatcttcgaggtgaaggctactgctggcgacacccacctaggtggcgaggattttgataacagactagtgagccatttcgtggaagagtttaagagaaagcacaaaaaagatatctctcaaaacaaacgagctgtccgccgactgagaaccgcgtgcgaacgggctaaacgcaccctttcttctagcacacaggccaatctggaaatagatagtctgtatgaagggatcgacttctacacttcgataacacgggcacgtttcgaagaactctgcgctgacttgttccgtggcactttggagcctgtggagaaggccttacgcgacgcgaaaatggataaagctaagattcatgatatcgtcttggtaggcggttcaacaaggattccgaaagtgcagagactgctgcaagactactttaatggtcgggacctcaacaagtcgattaaccccgacgaagccgtggcatatggagcggcggtacaagccgctattctgatgggtgacaagtcagagaaagtgcaggatcttctgttgctggacgtcgctccactatcacttggactggagaccgcaggtggtgtgatgaccgccctcataaaacgaaactctaccatccctaccaaacagactcagatttttacgacttactctgacaaccaacccggtgtgcttatccaagtatacgagggggaaagggcgatgacgaaagataacaacctgttaggcaggttcgatctaactggtattccccctgccccgcgcggtgtgcctcagatcgaagttactttcgacatcgacgccaatgggattttgaacgtgacggctatggacaagtctaccggcaaggtgaataagattacaatcaccaatgacaagggacgcctgtcaaaagaagaaatcgagagaatggtgttggacgccgagaagtataaagctgaagacgaggtccaacgtgagaagatcgctgcgaagaacgcattggaaagctacgctttcaacatgaaaagcgtagtgagcgatgaaggccttaagggcaaaattagtgagtcagacaagaacaagatcttagataaatgcaatgagctactgtcatggctggaagtaaaccagctggccgaaaaggacgaattcgaccacaaaagaaaggaattggaacaaatgtgcaaccctataatcactaagctctaccaggggggatgcaccggtcctgcgtgtgggactgggtatgtacccggccggccagccaccggcccaactatcgaggaggtggattag

SEQ ID NO: 344297 - DNA, 1926 bp, Artificial Sequence
  derived and/or modified sequence
atggccaccgccaagggcatcgccatcggcatcgacctgggcaccacatacagctgtgttggcgtcttccagcatggaaaggtggagatcattgcaaatgaccagggaaacaggaccacaccttcttatgtggcatttacagataccgagagactcataggggatgcggccaagaaccaggtcgctatgaacccacagaatactgtgtttgatgcaaaaagactgataggtcgcaagtttaatgatcctgtggtgcaggctgacatgaaactgtggcccttccaagtgataaacgaaggagggaagccaaaagtgctcgtttcttacaagggcgaaaacaaagccttttatcccgaagagatctccagtatggttctgacaaaactgaaagaaactgcggaggcctttctggggcaccctgttaccaatgctgtgatcaccgtgccagcttacttcaacgattcccagagacaggcgacaaaagacgccggcgtaattgcaggactgaatgttttgcggattataaacgagcctactgcagccgccattgcctacggtctggataaagggggtcaaggagagaggcatgttttgatctttgacctaggggggggaacgttcgacgtttccattttgacgatcgacgatggtatcttcgaggtaaaagccacggccggagacacacatctcgggggagaggactttgataataggttggttagccacttcgtcgaggagttcaagagaaaacacaagaaggacatctcccagaataaacgagccgtgcgccggctgcgaacggcatgcgagcgcgctaagcgtacactgtcatcttctacacaggccaacctggagattgattccctgtatgaagggatcgatttctacacaagtatcacgcgtgccaggtttgaggagctgtgcgctgacctgtttcgtggcaccttggaacccgtggaaaaagcattgagggatgccaaaatggacaaggctaagatccacgacatcgtcctggtgggaggtagcacccgtatccctaaggtgcaacgcctactccaggactactttaatggcagagacctgaacaagtcaattaacccagatgaagctgtagcctatggggcggccgttcaggcggctatcctaatgggagacaaatcagagaaagtacaggacctgttattgttggatgtagcccccctgagtcttggactggaaaccgcgggaggggtgatgaccgctctgattaagcgcaactccaccatccccactaaacagactcagatatttaccacatatagcgacaaccagcctggagtcttgatccaggtatatgagggagagagggccatgactaaggataacaacctcctgggtcgttttgacttgaccggtatcccccccgccccaaggggcgttcctcagatcgaagtcacattcgatatagatgccaacggcatcctgaacgtgacagccatggataagagcaccggtaaagtgaataagattactattacgaacgacaagggccgcttatccaaggaagagattgaacgcatggttcttgacgccgaaaaatataaagctgaagatgaggtgcagcgtgaaaagatcgctgctaaaaacgccttagagagctatgcatttaatatgaagtcagtggtgagtgacgagggtctcaaagggaagatcagcgagagcgacaagaataaaattctggataagtgcaacgaactcctaagttggctggaggtgaaccagctagctgagaaagatgagttcgaccacaagcgcaaagaattggaacagatgtgtaatcctatcatcaccaagctgtatcagggcggttgcactggtcctgcctgcgggacgggatacgtgccagggagacctgcgaccggacctactattgaggaagtagattag

SEQ ID NO: 344298 - DNA, 1926 bp, Artificial Sequence
  derived and/or modified sequence
atggcaaccgctaaagggatcgcaattggcatcgacttggggaccacttacagctgtgtgggagtgttccagcacggtaaagtggagattatcgccaacgatcagggtaatagaactacccctagctatgtggcatttaccgacaccgagcgcctcatcggagatgccgcaaaaaaccaggtggccatgaatccccagaacaccgtcttcgacgcaaagcggctcattggacggaagttcaacgatcccgtcgtccaggctgatatgaagctgtggccattccaggtcataaatgagggcggaaagcctaaagtactagtgagctacaaaggcgaaaataaggcattctaccccgaagagattagttcgatggtcctgactaaactcaaagagaccgcagaggcctttctcggtcatcccgttacgaacgccgtcataacagtccctgcctatttcaatgattcacagagacaggccactaaggacgcaggggtgatagctgggttgaacgtcttgcgaattataaatgaacccaccgcagccgctatagcatatgggctggacaaagggggacagggagaaagacatgtcctgatttttgatcttggcggaggaacctttgacgtgtccatcctgaccatcgatgacggaatctttgaagtcaaagctacagccggtgatactcacctggggggtgaagatttcgacaatagactcgtttcccattttgtggaggagttcaaaagaaaacacaagaaggacatctcccaaaacaagagggccgtccgacgtttaaggacggcttgtgagcgcgctaaaagaacactgtcttctagtacccaggcgaacctcgagattgatagtctttacgagggcatagatttctacacatccattacccgcgcacgttttgaggaactatgtgctgatctgttccggggtaccctagaacctgtggaaaaggcactgagagatgccaagatggacaaagcaaaaatccatgatatcgtgctagtgggaggctccacccgcatcccaaaagtgcagcgtttgcttcaggattacttcaacgggagggaccttaacaaatctatcaacccagatgaggcagtggcgtacggtgctgccgtacaggccgctatcttaatgggcgataagtccgaaaaagtgcaggacctcctcctccttgatgttgcacccctctctcttggactggaaaccgccggaggggttatgacagctcttatcaagaggaactcaactattcctacaaagcagacccagatctttactacatattccgacaaccagccaggcgttctgatccaggtctatgagggagagagagcaatgaccaaggacaataacctcctgggccgatttgacctaactggcattcctcctgctcctaggggcgtgccacagattgaagttacattcgacatagacgccaatggaattctgaacgtgactgctatggataagagtaccgggaaagtgaacaaaattactattacaaacgataagggcagactgtcaaaggaggagatcgagcgaatggttctggacgcagagaaatacaaagctgaggacgaggtccagcgagaaaaaatcgcagctaagaatgcactcgagagttatgcttttaatatgaagtccgtcgtatcagacgagggcctcaagggcaaaattagcgagagcgataagaataaaatcctcgataagtgcaacgagttgctgtcgtggttggaagtgaaccagcttgcagaaaaggacgagtttgatcacaagaggaaggagttggagcagatgtgcaatccaatcattacgaagctctatcagggcggatgcacgggtcccgcttgcggaactggctacgttcctggtcggcctgccacggggcctaccatagaggaggtggactag

SEQ ID NO: 344299 - DNA, 1926 bp, Artificial Sequence
  derived and/or modified sequence
atggccacagcgaagggtatcgcaatagggattgatcttggcaccacctactcttgcgtgggcgtctttcaacacggcaaggtggagatcatcgcaaacgaccagggcaacaggaccaccccgtcctatgtagctttcactgacactgagcgactcatcggcgacgccgctaaaaatcaggtagctatgaaccctcaaaatactgtgttcgacgcaaagcggctaataggacgaaaatttaatgaccccgtcgttcaagcagatatgaaattatggcccttccaggtgattaacgagggaggtaaacccaaggtcttggtgtcatataagggagagaataaagcattctatcctgaggaaataagcagtatggttctgaccaagcttaaggaaacagccgaagcttttcttggtcatcccgtcactaatgccgtgatcacagtgccagcatactttaacgactctcagcgacaggccacaaaagatgcaggagttattgcagggcttaacgtgctcagaattattaatgagccaactgcagcagcaatcgcctacgggctagacaagggcggacagggagaacgtcacgtgctcattttcgatcttggcggtggtacttttgacgtttcaattctgaccattgatgacggtatctttgaggtgaaggccacagccggagatactcatttgggaggcgaggattttgataatcgcctggttagtcacttcgtggaggagtttaagcgaaagcataagaaggacatcagtcagaacaagcgtgcagtacgacgcctgcgcaccgcatgcgaacgagctaaacgcaccctgagctcttccacacaggctaatttagagatcgacagcctctacgaaggcatcgacttctacacgagcatcacgagagcacgcttcgaagagctgtgtgccgacctgtttcggggaactcttgaaccagtggagaaggctttaagagacgctaagatggataaggcaaaaatccatgacattgtgttggtgggagggtcaacccgaatacctaaagtgcagcgtctgctgcaggattattttaatggtcgggatctcaataaatccattaacccggatgaggccgtggcgtacggagctgcagtgcaggcagctatcctcatgggcgataagtctgaaaaggtccaggatctgttgctgctggatgtagccccattgtctctcggccttgaaaccgccggtggcgttatgacagccttgattaagcggaattcgactattcccactaaacagactcagatcttcaccacgtacagtgataaccagccaggcgtgctgatccaggtttatgagggtgagagggccatgacaaaagataataacctgctaggtcggttcgatctgacggggataccaccagccccaaggggcgtgcctcagatagaagtcacctttgacattgacgcgaatggcatcctcaacgtgaccgcgatggacaagtccacgggcaaggtgaataagatcactataaccaatgataaaggcagattgagcaaagaagagatcgagcgcatggttttagatgcggaaaaatacaaagcggaagatgaagttcagagagaaaagatcgccgctaagaatgctcttgagagttacgctttcaacatgaaatccgtggtctcggacgaagggctgaagggcaaaatctcagaatctgataagaacaagatacttgacaagtgcaatgaactcttgtcctggcttgaggtgaaccagctagcagagaaggacgagttcgaccacaagcgcaaggaactggaacagatgtgtaaccccatcattacaaaattgtaccaaggtggctgcacaggcccagcgtgcggcaccggatatgtcccgggtcgaccagcgactggccctaccattgaggaggtcgactag

SEQ ID NO: 344300 - DNA, 1599 bp, Artificial Sequence
  derived and/or modified sequence
atggccaccgccaagggtatcgctatcggcatcgatctaggtaccacatatagctgtgtaggagtgttccagcacgggaaggtggagattatcgcaaatgaccaaggcaaccgcactaccccatcatacgtcgctttcaccgatactgaacggctcatcggtgacgccgcaaagaatcaagtcgcaatgaatccccagaacactgtgttcgacgctaagcgcctgatcggtcgaaaattcaacgatcctgtggtgcaggctgacatgaagctttggcctttccaggtaatcaatgagggcggaaagcccaaggtgctcgtgagttacaaaggcgaaaataaggccttctatccagaagagatcagctctatggttttaactaaactaaaagaaacggctgaagcatttctgggccaccccgtgacaaatgctgttatcactgttcctgcttacttcaatgactcccagcgccaagcgacaaaggatgccggtgttattgccggtctgaatgtgctcagaatcatcaacgagcctacggccgcagctatcgcatacggcttggacaagggcggacagggcgagaggcacgtgttgatatttgatttgggaggtgggacgtttgatgtatctattctgacaatagacgacggcatctttgaggtgaaggcaactgcaggcgatacacacctaggtggtgaagatttcgacaatcggctggtatctcactttgtcgaagagtttaagaggaaacacaaaaaagacatctctcaaaataagagagcagtacgcagacttcgcaccgcttgcgagcgagctaaaagaactctgagcagtagtacccaggccaacttggaaatcgattcactctatgaagggatcgatttttacacatctattactagagccagatttgaagagctgtgtgcagatttgttcagaggaaccctggaacctgtggaaaaagccctacgagatgcaaaaatggacaaggccaaaattcatgacatagtacttgtgggcggatccactcggatcccaaaggtccagcggctgttacaggactacttcaacggtcgagacctgaacaaaagcatcaatcccgacgaagcggttgcctacggcgcagcagtgcaagctgctatcctcatgggggacaagtcggaaaaggtgcaggatctgctccttcttgatgtcgcgccactgagtctgggactggaaacagctggaggcgttatgaccgctctgatcaagaggaacagtacaattcccactaaacagacccaaatcttcaccacgtacagtgacaaccagccaggcgtgcttatccaggtgtacgaaggcgagcgcgcaatgaccaaggataataatctgctgggtcgtttcgacctgactggcatccctccggctccccgaggagtgcctcagattgaagttacttttgatatcgacgcaaatggcatccttaacgtgactgccatggataagagtacaggcaaggtgaataagatcactataacgaatgataagggacgtctctccaaggaagagattgagcggatggtgctcgatgccgaaaaatataaggctgaagatgtctag

SEQ ID NO: 344301 - DNA, 1599 bp, Artificial Sequence
  derived and/or modified sequence
atggcgaccgcgaagggtattgcgattggcatagacctcgggactacatacagctgtgtgggcgtgtttcagcatggtaaggtcgaaattatagccaatgaccaggggaatcgcaccacgcccagctacgtggcatttacagatacagaacgattgatcggtgacgctgcgaaaaaccaggttgccatgaatccgcagaataccgtctttgacgccaaaaggcttattgggaggaagtttaacgaccccgtggtgcaggctgacatgaagttgtggcctttccaggtgatcaacgagggcggtaagcccaaagttcttgtcagttacaaaggagaaaataaggccttttatccggaggaaatctccagcatggtgctgaccaagctcaaagaaaccgctgaagcctttctcggtcatcccgtgactaatgcagtgatcaccgtgcctgcctattttaacgactcccagaggcaagccactaaagacgccggtgtaattgcgggactaaacgtacttcggatcatcaacgaacctacagcagctgcaattgcctatggactggacaagggaggccagggcgaacggcacgtgctgatctttgaccttggtggcggaacttttgatgtttccattctgacgattgacgacggaatcttcgaggtcaaagctaccgccggtgatactcacctcggtggtgaagatttcgataatagactggtgtcccatttcgtcgaggagtttaagaggaagcacaaaaaggacatctcacagaataaacgggctgtgaggaggctgcgaactgcttgcgaaagggccaagaggaccctgtcatcctccacccaagcaaacctggaaatcgactcactgtacgagggaatcgatttctatactagtattacgagagccagattcgaagaactctgcgcagatctgttccgaggaaccctcgagcccgtcgagaaggccttgcgcgacgccaagatggataaagctaagatccacgacattgtcctggtgggaggcagcaccaggattcctaaagttcagcgcttactgcaagactactttaatgggagagacttaaacaagagcatcaatccagacgaggcagtggcctacggggcagctgttcaggcagctatactcatgggcgacaagtccgagaaagtccaggacctattgttactcgacgtcgctccgctgagcctggggcttgaaaccgcaggtggtgtgatgactgctctgataaaacgaaactccactatacctaccaaacaaacccagatttttacaacatactcagataatcagcctggggtgttgatacaggtgtacgaaggagaaagggctatgaccaaagacaacaacctactgggtaggttcgacttgaccggcattcctccagcccctagaggtgtccctcaaattgaggtgaccttcgatattgatgccaatgggatcctcaatgttacagccatggataagagcaccggtaaagtgaacaaaataacaataactaatgacaaggggcgtctcagcaaggaggagatcgagaggatggttcttgacgctgagaagtacaaggctgaggacgtgtag

SEQ ID NO: 344302 - DNA, 1926 bp, Artificial Sequence
  derived and/or modified sequence
atggcgacggcgaagggcatcgccattggcattgatcttggcaccacctactcctgcgtcggagtctttcaacacggaaaggtggaaatcattgctaacgatcagggcaacaggactacccctagttatgtcgcatttactgataccgagcgactgatcggagacgcagctaaaaaccaggtggctatgaacccccagaatacggtgtttgacgccaaaaggctgatcggacgcaagttcaatgatcccgtggtccaggcagatatgaaattgtggccatttcaggtaattaatgaggggggaaagcctaaagtcctggtttcatataagggcgaaaataaggcattttatccagaggagatcagttccatggtccttacgaagctgaaggagaccgccgaagcgttcctgggtcatcccgtgaccaatgctgtaattaccgtaccagcctattttaatgatagtcaaaggcaggcaacaaaagatgctggagtgatcgctggccttaacgtgttacggataatcaatgagcctacagcggctgcaattgcttatggcttggacaaaggcggtcagggggaaaggcatgttttaatattcgatctcggcggtggcaccttcgacgtgtccattctgactattgacgatggcatctttgaagtgaaggcgaccgctggcgacacgcacttgggcggagaagactttgataaccgcttggtgtcacacttcgtggaggaatttaaacgcaagcacaagaaggatatcagtcagaacaagcgggcagtacgcaggctgcgcaccgcctgtgagagggctaaacggacattatcgagcagcacccaggcgaatctcgagatcgacagtctgtatgaagggattgacttctacacctccataacacgagcgaggtttgaggagctctgtgcagacttgttccgcggaacgctcgagcctgtggagaaggcccttagggatgccaagatggacaaagccaagatccacgacatcgtgctagtgggcggaagtacccgaatccccaaagttcaacgcctgctgcaagactactttaacgggcgtgatctgaataagagtattaacccggacgaggccgtcgcttacggcgcagccgtccaggccgctatactgatgggcgacaagtcagaaaaggtccaggatctactcctgctggacgtcgcccctttaagtttagggctcgagaccgccggaggggtgatgacagccctgatcaagaggaacagtacaatcccaacaaaacaaacccagatcttcactacctattctgacaatcagcctggagtccttattcaggtctacgaaggagaaagggcgatgactaaggataacaacctgctgggaaggttcgacctgacaggaatacctccagctcctcgcggtgtgccccagattgaggttacctttgatattgatgctaatggtattcttaacgttacggccatggataagagtacagggaaggtgaacaaaataactataaccaacgataagggtcgcctgtctaaggaggaaatcgagcgcatggtccttgatgccgaaaaatataaagcggaggacgaggtgcagagggaaaaaattgcggcaaaaaatgctctggaatcctacgcgtttaacatgaaatcagtcgtatcagacgaaggtctgaaaggaaaaatctccgaatccgataaaaacaagattctagacaagtgcaatgagctgctctcttggttagaagtaaatcagctcgccgaaaaagatgagttcgaccacaagaggaaggagttggaacaaatgtgcaacccaatcattaccaaactctatcaaggaggatgtaccggcccagcttgcggaactggttacgtacccggtcggccagctacagggcctaccatcgaggaggtcgactag

SEQ ID NO: 344303 - DNA, 1926 bp, Artificial Sequence
  derived and/or modified sequence
atggccacagccaagggtatcgccattgggattgatcttgggaccacctacagctgtgtgggagtgtttcaacatggcaaggtagagatcatcgcaaacgaccaaggaaatcgcacaactccttcttacgtggcttttactgatacagagagactcatcggcgacgcagctaagaaccaggtagcgatgaacccgcaaaatacagtgttcgacgctaaaagattgattggccgtaagttcaacgatcccgtcgtgcaagcagatatgaaactctggcctttccaagttattaacgagggcggaaagccaaaagtgctggttagttacaagggcgagaacaaggctttctaccctgaggagatttcttcgatggttttaactaaactgaaggaaaccgcggaagcctttctcggtcaccccgtaaccaacgccgtgattactgtgccagcctacttcaatgactcccaacggcaggctactaaagacgccggtgtgattgccggattgaacgtgctgagaattataaacgagcctactgccgcagccatagcgtatggtctcgataagggaggccagggagagcgacacgttctgattttcgatctgggcggaggtacattcgatgtgtccattttaaccatcgatgacggtatctttgaagtcaaggccacagctggagatacgcatttggggggtgaggatttcgataaccgtctcgtgagccattttgtcgaagagttcaagcggaagcataagaaggacatcagccagaacaagcgcgcagttcgccgtttacgcaccgcttgcgaaagagccaagaggacgctgtcttccagtacacaggcaaacttggagattgactcactctacgaaggcatcgacttctacacaagcataacaagggcccgttttgaagaactttgtgcggatctttttaggggcacactggaacccgttgaaaaagctctgcgggatgccaagatggataaggccaaaattcacgacatcgtgctggttgggggatcaacaagaatacccaaagttcagcgattgcttcaggactactttaacggaagggatctgaataagtccataaatcctgatgaggccgtggcctacggcgcagcagtgcaggccgctatcctgatgggcgacaaatccgagaaggttcaggacctgctactgctcgatgttgctccgctcagtttgggactcgagacagcgggaggcgttatgacagctctgatcaagcgaaattccaccattccaactaaacagactcagatcttcacaacatactccgataaccagccaggcgtgctcatccaggtttacgagggcgaaagagctatgactaaggacaataatttgctcggcagattcgatctcaccggcatcccaccagctccgcgaggggtaccccagatcgaagttacatttgacatcgacgctaacggcatcctgaacgtgaccgctatggacaaatctacagggaaagtgaacaaaataacaatcacaaacgataaaggtagattgtctaaagaagaaatcgagcggatggtgctcgacgcagagaagtacaaagcagaggacgaagttcagagagagaagattgcagcaaagaatgcgctggagagttacgcattcaatatgaagtcagttgtgagtgatgaaggcctcaaggggaagatcagtgagtctgataagaataagatactggacaagtgcaacgagctgctgagctggctggaagtcaaccagctggccgagaaagatgaattcgaccataagagaaaggagctggaacagatgtgcaaccctatcatcacaaagctctatcagggagggtgtactgggccagcatgtgggacaggatacgtccctggcaggcctgccaccggaccaacaattgaggaggtggactag

SEQ ID NO: 344304 - DNA, 1926 bp, Artificial Sequence
  derived and/or modified sequence
atggccaccgccaagggcatcgccatcggcatcgacctgggcaccacctacagctgcgtgggcgtgttccagcacggcaaggtggagatcatcgccaacgaccagggcaacagaaccacccccagctacgtggccttcaccgacaccgagagactgatcggcgacgccgccaagaaccaggtggccatgaacccccagaacaccgtgttcgacgccaagagactgatcggcagaaagttcaacgaccccgtggtgcaggccgacatgaagctgtggcccttccaggtgatcaacgagggcggcaagcccaaggtgctggtgagctacaagggcgagaacaaggccttctaccccgaggagatcagcagcatggtgctgaccaagctgaaggagaccgccgaggccttcctgggccaccccgtgaccaacgccgtgatcaccgtgcccgcctacttcaacgacagccagagacaggccaccaaggacgccggcgtgatcgccggcctgaacgtgctgagaatcatcaacgagcccaccgccgccgccatcgcctacggcctggacaagggcggccagggcgagagacacgtgctgatcttcgacctgggcggcggcaccttcgacgtgagcatcctgaccatcgacgacggcatcttcgaggtgaaggccaccgccggcgacacccacctgggcggcgaggacttcgacaacagactggtgagccacttcgtggaggagttcaagagaaagcacaagaaggacatcagccagaacaagagagccgtgagaagactgagaaccgcctgcgagagagccaagagaaccctgagcagcagcacccaggccaacctggagatcgacagcctgtacgagggcatcgacttctacaccagcatcaccagagccagattcgaggagctgtgcgccgacctgttcagaggcaccctggagcccgtggagaaggccctgagagacgccaagatggacaaggccaagatccacgacatcgtgctggtgggcggcagcaccagaatccccaaggtgcagagactgctgcaggactacttcaacggcagagacctgaacaagagcatcaaccccgacgaggccgtggcctacggcgccgccgtgcaggccgccatcctgatgggcgacaagagcgagaaggtgcaggacctgctgctgctggacgtggcccccctgagcctgggcctggagaccgccggcggcgtgatgaccgccctgatcaagagaaacagcaccatccccaccaagcagacccagatcttcaccacctacagcgacaaccagcccggcgtgctgatccaggtgtacgagggcgagagagccatgaccaaggacaacaacctgctgggcagattcgacctgaccggcatcccccccgcccccagaggcgtgccccagatcgaggtgaccttcgacatcgacgccaacggcatcctgaacgtgaccgccatggacaagagcaccggcaaggtgaacaagatcaccatcaccaacgacaagggcagactgagcaaggaggagatcgagagaatggtgctggacgccgagaagtacaaggccgaggacgaggtgcagagagagaagatcgccgccaagaacgccctggagagctacgccttcaacatgaagagcgtggtgagcgacgagggcctgaagggcaagatcagcgagagcgacaagaacaagatcctggacaagtgcaacgagctgctgagctggctggaggtgaaccagctggccgagaaggacgagttcgaccacaagagaaaggagctggagcagatgtgcaaccccatcatcaccaagctgtaccagggcggctgcaccggccccgcctgcggcaccggctacgtgcccggcagacccgccaccggccccaccatcgaggaggtggactag

SEQ ID NO: 344305 - protein, 205 aa, Artificial Sequence
  derived and/or modified sequence
MTPPERLFLPRVCGTTLHLLLLGLLLVLLPGAQGLPGVGLTPSAAQTARQHPKMHLAHSNLKPAAHLIGDPSKQNSLLWRANTDRAFLQDGFSLSNNSLLVPTSGIYFVYSQVVFSGKAYSPKATSSPLYLAHEVQLFSSQYPFHVPLLSSQKMVYPGLQEPWLHSMYHGAAFQLTQGDQLSTHTDGIPHLVLSPSTVFFGAFAL

SEQ ID NO: 344306 - protein, 157 aa, Artificial Sequence
  derived and/or modified sequence
MTPPERLFLPRVCGTTLHLLLLGLLLVLLPGAQGLPGVGLTPSAAQTARQHPKMHLAHSNLKPAAHLIGDPSKQNSLLWRANTDRAFLQDGFSLSNNSLLVPTSGIYFVYSQLPEDGVSRAAGTLAALDVPRGCVPAHPGRPAIHPHRWHPPPSPQP

SEQ ID NO: 344307 - DNA, 618 bp, Artificial Sequence
  derived and/or modified sequence
atgacgccccccgaacgcttgttcttgccaagagtatgtgggactaccttgcaccttctactgcttgggctgctgctcgtgctcctccccggtgcccagggtttaccaggagtcggattgaccccttctgccgctcagaccgctcgccagcatccaaaaatgcaccttgcacattcaaatctgaagccagcagcccacctcattggtgacccttctaagcagaactctcttctctggcgcgcaaataccgatcgcgccttcctccaggacggtttctccctcagcaacaactcactcctagtccccacttctgggatctacttcgtgtactcccaggtggtgttctcaggtaaggcctattcccccaaggcgacttcctcccccttgtacctcgcacacgaagtgcagcttttttcttctcagtatccttttcacgttcctctactttcgtcccagaagatggtgtacccagggcttcaggagccgtggttgcactccatgtaccatggagccgcattccagctgactcagggggatcagcttagtacacacacagatggcatcccccatctggtgttgtcaccatccactgttttcttcggtgcctttgctctgtag

SEQ ID NO: 344308 - DNA, 618 bp, Artificial Sequence
  derived and/or modified sequence
atgacaccgcccgaacggttattcttgcctagggtttgcgggactacactccacctcctccttctgggactcctgctggtcctactgcccggcgcacaaggcctccccggagttgggttaacgccatctgctgcccagacagcccgtcagcatcctaagatgcacctggctcactctaacctgaagccggccgcacacctaattggggacccatcgaagcagaattccctgctctggcgcgcaaatacggacagagctttcctacaggatgggttttccttgtccaacaatagtttactggtgccgaccagcgggatctatttcgtttactcacaggtggtattctccgggaaggcttactcaccaaaggccacttcatctcccttataccttgctcatgaggttcaactcttttcatcccaatatccgttccatgtgcctctgctgagttcccaaaaaatggtctatccaggtctgcaggagccttggctgcatagtatgtaccatggcgccgcctttcagttgacacagggggatcaactgtcaacccacactgatggcatcccacacctggtactgtcgccatctacggtgtttttcggcgcattcgctttatag

SEQ ID NO: 344309 - DNA, 474 bp, Artificial Sequence
  derived and/or modified sequence
atgacccctccagaacggctctttcttccccgagtgtgtggcacaacactgcacctgctcttactgggcttgctgcttgttctcttacccggcgcccaggggttacctggggtggggttaacaccgtcagcagcacagactgctagacagcatcctaagatgcacctcgcccattcgaacttgaaacctgctgctcacttgattggagacccctcaaagcagaacagtttgctgtggcgggcgaacacagatagagcctttctccaggatggattttccctgagtaacaatagtctgctggtgcctacatccgggatttattttgtttacagtcagttaccagaagacggcgtgtcccgcgctgcaggcaccctggccgctctggatgttccgagaggctgtgtgcccgctcaccccggccgtcctgccatccatcctcatcgatggcacccaccacccagtccacaaccatag

SEQ ID NO: 344310 - DNA, 618 bp, Artificial Sequence
  derived and/or modified sequence
atgaccccacctgagcggctcttcctgccccgggtgtgtggcaccaccctgcacctgctgctgctgggcctgctgctggtgctgctgcccggggcccagggcctgcccggggtgggcctgaccccatctgctgcccagacagcccggcagcaccccaagatgcacctggcccacagcaacctgaagccagctgcccacctgattggagaccccagcaagcagaacagcctgctgtggagggccaacacagaccgggccttcctgcaggacggcttcagcctgagcaacaacagcctgctggtgcccaccagcggcatctactttgtgtacagccaggtggtgttcagcggcaaggcctacagccccaaggccaccagcagccccctgtacctggcccacgaggtgcagctgttcagcagccagtaccccttccacgtgcccctgctgagcagccagaagatggtgtacccaggcctgcaggagccctggctgcacagcatgtaccatggagctgccttccagctgacccagggcgaccagctgagcacccacacagatggcatcccccacctggtgctgagccccagcacagtgttcttcggggcctttgccctgtag

SEQ ID NO: 344311 - DNA, 474 bp, Artificial Sequence
  derived and/or modified sequence
atgaccccacctgagcggctcttcctgccccgggtgtgtggcaccaccctgcacctgctgctgctgggcctgctgctggtgctgctgcccggggcccagggcctgcccggggtgggcctgaccccatctgctgcccagacagcccggcagcaccccaagatgcacctggcccacagcaacctgaagccagctgcccacctgattggagaccccagcaagcagaacagcctgctgtggagggccaacacagaccgggccttcctgcaggacggcttcagcctgagcaacaacagcctgctggtgcccaccagcggcatctactttgtgtacagccagctgcctgaagatggagtgtccagagctgctggcaccctggccgccctggatgtgccccggggctgtgtgcctgcccaccctggccggcctgccatccacccccaccgctggcaccccccacccagcccccagccctag

SEQ ID NO: 344312 - DNA, 1507 bp, Artificial Sequence
  derived and/or modified sequence
tcccagcccacgattcccctgacccgactccctttcccagaactcagtcgcctgaacccccagcctgtggttctctcctaggcctcagcctttcctgcctttgactgaaacagcagtatcttctaagccctgggggcttccccgggccccagccccgacctagaacccgcccgctgcctgccacgctgccactgccgcttcctctataaagggacctgagcgtccgggcccaggggctccacacagcaggttctccccatgacaccacctgaacgtctcttcctcccaagggtgtgtggcaccaccctacacctcctccttctggggctgctgctggttctgctgcctggggcccaggggctccctggtgttggcctcacaccttcagctgcccagactgcccgtcagcaccccaagatgcatcttgcccacagcaacctcaaacctgctgctcacctcattggagaccccagcaagcagaactcactgctctggagagcaaacacggaccgtgccttcctccaggatggtttctccttgagcaacaattctctcctggtccccaccagtggcatctacttcgtctactcccaggtggtcttctctgggaaagcctactctcccaaggccacctcctccccactctacctggcccatgaggtccagctcttctcctcccagtaccccttccatgtgcctctcctcagctcccagaagatggtgtatccagggctgcaggaaccctggctgcactcgatgtaccacggggctgcgttccagctcacccagggagaccagctatccacccacacagatggcatcccccacctagtcctcagccctagtactgtcttctttggagccttcgctctgtagaacttggaaaaatccagaaagaaaaaataattgatttcaagaccttctccccattctgcctccattctgaccatttcaggggtcgtcaccacctctcctttggccattccaacagctcaagtcttccctgatcaagtcaccggagctttcaaagaaggaattctaggcatcccaggggaccacacctccctgaaccatccctgatgtctgtctggctgaggatttcaagcctgcctaggaattcccagcccaaagctgttggtctgtcccaccagctaggtggggcctagatccacacacagaggaagagcaggcacatggaggagcttgggggatgactagaggcagggaggggactatttatgaaggcaaaaaaattaaattatttatttatggaggatggagagaggggaataatagaagaacatccaaggagaaacagagacaggcccaagagatgaagagtgagagggcatgcgcacaaggctgaccaagagagaaagaagtaggcatgagggatcacagggccccagaaggcagggaaaggctctgaaagccagctgccgaccagagccccacacggaggcatctgcaccctcgatgaagcccaataaacctcttttctctgaaa

SEQ ID NO: 344313 - DNA, 1422 bp, Artificial Sequence
  derived and/or modified sequence
ccaggggctccacacagcaggtgaggctctcctgccccatctccttgggctgcccgtgcttcgtgctttggactaccgccccgcagtgtcctgccctctgcctgggcctcggtccctcctgcacctgctgcctggatccccggcctgcctgggcctgggccttggttctccccatgacaccacctgaacgtctcttcctcccaagggtgtgtggcaccaccctacacctcctccttctggggctgctgctggttctgctgcctggggcccaggggctccctggtgttggcctcacaccttcagctgcccagactgcccgtcagcaccccaagatgcatcttgcccacagcaacctcaaacctgctgctcacctcattggagaccccagcaagcagaactcactgctctggagagcaaacacggaccgtgccttcctccaggatggtttctccttgagcaacaattctctcctggtccccaccagtggcatctacttcgtctactcccaggtggtcttctctgggaaagcctactctcccaaggccacctcctccccactctacctggcccatgaggtccagctcttctcctcccagtaccccttccatgtgcctctcctcagctcccagaagatggtgtatccagggctgcaggaaccctggctgcactcgatgtaccacggggctgcgttccagctcacccagggagaccagctatccacccacacagatggcatcccccacctagtcctcagccctagtactgtcttctttggagccttcgctctgtagaacttggaaaaatccagaaagaaaaaataattgatttcaagaccttctccccattctgcctccattctgaccatttcaggggtcgtcaccacctctcctttggccattccaacagctcaagtcttccctgatcaagtcaccggagctttcaaagaaggaattctaggcatcccaggggaccacacctccctgaaccatccctgatgtctgtctggctgaggatttcaagcctgcctaggaattcccagcccaaagctgttggtctgtcccaccagctaggtggggcctagatccacacacagaggaagagcaggcacatggaggagcttgggggatgactagaggcagggaggggactatttatgaaggcaaaaaaattaaattatttatttatggaggatggagagaggggaataatagaagaacatccaaggagaaacagagacaggcccaagagatgaagagtgagagggcatgcgcacaaggctgaccaagagagaaagaagtaggcatgagggatcacagggccccagaaggcagggaaaggctctgaaagccagctgccgaccagagccccacacggaggcatctgcaccctcgatgaagcccaataaacctcttttctctgaaa

SEQ ID NO: 344314 - DNA, 614 bp, Artificial Sequence
  derived and/or modified sequence
gccccatctccttgggctgcccgtgcttcgtgctttggactaccgccccgcagtgtcctgccctctgcctgggcctcggtccctcctgcacctgctgcctggatccccggcctgcctgggcctgggccttggttctccccatgacaccacctgaacgtctcttcctcccaagggtgtgtggcaccaccctacacctcctccttctggggctgctgctggttctgctgcctggggcccaggggctccctggtgttggcctcacaccttcagctgcccagactgcccgtcagcaccccaagatgcatcttgcccacagcaacctcaaacctgctgctcacctcattggagaccccagcaagcagaactcactgctctggagagcaaacacggaccgtgccttcctccaggatggtttctccttgagcaacaattctctcctggtccccaccagtggcatctacttcgtctactcccagctcccagaagatggtgtatccagggctgcaggaaccctggctgcactcgatgtaccacggggctgcgttccagctcacccagggagaccagctatccacccacacagatggcatcccccacctagtcctcagccctag

SEQ ID NO: 344315 - DNA, 618 bp, Artificial Sequence
  derived and/or modified sequence
atgaccccccccgagcggctgttcctgccccgggtgtgcggcaccaccctgcatctgctgctccttggactcctcttggtgctgctgccaggcgcccagggcctgccaggcgtgggcctgacacccagtgctgcccaaacagccaggcaacaccccaagatgcatttggcccatagcaacctcaagcccgcggcccaccttatcggagacccttcaaaacagaattccttgctgtggcgcgctaatactgacagagcctttttacaagacgggttctccctgagtaataactcccttcttgtaccaacatccggcatctattttgtttattctcaagtagtgttttccgggaaagcatattctcctaaggcaacttctagtcctctgtacctggcccacgaagtgcagctgttctcctcgcagtatcccttccacgtcccacttctgagttctcagaaaatggtgtaccccgggctgcaggagccctggctgcactctatgtaccacggtgcagcctttcaactgacacagggcgatcagctcagtacacacacggatggaattcctcatctggtgctgagccccagcaccgtgttcttcggggctttcgccttatag

SEQ ID NO: 344316 - DNA, 618 bp, Artificial Sequence
  derived and/or modified sequence
atgaccccccccgagcggctgttcctgccccgggtgtgcggcaccaccctgcacttgcttctgctggggttgctgctggtgttactgcccggggcccaaggcctgcccggggtcggcttaaccccaagcgctgcccagacagcacgacagcaccccaaaatgcatctggcacactctaatctgaagcctgccgctcacttgatcggggacccctctaagcagaactccctgttgtggagagccaacacagaccgagcttttttgcaggatgggttttcactgtcgaacaactccctgctcgttccgaccagcgggatttactttgtatactctcaagtggtgtttagcgggaaggcttatagtcccaaggccactagtagtccactctaccttgcacacgaggtccagctatttagctcccagtacccttttcacgtcccactgttatcgtcccagaagatggtgtatccagggctgcaggagccctggttgcattccatgtaccacggggctgctttccagctcacacaaggtgatcagctgtctacgcacacagacggaatccctcacctggtgttgtccccatcaaccgtgttttttggagcttttgccttgtag

SEQ ID NO: 344317 - DNA, 474 bp, Artificial Sequence
  derived and/or modified sequence
atgaccccccccgagcggctgttcctgccccgggtgtgcggcaccacactccacttgctcctcttgggactgctgcttgtgctgcttccaggagcccagggacttcccggcgtagggctcactccaagcgcggctcagacagcacgccagcacccaaagatgcacctggcacattctaatttgaagcccgctgcacaccttattggcgacccctccaagcagaactcactgctttggcgcgctaataccgacagagctttcctccaggacggctttagtttatctaacaattccctgctggttccgaccagtggcatctattttgtgtactcccagctacctgaagacggagtctcacgggctgccgggactttggcagccctcgatgttccaagaggatgcgtccccgcccatcccggccgtcctgccatccatccgcaccggtggcacccacctccttctcctcagccatag

SEQ ID NO: 344318 - DNA, 618 bp, Artificial Sequence
  derived and/or modified sequence
atgactccaccagagagactgtttttaccacgggtttgcgggacaacgctgcacctgctgctcctgggactactccttgtgctgttaccgggtgcacaggggctcccaggagtgggactgacacccagcgcggcacagactgcccgacagcaccctaaaatgcacctggcccatagcaatctcaagcccgctgcgcacctgattggcgatccttccaaacagaacagtttactatggcgggctaacactgaccgtgcatttctgcaggacggcttttccctctctaacaacagcctactcgttcccacctccgggatctatttcgtgtactcacaggtggttttcagtgggaaggcatattctcccaaggctacatcaagccctctttatctcgcacacgaagtccagttattttcatcccaatatccctttcatgtcccgctcctgtcctcgcagaaaatggtctatcctgggcttcaagaaccgtggctgcacagcatgtaccacggtgctgcattccagcttactcaaggtgaccagctgtcgacccacaccgacggcatccctcatcttgtcctgtcaccaagcactgtgttctttggagccttcgcgctttag

SEQ ID NO: 344319 - DNA, 618 bp, Artificial Sequence
  derived and/or modified sequence
atgacacctcccgaacggttgtttcttccacgggtctgcggcactacgctacacctgctccttctaggactattgcttgtccttctgccaggtgcacaaggcctccctggcgtcggcctgactccctctgctgcacagaccgcacgccagcatccaaagatgcatttagcccactccaatctgaagccggctgcgcacctgatcggagatccttcgaagcagaatagcctgctctggcgagctaacaccgatagagcgtttctgcaggacgggttctcactctcaaataactctctgctcgtcccaacctccggcatctacttcgtttattcccaggtggtcttctctgggaaggcctatagtccgaaagctacaagctctccattgtacctggcccatgaggttcagcttttttccagccagtaccccttccacgtcccactgctgtccagccagaaaatggtgtaccccggtctgcaggaaccctggcttcactcaatgtaccacggggctgcgtttcaattgacccaaggagaccagttgagcactcataccgatgggataccccacctcgtgctaagcccatccacagtgttcttcggcgcttttgctctctag

SEQ ID NO: 344320 - DNA, 474 bp, Artificial Sequence
  derived and/or modified sequence
atgactcccccagaacggctgtttctgccgagggtctgtggtactaccctccatttgctgctgctcggcctgctgcttgtgttactacctggtgcccaaggcctgcctggcgtcggcctcacgcctagcgcagcacagaccgctcgacagcaccctaagatgcatttagcgcatagcaaccttaaacctgcagcccacctgattggggacccctcaaaacagaacagcttgctgtggcgtgcaaacacagatcgcgctttcctccaggacgggttcagcctgtcaaacaattcactgttggttcctaccagcggaatatacttcgtctacagccagctacctgaagatggagttagccgcgcagccggtactctggccgcactcgacgtgcccaggggatgtgtccctgcccacccgggaagaccagctatccacccacacagatggcatcctccacccagcccccagccgtag

SEQ ID NO: 344321 - DNA, 618 bp, Artificial Sequence
  derived and/or modified sequence
atgaccccccccgagagactgttcctgcccagagtgtgcggcaccaccctgcacctgctgctgctgggcctgctgctggtgctgctgcccggcgcccagggcctgcccggcgtgggcctgacccccagcgccgcccagaccgccagacagcaccccaagatgcacctggcccacagcaacctgaagcccgccgcccacctgatcggcgaccccagcaagcagaacagcctgctgtggagagccaacaccgacagagccttcctgcaggacggcttcagcctgagcaacaacagcctgctggtgcccaccagcggcatctacttcgtgtacagccaggtggtgttcagcggcaaggcctacagccccaaggccaccagcagccccctgtacctggcccacgaggtgcagctgttcagcagccagtaccccttccacgtgcccctgctgagcagccagaagatggtgtaccccggcctgcaggagccctggctgcacagcatgtaccacggcgccgccttccagctgacccagggcgaccagctgagcacccacaccgacggcatcccccacctggtgctgagccccagcaccgtgttcttcggcgccttcgccctgtag

SEQ ID NO: 344322 - DNA, 474 bp, Artificial Sequence
  derived and/or modified sequence
atgaccccccccgagagactgttcctgcccagagtgtgcggcaccaccctgcacctgctgctgctgggcctgctgctggtgctgctgcccggcgcccagggcctgcccggcgtgggcctgacccccagcgccgcccagaccgccagacagcaccccaagatgcacctggcccacagcaacctgaagcccgccgcccacctgatcggcgaccccagcaagcagaacagcctgctgtggagagccaacaccgacagagccttcctgcaggacggcttcagcctgagcaacaacagcctgctggtgcccaccagcggcatctacttcgtgtacagccagctgcccgaggacggcgtgagcagagccgccggcaccctggccgccctggacgtgcccagaggctgcgtgcccgcccaccccggcagacccgccatccacccccacagatggcaccccccccccagcccccagccctag

SEQ ID NO: 344323 - protein, 351 aa, Artificial Sequence
  derived and/or modified sequence
MVLSQDGSVQSGFLAEGHLDGQPFLRYDRQKRRAKPQGQWAEDVLGAETWDTETEDLTENGQDLRRTLTHIKDQKGGLHSLQEIRVCEMHEDSSTRGSRHFYYNGELFLSQNLETQESTVPQSSRAQTLAMNVTNFWKEDAMKTKTHYRAMQADCLQKLQRYLKSGVAIRRTVPPMVNVTCSEVSEGNITVTCRASSFYPRNITLTWRQDGVSLSHNTQQWGDVLPDGNGTYQTWVATRIRQGEEQRFTCYMEHSGNHGTHPVPSGKALVLQSQRTDFPYVSAAMPCFVIIIILCVPCCKKKTSAAEGPELVSLQVLDQHPVGTGDHRDAAQLGFQPLMSATGSTGSTEGA

SEQ ID NO: 344324 - DNA, 1056 bp, Artificial Sequence
  derived and/or modified sequence
atggtgttatcccaggacggaagcgtgcaatcagggttcttggccgagggccacctggacggtcaaccatttctccgctatgaccggcagaagcgacgggccaagccccagggtcaatgggccgaagacgtgttgggtgcagagacctgggatactgaaacagaggacctcacggagaatggacaggacctgcgacgcaccctgacccacatcaaagatcaaaaaggcgggctacactctctccaagagatccgggtttgtgagatgcacgaagatagctcaacgagagggtcaagacacttctactataacggcgaattgtttctctcccagaacctcgagactcaggaatctacagtgcctcagtctagcagggcccaaacgttggctatgaacgttaccaacttttggaaggaagatgcaatgaagactaagactcattaccgggccatgcaagccgattgcctgcaaaagctccagcgatatttgaaatcaggggtggccattcgccggacggtgccgcccatggtcaatgtcacatgttccgaagtaagtgaaggaaacattacagtcacctgccgtgccagctctttctacccaaggaatattaccctaacctggcgccaggacggcgtgtccttgtctcacaacactcagcaatggggtgacgtgttaccggacggcaacggcacctaccagacctgggtagctacaagaatcagacagggagaggaacagcggtttacttgctacatggagcactccgggaatcacggaactcatcccgttccttccgggaaggcgctggtcctacagagccagcgtaccgactttccgtacgtatccgccgcaatgccctgttttgtgatcataataatcctgtgtgtgccctgttgtaaaaaaaaaaccagcgctgctgagggacccgagctggtgtccctgcaagtgttggaccagcacccagtcgggacaggggaccacagggatgctgcccagctcgggtttcagcctctgatgagcgccaccggatctactggaagcaccgagggagcctag

SEQ ID NO: 344325 - DNA, 1056 bp, Artificial Sequence
  derived and/or modified sequence
atggtgctgagccaggacggctctgtgcagagcggcttcctggccgagggccacctggatggccagcccttcctgcgctatgaccggcagaagaggcgggccaagccccagggccagtgggccgaggatgtgctgggcgctgagacctgggacacagaaacagaggacctgacagaaaatggccaggacctgcggaggaccctgacccacatcaaggaccagaagggcggcctgcacagcctgcaggagatccgggtgtgtgagatgcatgaggacagcagcacccggggcagccgccacttctactacaacggggagctgttcctgagccagaacctggagacccaggagagcacagtgccccagagcagccgggcccagaccctggccatgaatgtgaccaacttctggaaggaggatgccatgaagaccaagacccactaccgggccatgcaggccgactgcctgcagaagctgcagcgctacctgaagtctggagtggccatccggaggacagtgccccccatggtgaatgtgacctgcagcgaggtgtctgagggcaacatcaccgtgacctgccgggccagcagcttctaccccaggaacatcaccctgacctggaggcaggatggagtgtccctgagccacaacacccagcagtggggagatgtgctgcctgatggaaatggcacctaccagacctgggtggccacccgcatccggcagggcgaggagcagcgcttcacctgctacatggagcacagcggcaaccacggcacccaccctgtgcccagcggcaaggccctggtgctgcagagccagaggacagacttcccctacgtgtctgctgccatgccctgcttcgtcatcatcatcatcctgtgtgtgccctgctgcaagaagaagaccagcgctgctgagggccctgagctggtgtccctgcaggtgctggaccagcaccctgtgggcaccggggaccacagagatgctgcccagctgggcttccagcccctgatgtctgccaccggcagcacaggcagcacagagggcgcctag

SEQ ID NO: 344326 - DNA, 1056 bp, Artificial Sequence
  derived and/or modified sequence
atggtgctgagccaggacggcagcgtgcagagcggcttcctggccgagggccacctagacggtcagccattcctacggtacgatcgacagaagcggagagccaaacctcaaggccagtgggcagaagatgtgctcggggctgagacctgggacaccgagacagaagaccttactgagaatggacaagacctaagacggacactgactcacatcaaggatcaaaagggcgggctacactcattgcaggagattagggtgtgcgagatgcatgaagatagttccaccagaggctctcgacatttctactataatggagagctgtttctctctcagaatctggagacccaggaaagcacagtaccgcaatcttccagggcacaaactctggctatgaacgtcaccaatttctggaaagaggatgcgatgaagaccaaaacacactatcgcgccatgcaggccgactgcctgcagaagctccagcgctatctgaagtcaggggtggccatccgccgtactgtcccccctatggtgaacgtcacttgtagcgaggtgtccgagggcaatattaccgtgacgtgccgggcatccagcttttacccaagaaatattacgctgacatggcgccaagatggcgtcagtctgagccacaacacccagcagtggggcgacgtgctccccgacggaaatggtacttatcagacgtgggtggcaacacggataaggcaaggcgaggagcaacgatttacctgctatatggagcacagcggaaatcacggaacccacccagtgccaagcggcaaagctctcgttctgcagtcccagagaacagactttccctatgtgtctgcagcgatgccttgtttcgtcattatcatcatattgtgtgtgccctgttgtaaaaagaaaacatcagccgcagagggacctgagctcgtgtctctccaggtgctggatcagcacccagtgggaaccggagaccaccgcgatgccgcacaactgggcttccagcctttgatgagtgccacgggcagtacaggcagcactgaaggagcatag

SEQ ID NO: 344327 - DNA, 1056 bp, Artificial Sequence
  derived and/or modified sequence
atggtcctttctcaggacggaagcgtccagagtggtttcttagctgaaggacatctggacggacagccgtttttaaggtatgatcgacagaaaaggcgtgcaaaaccccagggtcagtgggccgaggatgtgctcggggcagaaacttgggatacagagacagaagatctgaccgagaacgggcaggacctgcgccgaaccctgacacacatcaaggatcagaaaggcggactgcatagcttacaggagattcgcgtgtgtgagatgcatgaggactcctccacacggggttctcgacatttttattacaatggagaactgtttctgtcgcagaacctcgagacacaggagagcaccgtcccccagagctctcgcgcacaaacgctagctatgaacgtcacgaacttctggaaagaagacgctatgaaaacgaaaacccattaccgggctatgcaggcagattgcttacaaaagctgcagagatatcttaagtcaggggtagctatcagacgaactgtgccaccaatggtgaatgtgacatgttctgaggttagcgagggtaacattacggtgacatgtagagcatccagcttttacccacgaaatatcaccctgacctggaggcaggatggcgtcagtctcagtcacaatacacagcagtggggggatgtgctcccagacggcaatggcacttatcagacttgggtcgccacccggatccgccaaggcgaggaacaacgatttacatgctatatggagcattctggaaatcacggaacccatcccgtcccttctggtaaagccctagtcctgcagtctcagcgcactgactttccttacgtcagcgccgctatgccttgtttcgtgatcattatcatcctgtgtgtgccttgttgcaaaaagaaaacgtcagctgcggaaggtccagagctggtttctctccaggtcttagaccagcatcccgtcggaacaggggatcaccgcgatgccgctcagttgggcttccaaccccttatgagtgcaactggcagtaccggtagtactgaaggcgcttag

SEQ ID NO: 344328 - DNA, 1056 bp, Artificial Sequence
  derived and/or modified sequence
atggtgctgagccaggacggcagcgtgcagagcggcttcctggccgagggccacctggacggccagcccttcctgagatacgacagacagaagagaagagccaagccccagggccagtgggccgaggacgtgctgggcgccgagacctgggacaccgagaccgaggacctgaccgagaacggccaggacctgagaagaaccctgacccacatcaaggaccagaagggcggcctgcacagcctgcaggagatcagagtgtgcgagatgcacgaggacagcagcaccagaggcagcagacacttctactacaacggcgagctgttcctgagccagaacctggagacccaggagagcaccgtgccccagagcagcagagcccagaccctggccatgaacgtgaccaacttctggaaggaggacgccatgaagaccaagacccactacagagccatgcaggccgactgcctgcagaagctgcagagatacctgaagagcggcgtggccatcagaagaaccgtgccccccatggtgaacgtgacctgcagcgaggtgagcgagggcaacatcaccgtgacctgcagagccagcagcttctaccccagaaacatcaccctgacctggagacaggacggcgtgagcctgagccacaacacccagcagtggggcgacgtgctgcccgacggcaacggcacctaccagacctgggtggccaccagaatcagacagggcgaggagcagagattcacctgctacatggagcacagcggcaaccacggcacccaccccgtgcccagcggcaaggccctggtgctgcagagccagagaaccgacttcccctacgtgagcgccgccatgccctgcttcgtgatcatcatcatcctgtgcgtgccctgctgcaagaagaagaccagcgccgccgagggccccgagctggtgagcctgcaggtgctggaccagcaccccgtgggcaccggcgaccacagagacgccgcccagctgggcttccagcccctgatgagcgccaccggcagcaccggcagcaccgagggcgcctag

SEQ ID NO: 344329 - protein, 256 aa, Artificial Sequence
  derived and/or modified sequence
  misc_feature (1)..(1): Xaa can be any naturally occurring amino acid
XRLDAELQLSARLIQQEVGRAREQGEAERQQLSKVAQQLEQELQQTQESLASLGLQLEVARQCQQESTEEAASLRQELTQQQELYGQALQEKVAEVETRLREQLSDTERRLNEARREHAKAVVSLRQIQRRAAQEKERSQELRRLQEEARKEEGQRLARRLQELERDKNLMLQRLLTVLPSLLDKKKSVVSSPRPPECSASAPVAAAVPTRESIKGSLSVLLDDLQDLSEAISKEEAVCQGDNLDRCSSCNPQMSS

SEQ ID NO: 344330 - protein, 316 aa, Artificial Sequence
  derived and/or modified sequence
MFPPSGHQDVSERRLDTQRPQVTMWERDVSSDRQEPGRRGRSWGLEGSQALSQQAEVIVRQLQELRWLEEEVWLLRETSLQQKMRLEAQAMELEALARAEKAGRAEAEGLRAALAGAEVVRKNLEEGRQRELEEVQRLHQEQLSSLTQAHEEALSSLTSKAEGLEKSLSSLETRRAGEAKELAEAQREAELLRKQLSKTQEDLEAQVTLVENLRKYVGEQVPSEVHSQTWELERQKLLETMQHLQEDRDSLHATAELLQVRVQSLTHILALQEEELTRKVQPSDSLEPEFTRKCQSLLNRWREKVFALMVQLKAQE

SEQ ID NO: 344331 - DNA, 951 bp, Artificial Sequence
  derived and/or modified sequence
atgttcccccccagcggccaccaggacgtgagcgagagaagactggacacccagagaccccaggtgaccatgtgggagagagacgtgagcagcgacagacaggagcccggcagaagaggcagaagctggggcctggagggcagccaggccctgagccagcaggccgaggtgatcgtgagacagctgcaggagctgagatggctggaggaggaggtgtggctgctgagagagaccagcctgcagcagaagatgagactggaggcccaggccatggagctggaggccctggccagagccgagaaggccggcagagccgaggccgagggcctgagagccgccctggccggcgccgaggtggtgagaaagaacctggaggagggcagacagagagagctggaggaggtgcagagactgcaccaggagcagctgagcagcctgacccaggcccacgaggaggccctgagcagcctgaccagcaaggccgagggcctggagaagagcctgagcagcctggagaccagaagagccggcgaggccaaggagctggccgaggcccagagagaggccgagctgctgagaaagcagctgagcaagacccaggaggacctggaggcccaggtgaccctggtggagaacctgagaaagtacgtgggcgagcaggtgcccagcgaggtgcacagccagacctgggagctggagagacagaagctgctggagaccatgcagcacctgcaggaggacagagacagcctgcacgccaccgccgagctgctgcaggtgagagtgcagagcctgacccacatcctggccctgcaggaggaggagctgaccagaaaggtgcagcccagcgacagcctggagcccgagttcaccagaaagtgccagagcctgctgaacagatggagagagaaggtgttcgccctgatggtgcagctgaaggcccaggagtag

SEQ ID NO: 344332 - DNA, 951 bp, Artificial Sequence
  derived and/or modified sequence
atgtttccaccaagcggccaccaggatgtctctgagcgacggctcgacactcaaaggcctcaagtgaccatgtgggaacgcgatgtgtcctctgatagacaggaaccagggagacggggacgctcttggggactggaagggtcacaggctctctcccagcaggcagaggtgattgttaggcagctccaagagctccggtggctggaagaggaagtgtggcttctgagagagacaagcttacaacagaaaatgcgtttagaagctcaggcgatggagctggaggcactggctcgagctgaaaaagcaggaagggccgaagcagagggtctccgggccgccctcgctggggccgaagttgtgcgaaaaaacttggaggaaggacgtcagcgcgagcttgaagaggtgcagaggctacatcaagagcagttaagctccctaactcaagctcatgaggaggctttgtcttcactcacaagcaaagccgaaggattagagaaaagcctcagcagtctcgaaaccagacgagcaggcgaggccaaggagctagccgaggctcagagagaagccgagctcctccgcaagcaactatctaaaacccaggaggacttggaagctcaagtgacattagtggagaacctgcggaagtatgtgggagagcaggtaccaagcgaggtacacagtcagacttgggaactggagcggcagaaactccttgaaacaatgcaacacctgcaggaagacagggatagtctgcacgccactgctgagctgctgcaggtgagagtgcagtctttgactcatatattggctttgcaggaagaagaactcacccggaaagtgcaacctagtgatagtctggaacccgagtttacaagaaaatgccagagtctgctgaatagatggcgggaaaaagtgttcgccctcatggttcagttgaaagcacaggaatag

SEQ ID NO: 344333 - DNA, 951 bp, Artificial Sequence
  derived and/or modified sequence
atgtttccaccaagcggacaccaggatgtcagcgaacggagactcgacacccagaggcctcaggtcacaatgtgggagagagatgtgagcagcgaccgccaggagcctggaagaaggggtcgaagctgggggttggaaggaagccaggccctgagtcagcaggcagaagtaatcgtgcgtcaactgcaggagctgcggtggctcgaggaggaagtttggctgttgcgcgagacttccctgcagcagaagatgcggctggaggcccaggccatggagctagaggctctggcgagagctgagaaggccggtagagcggaggctgagggtctgcgggcggccctagccggggctgaggtggtgcgtaagaatttggaggaggggaggcaaagggagctggaggaagtgcagagactgcaccaggagcagctttcctcgctgactcaagcccacgaggaagcattgtcctcactgacatcaaaggctgagggcctcgagaagtccctctcctcactggagacacggcgagccggcgaggcgaaagagctggcggaggctcagcgcgaggccgagttattgcgcaaacagctgagtaaaacccaggaagacctggaggcccaggtgactctggtggagaacctccgaaaatacgtgggagaacaagtcccctctgaagtacattcacaaacttgggagcttgaacgtcaaaaactgctggaaacaatgcagcatctgcaggaagaccgcgactccctgcacgcaacagccgaacttttgcaggtgcgggttcagagtctcactcatattctggcactccaagaggaggagctcacacgtaaagttcagccgagcgactcactcgaacccgagttcaccaggaagtgccaaagtctactcaacagatggcgagagaaagttttcgcattgatggtgcagttgaaggctcaggagtag

SEQ ID NO: 344334 - DNA, 951 bp, Artificial Sequence
  derived and/or modified sequence
atgtttcctccttctggccaccaggatgtgtctgaaagaaggctggacacccagaggccccaggtgaccatgtgggagagagatgtgtccagtgaccggcaggagcccggccggcggggccgctcctggggcctggagggcagccaggccctgagccagcaggccgaggtgattgtgcggcagctgcaggagctgcgctggctggaggaggaggtgtggctgctgcgggagaccagcctgcagcagaagatgaggctggaggcccaggccatggagctggaggccctggcccgggcagagaaggccggccgggcagaggccgagggcctgcgggccgccctggccggggctgaggtggtgaggaagaacctggaggagggccggcagcgggagctggaggaggtgcagaggctgcaccaggagcagctgagcagcctgacccaggcccacgaggaggccctgagcagcctgaccagcaaggccgagggcctggagaagagcctgagcagcctggagacccggcgggccggggaggccaaggagctggccgaggcccagcgggaggccgagctgctgaggaagcagctgagcaagacccaggaggacctggaggcccaggtgaccctggtggagaacctgaggaaatatgtgggggagcaggtgcccagcgaggtgcacagccagacctgggagctggagcggcagaagctgctggagaccatgcagcacctgcaggaggaccgggacagcctgcacgccacagctgagctgctgcaggtgcgggtgcagagcctgacccacatcctggccctgcaggaggaggagctgaccaggaaggtgcagcccagcgacagcctggagcctgagttcaccaggaagtgccagagcctgctgaaccgctggagggagaaggtgtttgccctgatggtgcagctgaaggcccaggagtag

SEQ ID NO: 344335 - DNA, 951 bp, Artificial Sequence
  derived and/or modified sequence
atgttcccccccagcggccaccaggacgtgagcgagcggcggctggatacacaacgtcctcaagtcacaatgtgggaaagggacgttagcagtgataggcaagaacccgggcgccggggtcgctcgtgggggctagaaggctcccaggccctttctcagcaggcagaggttatcgtccggcagctgcaggaactgcggtggctagaagaggaggtatggctgctccgcgagacatcgctgcagcagaagatgcgcctggaggcacaggcaatggagctggaagccctggcccgagccgaaaaggcaggaagagcagaggctgagggactgcgggctgcattggccggtgcggaagtggtccgtaaaaacttggaagagggaaggcaaagagagctggaggaggtccagcgcctgcatcaggagcagctttcaagcctgacccaggcccacgaggaggcgttatcctctctgacctctaaggcggaggggcttgagaaaagcctctcgagtctggagaccagaagggcaggagaggccaaagaactggcagaagcccagcgagaggccgagcttttgcgcaagcaactaagcaagacccaagaagatctggaagcacaggtgaccctcgtggagaaccttcggaagtatgtgggcgagcaggtccccagcgaggtacattcacaaacctgggaattagaaaggcagaagttactagaaactatgcaacacctgcaggaagatcgggatagcctacatgcaaccgccgagttgttgcaggtacgtgttcaaagcctaactcacattctcgcattgcaggaggaagagctgacacggaaagtacagccgtctgactctctggagcccgagttcaccagaaagtgccagagtctgctgaatcgctggagagagaaagtttttgcactcatggtccagctgaaagctcaagaatag

SEQ ID NO: 344336 - DNA, 951 bp, Artificial Sequence
  derived and/or modified sequence
atgttcccccccagcggccaccaggacgtgagcgagcggcggctggatactcagagaccacaggtgacaatgtgggaacgcgatgtgtctagtgacagacaggaaccggggaggcgcgggcgctcctgggggcttgagggtagccaggctctttctcagcaggccgaggtgattgtgaggcagctgcaggaactgcggtggttggaagaagaagtttggctcctccgggaaacctccctgcagcaaaagatgaggctggaagcgcaggcaatggaactggaggccctcgctcgcgctgagaaagcagggagagccgaggccgaaggcctgagggcggctttggcaggggccgaggttgtccgcaaaaaccttgaagaggggagacaaagggagctggaagaggtccagagactgcaccaggagcaactctcctccctgacccaggcacacgaggaggctttgagctcactgacttccaaggcagaaggactcgagaaatcactgtcatctttggagactagaagggcaggcgaggccaaggagctggctgaagcacagcgcgaggcagaattgctcaggaagcagctgtctaaaacccaggaggatctagaggctcaggtcacactcgtggagaacctgcgcaagtatgtaggcgagcaggtgcccagtgaggtgcactctcagacatgggaacttgaacgtcaaaaactcttagagaccatgcagcacttgcaggaggacagggactcattgcacgccactgccgagcttctgcaggtccgagtgcagagtctgacacacattctggctctacaggaggaggagctgaccagaaaagtacagccatctgactccttagagccagagttcaccaggaaatgccagagcctgctcaaccgctggcgcgagaaagtcttcgcactgatggttcaactgaaggcccaagaatag

SEQ ID NO: 344337 - DNA, 951 bp, Artificial Sequence
  derived and/or modified sequence
atgtttcctccaagtgggcaccaggacgtatctgaaaggagattagatactcagcgcccacaagtgacaatgtgggagcgggatgtttcgtccgatcggcaggaacccggacgtaggggccgttcatggggcctggagggatctcaggccctcagtcagcaggctgaagtaattgtgagacagctccaagaactacgctggctggaagaggaggtgtggctgctccgggaaacctctctgcagcagaagatgcggctcgaggcccaggccatggagcttgaggctctagcgagggctgaaaaagctgggagggccgaagctgagggcctcagagctgctctcgccggagctgaagtggtgcggaagaatctggaagaaggacgccagcgggagttggaagaggtccagaggctccatcaagagcagctcagtagtttgacgcaggctcatgaggaagccctgtcatcactcacttccaaagccgagggactcgaaaaaagtctgtccagtttagagacacgaagggctggcgaagccaaggagttagcagaggcccagcgggaggctgagttgttaaggaaacagctgtcaaaaacccaggaggatcttgaagcacaagtgaccctggtggaaaatctgcgtaagtatgtgggagaacaagtgcccagcgaagtccattcccagacttgggagctggagcgacagaagctactggaaaccatgcaacatcttcaggaggatagagactcactccacgcaactgcagaattgttacaagtgagggtccagagcctgactcatatcttagccctgcaggaagaagaacttactaggaaagtgcagccgagtgatagcctggagcccgaattcacccggaaatgtcagtcactactcaatcgctggagggagaaagtttttgccttaatggtgcagctgaaggctcaggaatag

SEQ ID NO: 344338 - DNA, 951 bp, Artificial Sequence
  derived and/or modified sequence
atgtttcccccatctgggcaccaagacgtgtcagagagacgactggacactcagagacctcaggtgacgatgtgggaacgtgacgtgagctccgacagacaggagccgggacgcaggggaagatcctggggcctggagggtagccaggccctttcacagcaggccgaagtaatagtgagacaactccaagagttgagatggcttgaggaggaagtctggctgcttagagaaacgagcctccagcagaaaatgaggctggaggcacaagccatggagctggaggccctggctcgggcagagaaggcagggcgtgctgaggcagaaggcctgagagccgctttagccggagccgaggttgttcggaagaatctcgaggaaggcagacagcgcgaactggaagaggttcagcggctccaccaggaacagttgagtagtctcacacaggcccacgaggaagctctgtcttcgctgacaagcaaagctgagggtttagaaaagtcgttgtccagtttggagacccgccgtgcaggagaagctaaggaattggccgaagcccagagggaggctgagctgctcagaaagcagttgtccaagacacaggaggatctggaggctcaggtgaccctagtcgaaaatttaaggaaatacgtgggggaacaagtaccaagcgaggtgcacagccagacctgggagctcgagcgccagaagctattagaaactatgcaacatctccaagaagatcgtgactctttgcacgccacagcagagctcctccaagtcagagtgcagtctctgacgcacattctggcccttcaggaagaggagctcacgagaaaagtccagcctagcgactctttagaacccgaatttactaggaaatgccagtccttgctgaatcgctggcgggagaaagtgttcgccttaatggtccagcttaaggcccaggagtag

SEQ ID NO: 344339 - DNA, 567 bp, Artificial Sequence
  derived and/or modified sequence
atgttcccccccagcggcagcaccggcctgatcccccccagccacttccaggccagacccctgagcaccctgcccagaatggcccccacctggctgagcgacatccccctggtgcagccccccggccaccaggacgtgagcgagagaagactggacacccagagaccccaggtgaccatgtgggagagagacgtgagcagcgacagacaggagcccggcagaagaggcagaagctggggcctggagggcagccaggccctgagccagcaggccgaggtgatcgtgagacagctgcaggagctgagaagactggaggaggaggtgagactgctgagagagaccagcctgcagcagaagatgagactggaggcccaggccatggagctggaggccctggccagagccgagaaggccggcagagccgaggccgagggcctgagagccgccctggccggcgccgaggtggtgagaaagaacctggaggagggcagacagagagagctggaggaggtgcagagactgcaccaggagcagctgagcagcctgacccaggcccacgaggagtag

SEQ ID NO: 344340 - DNA, 567 bp, Artificial Sequence
  derived and/or modified sequence
atgttcccccccagcggcagcaccggcctgatcccccccagccacttccaggccagacccctgagcaccctgcccagaatggcccccacctggctgagcgacatccccctggtgcagccccccggccaccaggacgtgagcgagagaagactggacacccagagaccccaggtgaccatgtgggagagagacgtgagcagcgacagacaggagcccggcagaagaggcagaagctggggcctggagggcagccaggccctgagccagcaggccgaggtgatcgtgagacagctgcaggagctgagatggctggaggaggaggtgtggctgctgagagagaccagcctgcagcagaagatgagactggaggcccaggccatggagctggaggccctggccagagccgagaaggccggcagagccgaggccgagggcctgagagccgccctggccggcgccgaggtggtgagaaagaacctggaggagggcagacagagagagctggaggaggtgcagagactgcaccaggagcagctgagcagcctgacccaggcccacgaggagtag

SEQ ID NO: 344341 - DNA, 567 bp, Artificial Sequence
  derived and/or modified sequence
atgttccctccttccggtagtaccgggctcattccgccctctcatttccaggcacgacccctcagcacactcccccgaatggccccgacttggttaagcgacattcctctggttcagccacctggtcaccaggatgtgagcgagagacggctcgacactcagagaccccaggttactatgtgggaacgcgacgtcagctcggatcgtcaggaaccagggcgacgcggcaggagctggggcctggagggaagtcaggccctttcacaacaggctgaagtgatcgtgcggcagttacaagagttgcgtaggctggaggaagaagtgcggttgttacgagagacctccctgcagcagaaaatgcgactcgaagcacaggccatggaacttgaagccctcgcccgggccgagaaagctggacgagccgaggcagaagggttgcgagcagcactggccggcgccgaagtcgtgaggaagaatttggaagaaggtcggcagcgcgaacttgaggaggtccagagactacatcaggaacagttgtcgtccctgacccaggcacatgaagagtag

SEQ ID NO: 344342 - DNA, 567 bp, Artificial Sequence
  derived and/or modified sequence
atgtttcccccatcaggtagtaccggactgatccctcctagccacttccaggcccgcccactgtcaaccctgccccgaatggccccaacgtggctgtccgacattcccctcgtccagcctcctggacaccaggacgtcagtgagcggagattagatacccaacggccacaagtgaccatgtgggaacgggacgtgagcagcgaccggcaagaacccggccgaaggggaaggtcttggggcctcgaaggatcacaggccctgtcgcaacaagcagaagtgatagtgcgccaactgcaggagcttagatggcttgaggaagaagtttggctcttgagggaaaccagtttgcagcagaagatgcgcctggaagcgcaagcaatggaactggaagctctggccagggccgagaaagccgggcgcgccgaagctgaggggctccgagcggccctggccggggccgaggtggtaaggaagaacctcgaggaagggaggcagcgggaactggaagaagttcaacgcctgcaccaagaacagttgtcttcccttacccaggctcatgaagaatag

SEQ ID NO: 344343 - DNA, 567 bp, Artificial Sequence
  derived and/or modified sequence
atgttcccaccctccggatctactgggctcatcccccccagccattttcaggcaaggccactgagcaccctgccccgaatggctccaacctggctgtccgacatcccgctggttcagcctccaggccaccaggatgtgtcggaaaggaggttggatacgcagcgcccacaggtgacgatgtgggaacgggacgttagtagtgaccgacaggagcccggccgcagaggacggagctggggtctcgagggcagccaggctctgtcacaacaggctgaggtgatcgtcaggcagttacaagagctccgacggttggaggaagaagttagactgctcagagaaacaagccttcaacagaagatgcggttggaggctcaggccatggaactggaggctctggcacgcgcagagaaagcagggagagccgaggccgagggactaagagccgcacttgcaggagcagaagtggttcggaagaacctagaagagggccggcagagagagctggaggaagtgcagcgcctgcaccaggagcagctcagcagcctgacacaggctcacgaggaatag

SEQ ID NO: 344344 - DNA, 567 bp, Artificial Sequence
  derived and/or modified sequence
atgtttcccccaagcggcagcaccggtctcatcccgccatctcattttcaggccagacctctctccactctgccgcggatggcccccacttggctgtcagatattccactggtgcagcctccaggccaccaagatgtttccgaaagaaggctcgatacgcagcgtccacaggtgacaatgtgggaaagggatgtgtccagtgaccgccaggaacctggacgcagagggagatcgtggggactagaaggcagccaggcactttcccagcaagcagaagtaattgtgcggcagctgcaggaacttcggtggctggaggaggaggtttggctactaagggagacttcattacagcaaaagatgagactcgaggcgcaggcaatggagctggaagctctcgctcgcgcagagaaagccggccgggcagaggcggaagggctgcgggcagcactggcaggagctgaagttgttcgaaaaaacttagaagagggccgccagcgcgagctcgaggaggtgcagcgtttacaccaggaacagctgagctccctgacccaggcccacgaggagtag

SEQ ID NO: 344345 - DNA, 567 bp, Artificial Sequence
  derived and/or modified sequence
atgtttcctccttctggcagcacaggcctcatcccccccagccacttccaggcccggcccctgagcaccctgcccaggatggcccccacctggctgagtgacatccccctggtgcagcccccaggccaccaggatgtgtctgaaagaaggctggacacccagaggccccaggtgaccatgtgggagagagatgtgtccagtgaccggcaggagcccggccggcggggccgctcctggggcctggagggcagccaggccctgagccagcaggccgaggtgattgtgcggcagctgcaggagctgcggcggctggaggaggaggtgcggctgctgcgggagaccagcctgcagcagaagatgaggctggaggcccaggccatggagctggaggccctggcccgggcagagaaggccggccgggcagaggccgagggcctgcgggccgccctggccggggctgaggtggtgaggaagaacctggaggagggccggcagcgggagctggaggaggtgcagaggctgcaccaggagcagctgagcagcctgacccaggcccacgaggagtag

SEQ ID NO: 344346 - DNA, 567 bp, Artificial Sequence
  derived and/or modified sequence
atgtttcctccttctggcagcacaggcctcatcccccccagccacttccaggcccggcccctgagcaccctgcccaggatggcccccacctggctgagtgacatccccctggtgcagcccccaggccaccaggatgtgtctgaaagaaggctggacacccagaggccccaggtgaccatgtgggagagagatgtgtccagtgaccggcaggagcccggccggcggggccgctcctggggcctggagggcagccaggccctgagccagcaggccgaggtgattgtgcggcagctgcaggagctgcgctggctggaggaggaggtgtggctgctgcgggagaccagcctgcagcagaagatgaggctggaggcccaggccatggagctggaggccctggcccgggcagagaaggccggccgggcagaggccgagggcctgcgggccgccctggccggggctgaggtggtgaggaagaacctggaggagggccggcagcgggagctggaggaggtgcagaggctgcaccaggagcagctgagcagcctgacccaggcccacgaggagtag

SEQ ID NO: 344347 - DNA, 567 bp, Artificial Sequence
  derived and/or modified sequence
atgttcccccccagcggcagcaccggcctgatcccccccagccacttccaggccagacccctgtcaacccttcctaggatggcccctacctggctgtccgatatccctcttgttcagccacccggccatcaggatgttagtgaacggaggcttgatacacagcgaccgcaagtcaccatgtgggagagggacgttagtagcgacagacaggaaccaggcaggagagggcgcagctggggcctggaaggctcccaggctctttcacagcaggccgaagtgatagtccggcagttgcaggagttaagacgcctcgaggaggaagtgagactgctccgggagacatcattgcagcagaagatgcgcttagaagcacaggccatggaattggaggcactggccagagcggagaaggcaggtcgggccgaagctgagggactgcgtgcggcccttgctggggccgaggtcgtgagaaagaatctggaagagggacgtcagcgagagctcgaggaggtgcagagactgcaccaggagcagttgagcagcctgacccaggcgcatgaagagtag

SEQ ID NO: 344348 - DNA, 567 bp, Artificial Sequence
  derived and/or modified sequence
atgttcccccccagcggcagcaccggcctgatcccccccagccacttccaggcccggccactgagtaccctgccaaggatggcccctacttggctgtcggatatcccacttgtgcagccaccggggcaccaagacgtgtctgaaagaaggctggatacacagagaccgcaagtcacaatgtgggaacgtgatgtttcctctgataggcaggagccgggtagaaggggaaggagctgggggttggagggctcacaagcgctgtcgcagcaggcggaggtcatagttaggcagctgcaggagctgcggtggctggaggaagaagtttggctgctcagagagactagcctccagcagaagatgcgcctcgaggcacaagctatggagctggaagctctagcacgagccgagaaggccgggagagcggaagccgaaggcctcagagccgccctggcaggagccgaagtggtgcggaaaaacttggaagaggggcggcagagggaattagaagaagtccagaggctgcatcaggagcagctgagcagcttaacccaggcccacgaggagtag

SEQ ID NO: 344349 - DNA, 567 bp, Artificial Sequence
  derived and/or modified sequence
atgttcccccccagcggcagcaccggcctgatcccccccagccactttcaggcacgccccctgtcgactctgcctcgcatggcacctacatggctgtcagacatacccttggtgcagcctcctgggcaccaggacgtttccgagcggaggctggatacccaacgccctcaggttaccatgtgggagcgagacgtgtcctctgatcgtcaagaacctggtcggaggggccggtcatggggactggaaggaagtcaagcgctgtcccagcaggccgaggtcattgtgcggcaactccaggagctccgacgtttagaggaggaggttaggttacttcgcgagacctctttgcagcaaaaaatgcgtctcgaggctcaggctatggaactggaagctctggcacgggccgaaaaggcaggccgcgccgaggcggagggactgcgcgctgctcttgccggcgccgaggtggttcgcaaaaaccttgaggagggcagacagcgagagctggaggaggtgcagaggctgcatcaagagcaactaagctctcttacccaagcccacgaggaatag

SEQ ID NO: 344350 - DNA, 567 bp, Artificial Sequence
  derived and/or modified sequence
atgttcccccccagcggcagcaccggcctgatcccccccagccacttccaggcaaggccgctgtctacattgcctagaatggctcccacatggctttcagacatcccactcgtgcagccccctgggcaccaagatgtgtcagagcggaggctggacactcagagaccccaagtgactatgtgggagcgcgacgtctcctcagaccgtcaggagcccggcagaagggggcgatcttgggggttagagggctctcaggctttgtcccagcaagcagaagtcatcgtacgccagctacaggagctccgctggcttgaggaggaggtgtggcttctgagggagactagcttgcagcagaagatgagactggaagcccaggcgatggaacttgaagcactggctcgggccgaaaaagccggcagggcggaggctgaaggattaagggccgccctggccggtgccgaagtcgtgaggaaaaatctcgaggagggaaggcagagggagctggaagaggtccaacggcttcatcaagagcaactgtcttctctgactcaggcgcacgaagagtag

SEQ ID NO: 344351 - DNA, 567 bp, Artificial Sequence
  derived and/or modified sequence
atgttccctccatctggaagtactgggttgatacctccttcccactttcaggccagacccctgagtacattgcccagaatggctcccacctggctttccgatatccccctcgtacagcctcctgggcaccaggacgtttccgagagaaggctggacacccaacggcctcaggtaacaatgtgggagcgagacgtctcgtcggacagacaggaaccgggaaggagggggcgatcctgggggctggaaggatcccaggccctgtcccaacaggctgaggtaattgtgcgccaacttcaggagctccgacgtcttgaagaggaagttcggctgctgcgggagacttcacttcagcaaaagatgcgactggaagcccaagccatggagctcgaggcgctcgccagagctgagaaggctggacgagccgaggcagaaggactgcgtgctgctctggcaggcgctgaagtggtaagaaagaatctggaggaagggcgacaacgggaacttgaagaggtgcagcggctccaccaggagcaactgagctcccttacccaggcccatgaagaatag

SEQ ID NO: 344352 - DNA, 567 bp, Artificial Sequence
  derived and/or modified sequence
atgtttcctccctcagggtcaaccggccttatccctccatcccactttcaggctcggccactttcaactctgcccaggatggcacctacttggctttccgacatacccctcgtgcagccacctgggcatcaggacgtctccgagcgccgactggatactcagcgtccacaggtcacaatgtgggaacgcgacgtgagctctgataggcaggaacctgggaggcgcggaaggtcatgggggctcgaaggtagtcaagctttgagccaacaagccgaagtgatcgtgcggcaactgcaagagctccggtggcttgaagaagaggtctggctattgcgggaaacctcactgcagcagaaaatgcgcttggaggctcaggctatggagttagaggccctggcgagagccgaaaaagctgggagggccgaggctgaaggtctgagggcagccctggcaggagccgaagtggtgagaaagaacctggaagagggacgtcaaagagagctcgaggaggttcagaggctgcaccaggaacaactctctagcctcacacaagctcatgaggaatag

SEQ ID NO: 344353 - DNA, 567 bp, Artificial Sequence
  derived and/or modified sequence
atgttccctccatcaggatccaccggcctcatcccacccagtcatttccaggcacgccctctgagcacgcttccccgtatggcgcctacgtggctgtccgatatcccactggtgcaacccccaggtcaccaggacgtcagcgagcggagacttgatactcagaggccgcaggtgaccatgtgggaacgcgatgttagttcagacaggcaggagccgggtcggaggggaaggtcctggggactcgagggctctcaggctcttagtcagcaggccgaggtgattgttcgacagctgcaggagctgcgcagactagaagaggaagttcgtttgttacgggagacaagcttgcagcagaagatgaggctcgaggcacaggcaatggagttagaggccctcgctagggccgaaaaagcgggacgtgccgaggcagaaggattacgggcagccttggcaggcgctgaggtggtcagaaagaatcttgaggagggacgccagcgggaactggaggaagtgcagcgcctccaccaggagcagctgtcaagcctgacacaggcacacgaagagtag

SEQ ID NO: 344354 - DNA, 567 bp, Artificial Sequence
  derived and/or modified sequence
atgttccctcctagtggctccacaggtctcattcccccttctcactttcaagcccgacccctcagcaccttgccgagaatggcccctacttggctgtccgacatccctctcgttcaacctccgggacaccaagacgtgagcgaaagacggctggatacccagagaccccaagtgaccatgtgggaacgagacgtttccagtgatcgacaagaaccaggtaggcgtggacgatcctgggggctcgaaggcagccaggcactgtcgcagcaggcggaggtcatcgtgaggcagctccaggagctgcgctggctggaagaggaagtgtggttgctccgggagacctcactccagcagaaaatgcggttggaggcacaggccatggagctggaggcactggctcgagctgagaaggcaggcagggcagaggctgagggcctgcgcgctgctctagcgggtgctgaggtggtacggaagaatttggaagaaggacgtcagcgggagctagaggaagtccagagactccaccaggagcaattgagcagcctgactcaggcgcatgaagagtag

SEQ ID NO: 344355 - DNA, 771 bp, Artificial Sequence
  derived and/or modified sequence
tgaagactggacgccgagctgcagctgagcgccagactgatccagcaggaggtgggcagagccagagagcagggcgaggccgagagacagcagctgagcaaggtggcccagcagctggagcaggagctgcagcagacccaggagagcctggccagcctgggcctgcagctggaggtggccagacagtgccagcaggagagcaccgaggaggccgccagcctgagacaggagctgacccagcagcaggagctgtacggccaggccctgcaggagaaggtggccgaggtggagaccagactgagagagcagctgagcgacaccgagagaagactgaacgaggccagaagagagcacgccaaggccgtggtgagcctgagacagatccagagaagagccgcccaggagaaggagagaagccaggagctgagaagactgcaggaggaggccagaaaggaggagggccagagactggccagaagactgcaggagctggagagagacaagaacctgatgctgcagagactgctgaccgtgctgcccagcctgctggacaagaagaagagcgtggtgagcagccccagaccccccgagtgcagcgccagcgcccccgtggccgccgccgtgcccaccagagagagcatcaagggcagcctgagcgtgctgctggacgacctgcaggacctgagcgaggccatcagcaaggaggaggccgtgtgccagggcgacaacctggacagatgcagcagctgcaacccccagatgagcagctag

SEQ ID NO: 344356 - DNA, 771 bp, Artificial Sequence
  derived and/or modified sequence
tagcgattggatgctgagttgcagctatccgcacgactgatacagcaagaggttggcagggctagagaacagggagaggccgagcgtcagcagttatccaaagtggcccaacagctggagcaggaactgcagcagactcaggaaagcctggcgagtctgggccttcagctcgaagtggcccgccagtgtcagcaggagtctactgaggaggccgcctctttacgccaggagctcacccagcaacaggaactctacggacaggcgctccaggaaaaagttgctgaagtggagactcgactgcgagaacagctatcagacactgagaggagactgaacgaggccaggcgggaacacgctaaggccgtggtcagcctgaggcagatccagagacgcgcagcccaggaaaaggagcgaagtcaagaactgcgccgtctgcaagaagaagcccgcaaagaggaaggacagcggctggccaggcgcctgcaggagcttgaaagggacaagaaccttatgttacagaggttgcttaccgtcctgcccagccttttggacaaaaagaaatccgttgttagtagccctcgccccccggagtgttccgcctcagctccagtggcagccgctgttcccacaagggagagcatcaaagggtcactgtcagttttgctggacgacctgcaagatctgagcgaagctatttctaaggaagaggctgtctgtcagggcgacaatctggacaggtgctctagttgtaacccccagatgagctcctag

SEQ ID NO: 344357 - DNA, 771 bp, Artificial Sequence
  derived and/or modified sequence
taaaggctggatgcagagctgcaattgtctgcccgactaattcaacaggaggttgggagggccagagagcagggagaggctgagaggcaacagttgagtaaagtcgctcaacaattggaacaggaattgcagcagacccaggagtccctggcctcattgggccttcagcttgaagtcgctcgccagtgtcagcaggaatccacagaggaggccgcttccttaaggcaagagctcactcaacagcaggaactctacgggcaggcgctgcaggagaaagttgccgaggtggagacccgacttcgcgagcagctcagcgacaccgaacgccgcctgaacgaggcccgcagggagcacgctaaggcagttgtctctttaagacagatccaacggcgcgccgcccaggagaaagaacgttctcaagaactgcggcggctgcaggaggaagctcgcaaggaagagggccagcgtctggcacgtaggctgcaggaattggagcgagataagaatctcatgttacagcgtctgctgactgttctgccctcacttttggacaaaaagaagagcgtcgtgagttccccacgtccaccagaatgttctgcaagtgcccccgtcgcggcagctgttcccacccgtgagtccatcaaaggctccctctccgtgctgctcgatgacttgcaggatctgtccgaggctatcagcaaggaagaggctgtctgtcagggggacaacctcgaccgatgtagctcatgtaatccccagatgtcaagctag

SEQ ID NO: 344358 - DNA, 922 bp, Artificial Sequence
  derived and/or modified sequence
ccgcctggatgcagaactgcagctgagtgcccgcctcatccagcaggaggtgggccgggctcgggagcaaggggaggcagagcggcagcagctgagcaaggtggcccagcagctggagcaggagctgcagcagacccaggagtccctggctagcttggggctgcagctggaggtagcacgccagtgccagcaggagagcacagaggaggctgccagtctgcggcaggagctgacccagcagcaggaactctacgggcaagccctgcaagaaaaggtggctgaagtggaaactcggctgcgggagcaactctcagacacagagaggaggctgaacgaggctcggagggagcatgccaaggccgtggtctccttgcgccagattcagcgcagagccgcccaggaaaaggagcggagccaggaactcaggcgtctgcaggaggaggcccggaaggaggaggggcagcgactggcccggcgcttgcaggagctagagagggataagaacctcatgctgcagcgactgttgacagttcttccttccctactggataagaagaaatctgtggtgtccagccccaggcctccagagtgttcagcatctgcacctgtagcagcagcagtgcccaccagggagtccataaaagggtccctctctgtcctgctcgatgacctgcaggacctgagtgaagccatttccaaagaggaagctgtttgtcaaggagacaaccttgacagatgctccagctgcaatccccagatgagcagctaagcagctgacagttggagggaaagccagcctgggggctgggaggatcctggagaagtgggtggggacagaccagcccttccccatcctggggttgccctgggggataccagctgagtctgaattctgctctaaataaagacgactacagaagga

SEQ ID NO: 344359 - DNA, 771 bp, Artificial Sequence
  derived and/or modified sequence
tgaagactggatgctgagctgcagctgagcgcccggctcatccagcaggaggtgggccgggcccgggagcagggcgaggccgagcggcagcagctgagcaaggtggcccagcagctggagcaggagctgcagcagacccaggagagcctggccagcctgggcctgcagctggaggtggcccggcagtgccagcaggagagcacagaggaggccgccagcctgcggcaggagctgacccagcagcaggagctgtatggccaggccctgcaggagaaggtggccgaggtggagacccggctgcgggagcagctgagtgacacagaaagaaggctgaatgaggcccggcgggagcacgccaaggctgtggtgtccctgcggcagatccagaggcgggccgcccaggagaaggagaggagccaggagctgcggcggctgcaggaggaggccaggaaggaggagggccagaggctggcccggcggctgcaggagctggagcgggacaagaacctgatgctgcagaggctgctgactgtgctgcccagcctgctggacaagaagaagtctgtggtgagcagcccccggcccccagaatgttctgccagcgcccctgtggccgctgctgtgcccacccgggagagcatcaagggcagcctgtctgtgctgctggatgacctgcaggacctgtctgaggccatcagcaaggaggaggccgtgtgccagggcgacaacctggaccgctgcagcagctgcaacccccagatgagcagctag

SEQ ID NO: 344360 - DNA, 771 bp, Artificial Sequence
  derived and/or modified sequence
tgacggctggacgccgagctgcagctgagcgcccggctgatccagcaggaagttggaagggcgagggaacagggggaagccgagagacagcagttatctaaggtggcacagcagctggagcaggagttacagcaaactcaggagtccttggcctccctcggcctgcagctggaagtggccaggcagtgtcagcaggagtccacggaggaagccgcctccctgagacaagagctcactcagcagcaggagttgtatggtcaggccctccaagagaaagtcgcagaggtggagaccagactgcgagagcaactaagtgacacagaacgtaggctgaatgaagcccggagggaacacgccaaggctgttgtgtcccttaggcaaatccagagacgagccgctcaagagaaggagcgctcccaggagctgcggaggctgcaagaagaggccagaaaggaggagggacaacgcctcgcccggcgtctgcaggaattagagcgcgacaagaacctcatgctccaaagattgcttaccgtgctgccatccttgctggataaaaaaaaaagtgtcgtttcaagtcctcgcccccctgaatgctccgcatctgcaccagtagcggcggccgttcccacgcgcgaatcgatcaagggctccctcagtgtcctgctggacgatctgcaagatttaagcgaggccatctccaaggaggaggccgtctgccagggagataatctggatcgatgtagttcttgtaacccccagatgtccagctag

SEQ ID NO: 344361 - DNA, 771 bp, Artificial Sequence
  derived and/or modified sequence
tgacggctggacgccgagctgcagctgagcgcccggctgatccagcaggaggtcgggagggccagggaacagggggaggctgagcgacaacagctctctaaggtagcccagcaactagagcaggagctgcagcagacacaggagagcttggccagccttggcctgcaactggaggtggctaggcagtgccagcaggagtcaaccgaggaggcagcgtctctgagacaggagttgactcaacagcaggagctttacgggcaggccctccaggagaaagttgccgaggtggagacccggttacgggaacagctgtcggacactgaacgacgactgaatgaagcacgcagggagcacgccaaggcagtggtgagcctgcggcagatccagagaagggctgcacaggaaaaagaacgctcgcaagagttgagacggttgcaggaagaggcgagaaaagaggaggggcaacgcctagcacgcagactccaggaattagaacgcgataaaaatttgatgctccagagactacttacagtgctgcctagtctgctggacaagaaaaagtcggtggtgtcctcacccagaccacctgagtgttctgcctcagcaccagtagcagctgcagtccctactagggagagtattaagggcagcttgtctgtgctgctcgacgatttgcaggatcttagcgaagctatctcaaaagaagaagccgtctgccagggcgataatctcgatagatgttcttcgtgcaaccctcaaatgagctcatag

SEQ ID NO: 344362 - DNA, 771 bp, Artificial Sequence
  derived and/or modified sequence
tagcgccttgacgctgaattgcaactcagcgcgaggctaatacaacaggaggttggccgtgctagagaacagggcgaagcagagcggcagcagctttccaaggttgctcagcagctggaacaggagttgcagcagacccaggaatccctggcttctctggggctccaattagaggtcgctaggcaatgtcaacaggagtctacagaagaggccgcatctctccgccaggaacttacccagcagcaggagctctatggtcaggcgctccaggagaaggtggccgaagttgaaactcgtcttagagagcagttgagtgacaccgagaggcggctaaacgaagcgcgacgagagcacgctaaagccgttgttagtcttcgtcagattcagaggcgggctgctcaggaaaaggagagaagccaagagcttcgcaggctgcaggaggaggcccgtaaagaagaagggcaaagactggctaggaggctccaagagttggagagggataaaaatctaatgctgcaaagattgctcacagtgctgccatccctactggacaagaagaaaagcgtcgtgtcatcacctcggccacctgagtgtagcgcctctgctcctgtcgccgcagcagttccgacgcgcgaaagcatcaaggggtctcttagcgtactcctggacgacctgcaggatctgtcagaagcaatcagcaaagaagaagctgtatgtcagggggataatcttgatcgctgcagcagctgtaatccgcaaatgtctagctag

SEQ ID NO: 344363 - DNA, 771 bp, Artificial Sequence
  derived and/or modified sequence
tgacgcctggatgcagagctgcagttaagtgctcgactcattcaacaagaggtgggtagagcaagggagcagggagaagctgaacgccagcagttatccaaggtggctcagcaacttgaacaggagctacaacagacacaggagtctcttgcttctttggggttgcaactcgaggtggcccgacaatgtcagcaggaatcaaccgaggaggctgcttctctgagacaggagctgacccagcagcaggagctgtacggtcaagcgctgcaagagaaggtggctgaggttgagaccagactgagggagcagctgagtgatacagaaaggcgattgaacgaagccagacgagagcacgcaaaagctgtggtttcattgcggcagattcagaggcgagctgctcaagaaaaggagcgcagccaggaactgagacgattgcaagaagaagcgcgaaaggaagagggacaaaggctcgccagaagacttcaggagttggaaagggacaagaatctaatgctccagagactgttgacagtgctgccaagcctcttagacaaaaagaagtctgttgtctcaagcccacggcctcctgaatgcagtgcatccgcccctgtggccgctgccgtaccaactagagaatccatcaagggatccctttctgtacttctcgacgaccttcaagatttatcagaagcaatttctaaagaggaggctgtgtgccaaggcgataacctggacagatgcagcagttgtaatccccagatgtcatcctag

SEQ ID NO: 344364 - DNA, 6474 bp, Artificial Sequence
  derived and/or modified sequence
atgtctgacagatcaggccctactgctaaagggaaggatggcaaaaagtactcttctctgaatctgtttgatacctacaaagggaagagtctagagattcaaaagcctgcggtcgcgcctaggcatggcctacagagcctggggaaggttgccattgccagacggatgcccccacctgcaaaccttcctagtctgaaagctgagaacaaagggaatgacccaaacgtcagcctggtaccgaaagacgggaccgggtgggcttccaaacaagaacagagcgatccgaagtccagcgatgcatctaccgctcaaccccctgaatctcaaccacttccagctagccagactccggcgagcaaccaacccaagcgccctccagcagctcctgagaatacccctcttgtcccgagcggtgttaaaagttgggctcaagcctctgtgacccacggggcacatggcgacggcggtcgagcttcatctctactaagtcgcttcagtagagaggagttccccacactgcaagccgccggcgaccaggacaaagccgcaaaagagcgcgaaagcgccgaacagtcaagtggtcccgggccctcactccgacctcagaacagcaccacgtggcgcgacggcggggggcgcgggcccgacgagcttgaggggcctgacagtaagttgcaccatggtcacgatccccgtggaggcctgcagccgtccggccctccccagttccccccctaccgaggcatgatgcctcccttcatgtacccgccttatctgccatttccacccccttacggcccgcaagggccttaccgctaccccacacctgacggaccaagtcggttccctcgcgtggctggccctcggggaagcggacctcctatgaggctcgtggagccagtcgggcgaccctctatcctgaaggaggataacttgaaagaattcgatcagctggaccaggaaaatgacgacggatgggccggggctcacgaggaagtcgactatacagagaagttaaagttttccgacgaggaagatggtagagacagcgacgaagagggagccgagggacatcgggactctcaaagcgccagcggtgaagaacgtccgcccgaagcagatggtaagaaggggaattcaccaaactctgaacctccaacccccaaaactgcttgggctgagacgtctaggccgcctgaaactgagccgggaccacccgctcccaagccccctctgccgccacctcaccgcggacctgcgggcaactggggccctcctggggattacccggatcggggcggccctccctgcaaaccccctgctcctgaggatgaagatgaggcctggcgacagaggcgcaaacagtcttcatccgagatatctctcgcggtggagcgtgcacggaggcggcgggaagaggaggagaggcgcatgcaagaggagcggagggccgcatgtgccgaaaagctcaaacgactggatgaaaagtttggagctcccgacaagcgactcaaggctgagcccgccgctcctcctgccgcgcccagcacccctgcccccccaccagcggttcctaaggaacttccagccccaccagcacccccaccagcttccgctcccacacctgaaaaagagcccgaagagcccgcccaggccccccctgcccagagcacacctacacccggcgtagctgccgctcctacattggtcagtggtggtggtagcacttctagtactagcagcggaagcttcgaagcatctccagttgaacctcagctcccgtccaaggaaggcccagagccccccgaggaagtgcctccccctacgacaccaccggttcctaaggtcgaaccaaagggggacggaatcggccccacccggcagcccccttcccaggggctgggttacccaaagtaccaaaagtccctgcctcctaggttccagagacagcagcaagagcagctgttgaagcagcagcagcagcatcaatggcaacagcatcaacaggggagtgccccaccaacccccgtgcctcccagccctccacaacctgtcactcttggtgcagtaccagcacctcaagctcctccacctccacctaaggccctctacccaggagccctgggacgcccgccccccatgccccccatgaattttgacccccggtggatgatgattccgccatatgtggatcctaggctcctccagggccgcccacccttagatttttatccccccggggttcacccatccggtctggttccacgtgagcgatccgactcaggcgggagtagttccgaaccttttgatcgacatgcccccgcaatgctccgcgagaggggcacaccgcccgtcgaccccaagcttgcgtgggtcggagacgtgttcactgcaacacccgctgaaccacgacctctcacaagtcctctgcgccaggccgcagacgaggacgataagggcatgcgttccgaaacgcctcccgtgccacccccccccccgtatctggcctcttaccctgggttccccgagaacggtgcacccggccccccaatctcccgatttcccctggaggagccaggtccaagacccctgccatggcctccaggcagtgatgaggtggccaagatccagactcctccccctaaaaaagaacctcctaaagaagagacagctcagctgaccggccccgaagctggcaggaaacctgctagaggagtgggctcaggagggcagggaccccccccaccccgtagggagtcgagaactgagactcggtggggcccgcgtccgggcagtagcaggcgcgggatcccacccgaagaaccaggtgccccaccgcggcgcgcgggccccattaaaaagcctccgccccctacgaaagtggaagaattgccgcccaaaccactggagcaaggggacgagaccccaaaaccaccaaagcctgatcctctgaagattaccaagggtaagctagggggaccaaaggaaaccccaccgaacggcaacctgtctccagctccaaggctgagacgggactactcctacgagcgcgtcggtccaactagttgtcgaggccgaggcagaggggagtattttgcccggggcagaggctttagaggaacctacggtggtagaggcaggggcgccagatcaagagagttccggtcctatcgggagttccgaggcgacgacggacgcggcggaggtacaggaggcccaaaccacccccccgctccgcggggccggacagcctccgagacaaggtctgagggttcagagtacgaagaaataccaaagaggcgacgccaaaggggcagtgagaccggatccgaaacccatgaatccgatcttgctccaagcgataaagaagcacctacgcccaaagaggggacgcttacccaggtacccctggcccctccccccccaggcgctcctccaagccctgcacctgctcggtttaccgcccgtggcgggagggtctttacccctcggggggtaccctccaggcgcggtcgaggcggaggacggccccctcctcaggtgtgccccggatggtccccacctgcaaagagtctggcacctaaaaagcctccgaccgggcccctgcctccatccaaggagcctctgaaggagaaactcattcctgggcccctgagtcctgtggctcgtgggggcagcaacggtggaagcaatgttggcatggaggacggcgaacgtcctagaaggcgacgccacggccgagcacagcaacaagataagccacccagattcagaagattaaaacaggaaagagagaatgcggctcggggaagtgagggaaaaccaagcctcacattgcctgcatcagcacccggccccgaagaagctctgactacagtgaccgtggccccggcgccacgtagggccgccgccaaatcaccagacttgagtaaccaaaattccgaccaggccaatgaggaatgggaaacagcatcagagtcgagtgacttcacatccgagagacggggagataaggaggcccctccgcctgtcttgcttactcccaaggccgtgggcacaccaggaggcggaggggggggggctgttcctggaatatctgctatgagccgaggcgatttatcccagagggcgaaggacctgtccaaacgtagtttcagttcacagcgcccaggtatggagaggcagaatcggcggcccggcccaggaggtaaagccggctcctcgggttcctcgtccgggggggggggcgggggaccgggcgggcgcaccggtccaggacgcggggataagcgttcgtggccctcccctaaaaaccgctctagaccccccgaagagaggccacctggcctgcctcttccccccccccccccgtcctcttccgccgtcttccgccttgatcaagtgatacacagtaaccctgccggaatccaacaggcactcgcacagctgtcctcacgccagggctccgtgactgcacccggggggcatccacgccacaagccgggacctcctcaggccccccagggcccaagtccacggccaccgactcgctacgagcctcagagggtcaactctgggctaagttctgacccacacttcgaagaaccaggtccaatggttcgcggggtcggcggaacaccaagggatagcgcgggagtctctcccttcccaccaaaaaggagagagcggccaccccggaaacctgagctcctacaagaggaatccctgccacctccacacagcagcggctttctaggatccaaacccgaaggcccggggcctcaagccgaaagccgtgatactggtacagaggcgttgacccctcacatctggaacagactgcacaccgccactagcagaaaatcgtacagacccagcagcatggagccatggatggagcccctgagcccttttgaggatgtggctggcacagagatgtctcagagcgacagtggggtggatctcagcggagattctcaagttagtagtggcccgtgttcgcagcgctccagccccgacggcggcctgaagggagccgccgaaggcccccctaaacgtcccggagggtcttcccctctgaacgccgtaccttgcgaaggcccaccgggttcagaacccccccgcagacctcctccagctcctcatgatggggacaggaaggagctgcctcgcgaacaaccgcttccacccggccccattggaacagagcgaagtcagcacaccgaccgcgggactgagcctggtcccataagaccctcccaccgtcctggccctcctgtgcagttcggcacatcagataaggactctgatctacgattggtcgttggagattccttgaaggccgaaaaagagcttactgcgagtgtaaccgaagccatcccggtttcccgcgactgggagctgctgccctccgctgccgctagcgctgagcctcaatccaaaaacctggactctgggcattgtgtacctgaaccatcctcatcaggtcaacgattgtaccctgaggttttttatggcagcgccggacccagctcttctcagatctctggcggggctatggattcacagctgcatccgaattcagggggctttaggcctggcacaccaagtctgcacccttacaggtcacagcctttgtatttacctccggggccagccccaccttcggccctgctgtccggtgttgcattgaagggacagtttctggatttctccaccatgcaggccacggagctgggaaagttgccagcgggcggcgtgttgtatcctcccccgtcctttctgtattcgccggccttctgcccttcacccctgcctgatacatccctgctgcaggtgcgccaggacttgccttcccctagcgacttttattccacccctttacaaccgggcgggcagagcgggtttctcccctctggagcccctgcccagcagatgttactgcccatggtggactcccaattgcccgtggttaactttggtagcctcccacccgcacccccaccagccccaccctccctcagcctgctcccagtcgggccggcactccagccacccagcttggccgttagaccccctccagcccccgccacgcgagtcttgcctagccccgccaggcccttcccggcaagtttaggtcgagctgagcttcatccagtggagctaaagccattccaagattatcaaaagttgagttctaacctcgggggccctggatcctctcgtaccccgcctaccggcagatcttttagtggtttaaacagccgccttaaggccaccccaagcacctattctggcgtttttcgcacacagagggtggatctataccagcaggcctcccctcccgatgcgttgcggtggatccctaaaccatgggaaagaacgggacccccccctcgggagggccctagtcggagggccgaagagccaggcagcaggggagataaagagccaggcttgccccccccgcgctag

SEQ ID NO: 344365 - DNA, 6474 bp, Artificial Sequence
  derived and/or modified sequence
atgtctgaccgaagtggtcccaccgctaaaggcaaagatggtaaaaagtattcttctctaaacctctttgacacctataagggaaagtcactggagatccagaagcccgccgtcgccccacgtcatggcctccagagcctgggcaaagtagcaatcgctcgtagaatgccaccccccgcgaatctccctagccttaaggccgagaataagggtaacgacccgaacgtcagcctagttcccaaggatggaaccggatgggcatccaagcaggaacagagcgaccctaaaagtagtgacgcaagtacagcccagcctcccgagtctcaacctctccccgcctcacagacccctgcatctaatcaaccaaaaagaccacccgccgcaccagagaatacacctctcgtgccatcaggggttaaatcttgggctcaggccagcgtaactcacggcgcccacggagatggtggtcgggcgagctccttgctgagccgtttctcacgtgaggaatttcccacgttacaggctgcaggagaccaggataaagccgccaaagagcgagaatcagcggaacagtcatccggtcctgggccatctctgagaccccaaaatagtaccacctggagggacggagggggcagggggcccgacgagctcgagggacccgatagtaaattgcaccatggccacgaccccagaggggggctacagccaagtggtcctcctcagttccccccataccgtgggatgatgcctcccttcatgtacccaccttatctccctttccctcctccatacggtccccagggaccctataggtaccctacacccgatggaccgtccaggttccctagagttgcaggcccccgtgggagcggacctccaatgcgcctagtggaaccagttggtcgccccagcattttaaaggaagataacctgaaagaattcgaccagttagaccaggagaacgacgatggttgggcaggggcccatgaagaagtggactacactgagaagcttaaattctcggacgaagaagacggtcgggatagtgatgaggaaggggcggaaggccacagggacagccagtcggcttccggagaggaacggccccccgaagcggatggcaagaaggggaactcaccaaactctgagccacccaccccaaagacagcgtgggccgaaaccagtagaccccccgaaaccgaacccggcccacctgcacctaaaccccccctgcccccacctcaccggggccccgcgggcaactgggggccgccgggggactacccagaccgagggggccccccatgcaaacctccagcacctgaagatgaggacgaagcgtggcgtcagcggcgtaagcaatcaagttccgaaattagcttggccgtggaaagggcacgtcgacggagagaggaggaggagaggcgaatgcaggaggaacgtcgagccgcgtgtgccgagaagctgaaaaggcttgacgagaagttcggggctcccgataagcgcctaaaggccgaaccagctgcccctcccgccgctccatcgacgcccgctcccccgcccgctgtgcccaaggaacttcccgcacccccggcccccccacctgcgtccgcccctactcccgaaaaggagcccgaagaacctgcacaagcaccccctgcacaaagcacacctaccccaggtgtggccgccgctcccacactggtctcaggaggaggctctacaagctccacttcgtcaggcagcttcgaagcgagtcctgtcgaaccccagttgccctccaaagaaggtccagaaccacccgaagaggttcccccccctacgacaccccccgttcccaaagtagaacctaagggcgacggcattgggcccactcgacagccacctagtcagggcttggggtacccgaaataccagaagagtctgccaccgcggtttcagaggcagcagcaagagcagctgctaaagcagcagcaacaacaccaatggcagcaacaccagcagggaagcgcccctcccacaccggttcctcccagtccaccccaaccagtgactttgggcgcggttccagccccacaggctccaccacctccccctaaggccctgtacccaggagcacttgggagacccccacccatgcctccaatgaactttgaccctcgctggatgatgatccccccctacgtcgacccgaggctcctgcagggtcggcctcctttggacttctaccccccaggcgttcatcccagtgggctggtgccacgcgaaaggtcagactctgggggatcctccagtgagccttttgacaggcacgcaccagctatgctgcgcgagcgaggaactccacctgtagaccctaaactagcatgggtcggcgatgtctttactgccacaccagctgaacctcggcccctcacttcacctttacggcaagcagccgacgaggacgataagggcatgcgaagcgaaacgccgcctgttcctcccccccccccctacttggcgtcctatcccggcttccccgagaatggggctccgggccccccaataagcagattcccactagaagagccaggaccgagaccccttccgtggccacccggttcagatgaggtcgccaagatccagacaccaccacctaaaaaagagccacccaaggaagaaaccgcccagctcacaggacccgaagccgggagaaagcccgctagaggagttgggagcggtggccagggtcctcctcccccacgacgcgagagtcgcaccgagaccaggtggggcccacggcccgggtcaagtaggcggggcatcccccccgaggaaccaggggctccgccgaggagggcaggacctattaagaaaccaccacccccgacaaaggtggaagaactgcctccaaaaccccttgagcagggagacgaaacgcctaagcccccgaaaccagaccccctgaagattactaaggggaaactcggcgggccaaaggagacacctccgaatggtaatctgtctcctgctccaagactccgtagagattattcatatgaaagagtgggccccacctcctgtcgcgggcgcggccgtggtgagtattttgcccgcggccggggatttagaggaacatacggcggacgcggcagaggcgcacgtagtcgcgagtttaggtcctatcgggaatttcggggagatgatggtcgtgggggggggacggggggccctaaccatccccccgctcctcgggggagaaccgcctctgagactcgcagcgaaggaagtgaatatgaggaaatcccaaagcggcgccgccagcgcggaagcgaaacgggttcagagacacatgaatctgacctagctccatccgacaaagaggcaccaaccccaaaggaaggcacactgacacaagtgccccttgcccccccaccccccggggcccctccgtcgccggcgcctgctcgcttcactgcaaggggaggaagagtcttcaccccgcgtggggtcccctcacggagagggcggggcggtgggcgaccccctcctcaggtttgccccggttggtctccccccgcaaaaagtttagctccgaagaaacccccaacaggcccgttgcccccgtccaaggagcccctcaaggaaaaactcatcccggggccactcagccccgtcgccagggggggatctaacggcggaagcaatgtaggcatggaggacggcgagcgaccaaggaggcggcgccatggtcgagcacagcagcaagataaacctccgcgcttccggcgcctgaagcaggaaagggagaacgctgcgcgaggcagcgagggcaaacctagccttacgctgcctgcgagcgcccctggcccagaggaggctcttacaaccgtcacagtggcacctgcaccccgcagggccgcagccaagtctcccgacttatcgaaccagaactctgatcaggcaaatgaagagtgggagactgcatcagaaagtagcgattttactagcgagaggaggggcgacaaggaagcaccgccccccgttctgctcacccctaaagctgtaggtacacccggcgggggaggggggggcgctgtccccggaatcagtgccatgagtagaggggatctaagtcaaagggccaaggatctgagcaagcgcagctttagctcgcagagacctgggatggagcggcagaaccgtcgccctggccctgggggaaaggctgggtcttccggctctagttccggtggtggggggggcggccccggcggacggaccggaccggggaggggagataagagatcctggccaagccctaagaatcgctccagaccacctgaggagcggccaccaggcctgcccctgccccctccaccccccagctccagcgccgtgttccggctggatcaggtcatccattctaatcccgcgggaattcagcaggccctggctcagctgtcgtcacgccagggcagcgtgacagctcctggtggccacccacggcacaagcccgggccaccacaggcccctcagggcccatccccacgccctcctactagatacgagccacagagagtcaacagcgggcttagctcggacccccatttcgaagagcctggtccaatggtgcgcggcgtcggtgggacgccacgcgattcagctggagtgtcccccttcccaccgaaaaggcgagaaagaccgccacggaagccagagttactacaggaggaatccttgccacctccccactcttccggcttcttagggagcaagcccgaaggcccaggtccgcaggcagagtctcgcgacactgggacggaagcgctaacaccacacatctggaacagactccatacagccacatctcggaagtcttatcgaccatcatcaatggagccttggatggagcccctgagcccttttgaagatgtggccgggacagaaatgtcccagtccgattcaggagtcgacttatcaggcgactcccaggtgtctagcgggccctgcagccagcgttcgagcccagacgggggactgaagggagcagctgagggccccccaaagagacccggaggttcgtcgccactcaatgctgtgccgtgcgaggggccacccggaagcgagccaccccgacgcccacctccagcccctcatgacggggaccggaaggagttacctcgggaacagcccttgccaccagggcccatcggaaccgagagaagtcagcatacagacaggggtacagagcctgggcccatcaggcccagtcaccggcccgggccccctgtgcagttcggcacctccgataaggacagtgatctcaggctcgtggttggggacagcttaaaggccgagaaggagctaaccgcctccgtgacagaggcgattcccgtgtctagggattgggaactgctgccaagcgcggccgcttccgcagaaccccagtcgaaaaacctcgattcagggcattgtgtgcccgagccctccagttctggccagcgtctgtatcctgaggtgttttacggctctgccggcccttccagtagtcaaattagcggaggtgctatggactctcagctgcatcccaattcaggcggctttaggccgggaacacctagtctacatccctatcgttctcagcctctatacctgcctcccggccccgcaccacccagcgcccttctatctggggtcgctctcaaggggcagtttctggattttagcaccatgcaagccactgaactcggtaaacttcccgcaggcggagtcttatacccacccccttcattcctgtactcacccgcgttctgtccatctccgctgcctgacactagtctgctgcaagtgagacaggacttaccttctcccagcgatttttatagtacccctctgcaaccaggaggccagagtggcttcctcccaagcggtgccccggcgcagcagatgctcctgccaatggtagactcccagctccctgtggttaatttcgggtccctgcccccagcaccacctcccgccccacctagcctctctttgttgccagtgggacctgccttacaacccccatccctcgccgtgcgcccaccccccgcaccggcgacacgagtcctaccatcccctgctaggccttttccagcatcactgggccgggcagagctccacccggtcgagctcaaaccgtttcaggattatcaaaaactgtcctcaaaccttggaggccccggaagctctcggacgccccctacagggcggtcttttagtgggttgaactctcgcctcaaggcaacgccgagcacgtatagcggcgtatttcgcacacagagggtcgacctgtaccagcaggcaagcccgcctgatgccttgcgctggatacctaaaccctgggagagaaccgggccaccgccgcgcgagggcccctcaaggcgtgctgaagagccaggcagtcggggagacaaggagccagggctgccacctcctcggtag

SEQ ID NO: 344366 - DNA, 6474 bp, Artificial Sequence
  derived and/or modified sequence
atgagcgatcgctctggacctacggctaaagggaaagacggtaagaagtacagctctcttaatttattcgacacctacaaagggaagtctttggagatccagaaaccagctgtggcacctagacacgggttacagtcgctcggcaaagtggctatcgcaaggcgaatgccaccgccagcgaatctcccctccctcaaagctgaaaacaaaggcaatgacccaaacgtgtctctggtgcctaaggatggcactggttgggcgagtaaacaggaacagagtgatcctaaaagttctgacgcttcaaccgcccagcctcctgaatcacagcctctccccgccagtcagactcctgcatcgaatcagcctaagcgacccccagcggcccctgagaacacccctttggtaccctctggggttaagtcatgggcccaggcctctgttacccatggcgcacacggagatggcggcagagcttcgtctctgctgagtagattcagccgcgaagaatttcctacgctccaggccgcgggcgatcaggataaagccgcgaaggaaagggagagcgcagagcagtcatcagggcccggcccatctctccggccacaaaatagcactacctggagagacggcggcgggcggggaccagatgagttggaaggcccagacagtaagctccatcatggccacgatccgcgagggggacttcaaccctctggtccaccccagtttccaccctaccgcggcatgatgccaccctttatgtatccgccatatctgccttttccacctccatacggccctcaagggccataccgatacccaactcccgatgggccctccaggttcccccgggtggctgggcctagaggatctggccccccaatgcgactcgtggagcctgtcgggaggccttccatcctcaaggaggacaacctgaaggaatttgaccaactcgaccaggagaacgatgacggttgggccggagctcatgaagaagttgattataccgaaaaactaaagttctctgatgaggaagacggcagggacagcgacgaggagggcgcagagggacaccgtgactcacagagcgccagcggcgaggaaagaccccccgaggccgatgggaaaaaaggaaactccccaaatagcgagcctcccacccctaaaactgcctgggcagaaacatcccggccacccgaaacggaacctggccctccagctccgaaaccaccgttgcctcctcctcaccgggggccagccgggaattgggggccccccggggattaccccgataggggcgggcccccgtgtaaaccccctgcccccgaggatgaagacgaagcttggagacagcggagaaaacagtcaagcagcgagattagtctggctgtggagcgcgcgagaaggaggcgagaagaggaggagagacggatgcaggaagagcgtagggctgcctgtgccgagaaactgaagaggctggacgagaagtttggggccccagacaagcggcttaaagctgaaccggccgcaccgcccgccgccccgtctactccggccccgccaccagccgtcccaaaagagctccccgcaccaccagccccccccccagcttctgcacccacaccagaaaaggaaccggaggagccagcccaggcccctcccgcgcagtctacgcccactccaggcgttgctgccgcccccacactagtaagtgggggcggctcaacaagtagcaccagtagcggctcctttgaggcctctccggtggagccacagctcccatccaaagaagggcccgaacctcccgaagaagtgccaccacccacaactcccccagtcccgaaggtcgaacctaagggggatggaattgggcctacaagacagcctccatcgcaaggtctgggctaccccaagtaccagaaaagtttgccccctagattccagaggcaacaacaggagcagctgttgaaacaacagcaacagcaccagtggcagcaacatcaacaggggtccgccccgcctactccagtccccccgagcccgccgcaaccggtaactttaggtgctgtgccagcacctcaggctcccccacctccacccaaagctctgtaccccggagctcttgggcgaccaccacctatgcccccaatgaatttcgatcccagatggatgatgatccctccttatgttgacccacgcctcctccagggccggccccccctagacttttatccacctggcgtccatccctccggcctggttcctcgagagcggagtgactctggcggctccagctccgagccgtttgaccgacacgctcctgccatgctgagagaacgtggcacccctcctgtcgaccctaagcttgcctgggtcggagatgtgttcaccgccaccccagcggaaccaaggccccttacaagtccgcttaggcaggccgccgatgaggatgacaaaggcatgaggtcggagacgccgcctgtcccccccccgccaccatacctcgcttcatacccgggtttccctgagaatggcgcgcccgggccaccaattagccgtttcccactagaggaaccgggtccgaggccactcccatggccccctggcagcgatgaagtagcgaagattcagacaccccctccgaagaaggagccaccgaaagaggagaccgcccaactaacgggcccagaggccggaagaaaacctgctagaggcgtcggctctggaggacaggggcccccccccccacggcgggaatcccgcaccgaaacgcggtggggcccgcgccctgggtcatccaggagaggcattcctcccgaagagcccggcgccccaccaaggcgcgctggccctattaaaaagcctccccctcccaccaaggttgaagaactcccacccaagccactcgagcaaggagatgagacgcctaagccaccgaaacctgacccgctcaaaataaccaagggcaaactggggggacctaaagaaaccccaccgaacggaaatctgagcccagcgccaagactgcgtcgcgattacagctacgagagggtgggcccaactagttgtcgtggcagaggacgcggagaatactttgcaagaggacgaggcttccgcggaacctacggcggaaggggcaggggagcaaggtctcgggaatttagaagctatcgagagtttagaggcgacgacgggaggggcgggggtacaggggggcccaatcaccccccagcacctcgcggtcgcacagcctccgagacacgttccgaagggagtgagtatgaggagattcctaagagacgcagacagcgcggctcggagaccggctccgaaacgcatgaatctgatcttgcccctagcgacaaagaggccccaacaccgaaggaggggaccctgacacaggtacctctcgcgccacccccccctggagcacccccaagcccagcccctgcgaggttcacagcacgcggggggcgagttttcacccctcgcggggtccctagtcgccgggggaggggcggcggtcggcccccaccacaggtgtgccctggttggtccccccccgctaagagcttagcaccaaagaagcctcccacagggcccctcccacccagcaaggaaccactgaaggaaaagctgattcctggacccctgtctccagttgctcggggtgggtccaatggaggctccaatgtggggatggaggacggcgagcggcccagaagacgtcgccatggcagggctcagcaacaagataaacctccacggttccgcaggctgaagcaggagagagaaaacgcggcgcgagggagcgaggggaaacctagcctaaccctccccgcctccgctcccggcccagaagaggcgctgactactgtgactgtggctccggcacctcgccgagctgcagccaaatccccagacctgtcaaatcagaattctgaccaggcaaacgaggagtgggagacagcatccgagagtagcgacttcacttcagaacgcaggggagacaaggaagccccacctcctgttctcttaactcctaaggcggtcggaacacccggagggggtggagggggcgcagtgcccggaatcagtgctatgtcgcgcggcgatctgtctcagcgggccaaggatctgagcaaaaggtccttcagtagccagcgcccgggaatggagcgccagaaccgtagacccggacccggaggcaaggccgggtcctctggctcatcatccggcggcgggggcggggggccaggagggcgtacaggtcccggacggggcgacaagaggagttggccaagcccaaagaaccgatcaagacctccagaagagaggccacctggtctccccttgcctcccccgcctccaagcagctccgccgttttcagattggatcaggtaattcatagtaatcccgctggcatacaacaggccctggcacagctctctagcaggcagggcagcgtgacggcccctgggggccacccacgccataaacccggtcctcctcaggcaccacagggtccatctccaagaccccccacccgttacgaaccacagcgggtgaatagtggattgtcttccgacccacactttgaggagccgggccccatggttcgaggagtgggaggaacaccgcgcgatagtgccggagtgtctccgtttcctcccaagcgaagggagcgaccaccaaggaagccggagttgctgcaagaagagagtcttcctcctccacatagttccggtttccttggcagcaaacctgaaggtcctggaccacaggcagaatcaagggatactgggaccgaagctctcacccctcacatctggaatcggctgcacacagcaacctccaggaagagttaccgcccctctagtatggaaccgtggatggaaccactttctcccttcgaggacgtggctggcaccgagatgagccagtctgactcaggggtggacctgagcggggacagtcaggtgtcttcagggccctgtagtcaaaggtccagtcctgacggcggcttaaaaggggcagcagagggccctcccaaaaggccaggaggcagtagcccgctcaatgccgtcccctgtgaggggccccctgggagtgagcccccacgaagacctcctccagccccacacgacggcgacaggaaggagctacctcgcgagcagccattgcccccgggcccaattgggaccgaacgatctcaacatactgacagaggaactgaacccggacccattcgacctagccatcgccctggtcctcctgtacaattcggcacctctgataaggacagcgacctccggcttgttgtgggcgacagtctaaaggccgagaaagagctgaccgcatcagtgaccgaggccatcccagtaagtcgagattgggaattgttaccctctgccgctgcaagcgccgagccacagagcaagaatctggattcaggtcactgcgttccagagcctagctcttccgggcagcgcctttatccagaagtgttctacgggtctgccggaccctctagcagccaaatcagtggaggcgctatggacagccagctgcacccaaattctggaggctttcgtcccggtacaccctcgttacacccgtataggtcccagcccttatacctgcctcctgggcctgccccaccttccgcccttttatccggcgttgcactgaaaggccagtttctggatttctcaaccatgcaggccacagaacttgggaaactgcccgctggcggggtgctgtatccgccgccaagctttttgtactcccctgctttctgccctagtccactccccgatacaagtctgctccaggtcaggcaggatttgccatctccttcagatttctacagcacacccctccagcccggaggacagagtggattcctcccaagtggtgcgcccgcacagcagatgttgcttccgatggtggatagtcaactgcctgttgttaatttcgggtcactaccaccagcccctccacctgcccccccttccttatcgctgctgcccgtgggccctgctctacagcctcctagccttgctgtgcggcctcccccggcacccgccacacgagtattgccatcaccagcccggccattccccgcttccctggggcgcgcagagcttcacccggtcgaactcaagccctttcaggactaccagaagctctcttctaatctgggaggacctggaagctcccggacaccacctacgggccgctcattttcggggctgaattcgcgattaaaagccacaccctcaacttactcaggggtattccgcacgcagcgggtagacctgtatcagcaggcctctccccctgatgccctgcggtggatcccgaaaccatgggaacgtacagggccccctcctagagaaggccctagtcgcagggccgaggagcccggctcccgcggtgacaaagagcccggtttgccacccccaagatag

SEQ ID NO: 344367 - DNA, 6474 bp, Artificial Sequence
  derived and/or modified sequence
atgagcgaccgaagtggcccaactgcgaaaggcaaggatggaaaaaagtattccagcctgaatttgttcgatacttacaaggggaagagcctcgagattcagaagccagcagtagcccccagacacggcctacagagccttggcaaggtagccatagcacggagaatgccaccacccgccaacctgcctagtctgaaggccgagaacaaaggtaacgatccaaatgtgtctttggtgcccaaggatggtactggatgggcgagcaaacaggaacagtccgacccaaagtctagtgatgcctcaacagcacagcccccagagagccagcccctgcctgcatctcagacaccagcgtctaaccagccaaagcgacccccagccgcaccggaaaacacccccttggttcccagtggcgtgaagtcctgggcccaggcttccgtgactcacggagcccacggcgacggaggcagagcctcatcccttctctcccgtttctcccgggaagagtttccaacgttacaagctgcgggagatcaagataaagcagccaaggagcgcgagagcgctgagcagtcatcaggccctggcccgtctttgcgtccgcaaaacagcaccacttggagggacggaggggggaggggtccagacgagctggaaggccctgacagcaaattgcatcatggccacgatcctcgcggcggtctgcagccttctgggccacctcagttccctccttacagaggcatgatgccgcccttcatgtatccaccataccttcccttcccccctccttacgggcctcaggggccctacaggtatcctacacctgatggcccaagcagattccctcgggttgcaggccctagaggctctggccccccaatgcgcttggtggaacctgtgggccggccctcgattctcaaggaagataatctcaaggagttcgaccagctcgatcaggaaaatgatgatgggtgggcaggagcccacgaggaagtcgactataccgagaaattgaaattctccgatgaagaggatggccgggattctgacgaggagggcgccgaaggtcatcgcgactcccagtccgcctcaggggaagagaggcctccagaagccgatggcaaaaaggggaattccccaaactctgagccacctacccccaagacagcctgggctgaaacctcccggccacccgagaccgagcccggtccgcccgctcccaagcccccattgcctcctcctcaccgcggacccgcaggaaattgggggccccccggtgactatccggatcggggagggcccccctgcaagcccccagcacctgaggatgaggatgaggcctggcgccaaaggcgcaaacagtcctcatcggagatctcactggccgtcgagagagctcggcgccgcagagaagaagaggagcgcaggatgcaggaggaacggagggccgcgtgtgctgaaaagttgaaacggctagatgaaaaattcggagctcctgacaaaagactgaaagctgagcctgcagcgccgccagctgcacccagcactcccgcgcctccgcccgccgtcccaaaggaactgccagcccccccggcacctccgcctgcttccgcacctactccggaaaaggagcctgaagagcctgcacaggcccctcctgctcaatccacaccaactccgggagtggccgctgctccaactctggtatccggcggcggatcaacctcaagcacatcctccggttctttcgaagcctctcccgtagaaccccaacttccatccaaggaggggcctgagcctcccgaggaggtccctcccccgaccactccacccgtcccaaaagtcgaacctaaaggagacggaataggccctactagacagccaccgtctcaaggactcggatatcccaagtaccagaagagtctccccccccgtttccagcggcagcaacaggagcaactgttaaagcagcagcagcagcaccagtggcagcagcatcagcagggctccgctcctcctaccccagtacccccttcacccccgcagcccgtcacccttggtgccgttccagcgccccaagctccaccaccgcctcccaaggccctgtaccctggcgcattaggccgtcctccaccaatgcctcctatgaacttcgacccaagatggatgatgattccaccttatgtggatcctcgattgctacagggacggccacccctggacttctatcccccaggcgtccatcctagcgggctagtgccccgtgaaaggtctgatagcggggggagttcaagcgaacccttcgaccgccatgccccagccatgcttagagagagaggtactccgcctgtcgatcctaaactagcttgggtcggggacgtgttcactgctacaccagccgaaccccggccattgacgagccctctgcgccaggccgcagatgaagatgacaagggcatgagatctgagaccccacccgtgccgccccctcccccttatttggcctcttatcccggattccctgagaatggtgcgcctggtcctcctatctctcgcttccccttggaagagcccgggccccgacccctgccatggccgccaggctctgacgaggtggccaaaatccagactcccccaccaaagaaggaaccgccaaaggaggagacagcccagctcaccggtccagaagccgggcgcaaaccggccagaggggtcggctcaggaggccagggcccacctccacctcggagggaaagcaggactgagacgcgctgggggcctagacctgggtcttctcgacgaggaatacccccagaggagccaggtgccccacccaggagggcgggaccaattaagaaaccacctcctccgactaaggtggaggaactgccaccgaaacccctggaacagggggatgaaacgccaaagcctcctaaacctgacccccttaaaattactaagggcaagctaggaggtcccaaggagaccccgcctaatgggaatctttctcccgctcccaggttgcgtagggattatagttatgagcgagtggggcctaccagctgcagaggcaggggtcgaggagaatacttcgctcggggacgagggtttaggggcacttatggcgggcggggtcggggcgctcggtcccgggaatttagaagctaccgtgagttcagaggcgatgatggaaggggcggcggtactggcgggcccaaccatccccctgcacctagagggaggactgcttctgaaactagatcggaaggctctgagtacgaagaaattccaaaacgcaggcgacagagaggttctgagaccggaagcgaaacccacgagagtgacctcgcaccatctgataaagaggccccaactccgaaagaagggacattgactcaagttccactggcccctcctccaccgggcgcccccccgagtcccgcccccgctcggtttaccgcgcgtggtggacgggtatttactccacgcggcgtgccctcaagacgcggaagaggcggtggccgacccccaccgcaagtgtgtccgggatggagcccgccggcaaaatcgctggctcctaaaaagccaccaaccgggcccttacctccttctaaagaacccctgaaagagaagctgatccctggaccgttatcccccgtcgcacgcggcggaagcaacggaggaagcaatgtcgggatggaggatggagaacgcccgcgcagaagaagacatggtagagcccagcagcaagataaacctccccggtttagaagacttaagcaggagcgcgagaacgcagcaagggggagcgagggaaagccctcactgactcttcccgcaagcgctccaggcccggaagaagcccttacaacagtgacggttgctcctgcaccaagaagggcagcagcaaaatctccggatcttagtaatcaaaactccgaccaggcaaatgaagaatgggagaccgcatccgagtcctcagatttcacaagcgaacgccgcggggataaagaagccccaccaccagtgttgctgacccccaaagctgtgggcacccctggaggagggggaggtggcgccgttcctggaatctccgcgatgagtcgcggagatttgagtcagcgcgccaaggatctctccaaacggtctttctcatcacaaagacctgggatggagagacagaaccgacgtcccggccccgggggcaaggcaggcagctctggaagcagtagtggagggggtggcggcggtcccggggggaggacaggtccagggcgtggcgacaagaggtcatggcctagccctaagaaccggtctagacctccagaagagcggcctcccggactgccgttgcctcccccaccaccatcttccagtgcagtttttagattggaccaagtgattcattctaacccggcaggaatccagcaggccctggcccagctctcctcccgtcaggggagcgtaacagcgccggggggccatccccgccataagccgggccctcctcaggcgccgcagggcccatcaccccggccacccactcgctatgagccgcaaagagtgaactctggcctttccagtgatccgcatttcgaagaacctgggcctatggtcagaggtgtgggcggcaccccccgggactcagcaggcgtgtccccgttcccccccaaacgtcgagagaggccgcctcgaaagcctgaactcctccaagaggagtccctgccacccccacattcatctgggttcctcgggtcgaaaccggaaggtccaggacctcaggccgagagcagggatactggcacagaagcactgactcctcacatctggaataggctgcataccgctaccagccgtaaatcctacaggccgagtagcatggagccctggatggagcctctatctcccttcgaagatgtcgcaggcaccgaaatgtctcagtccgacagcggtgtggacctctctggagactcacaagtcagctctggcccatgcagtcagcgatctagtccagacggaggacttaaaggtgcagccgagggcccaccaaagcgtcctggcgggtcttccccccttaacgcagtaccatgtgaagggcctcccggctctgaaccaccacgcaggcccccaccagccccccacgacggcgatcgcaaggaactgccgagagagcagcccctcccgccggggcccattggaacagagaggtctcagcacacagatcgtgggacggaaccaggccctatcagaccatcccaccggcccggcccccccgttcagttcggaacaagtgacaaggactctgatctgaggctggtagtcggggactcactgaaggcggaaaaagagctgaccgcttccgttacagaagcgatcccagtgagtagggattgggagcttctgccaagcgctgcagccagtgccgagccgcagtccaaaaacctcgatagcgggcactgtgtgcctgaacctagttcatcaggccagcggctgtacccagaggttttctatggaagcgcggggcccagttcatcccagatatctggaggggccatggactctcagctccatcctaatagtggcgggttccgcccaggcacacctagtctgcatccctaccggtcacagcctctgtacctgcctccaggcccggcacctcccagcgcacttctgtccggggtggcccttaaaggccagttcctggatttcagcaccatgcaggccaccgagctgggcaaactgccggccgggggagttctttacccaccaccgagttttctgtactcaccggccttttgcccttcaccgttgcctgatacctccctactgcaagtaagacaagatctgcccagcccatcggacttttatagcacccccctgcagccaggaggccagagtggatttttgcccagtggagcccctgctcagcagatgctgctgccaatggtggatagccagctccccgtcgttaactttgggagcctgcccccagcacctcctcccgctccccccagtctctctctcctacctgtgggcccagcgcttcaacctccctccttggccgtgcggcctcccccggctcccgctactagagtgttaccctctcctgcccggcctttccctgccagcctcggcagggccgagctgcatcccgtggaactgaagccctttcaggattatcagaaactgtcctctaacctgggtgggccaggttcgtcaagaactccgcctactggccgatcattttccggcttgaactctcgcttaaaagcgacccctagcacatactccggcgtttttcggactcaaagagtggatttgtatcagcaggccagtccacctgatgctcttaggtggattccaaaaccttgggaaaggactggacctcccccacgcgagggaccatcccggcgtgcagaagaaccggggagtagaggagacaaagagccaggactgccgcccccacgctag

SEQ ID NO: 344368 - DNA, 6474 bp, Artificial Sequence
  derived and/or modified sequence
atgtccgacagatccggtccaacagccaaaggtaaggacggaaaaaaatatagctctttgaacctgtttgacacctataagggtaaatccctggagatccagaagcctgccgtggcaccgcgccacggactgcagtctttgggtaaggtggctatagcaagacgaatgccacctcccgcgaaccttccttccttgaaggctgagaataaggggaacgacccaaatgtttcgctggtgccaaaagacgggaccggctgggcttccaaacaggaacaatccgatccaaagagttcagatgcatccacagcgcagccacctgaaagccaacctcttcctgcaagccagacacccgcctccaaccagcccaaaaggccccccgcggccccggagaacacacctctggttccttcaggtgttaaatcctgggcacaggccagcgttacccatggggcacacggggacggcgggagagccagctccctgctaagcagattctcacgtgaagagtttcccacacttcaagctgcaggcgaccaggataaggcagccaaggaaagagaaagtgcggagcagtcttctggccctgggccaagcctgcgtcctcaaaactccaccacttggagagacgggggcggtagggggcctgatgagttggaggggcctgattccaagctgcatcacggccacgatcccagggggggactccagccctctggacctcctcagtttcccccctacagggggatgatgccaccgtttatgtacccaccttaccttcctttccctcccccttacggcccgcaaggcccttataggtatcctactcctgatggtcctagcaggttccctcgggttgctggcccaagggggagtggccctcctatgagactcgtcgagcccgtgggccgacccagtatcctgaaggaagataatttgaaagaattcgaccagttggatcaggagaatgatgatggctgggccggcgcgcacgaggaggtggactatacagagaagctgaaattctccgatgaagaagatggaagggattcagacgaagagggagccgagggacaccgggactcccagtctgcctctggcgaggaaaggcctcccgaagcagacggcaagaagggtaactctcccaactcggagcctccgactccaaaaactgcttgggccgagacatctcggccccccgagacagagcccggcccgcccgcacctaagccacctctgccccctccccatcggggccctgccggtaactgggggccacccggcgattacccagacagaggggggcctccctgtaaacctcctgctcctgaagacgaagatgaagcatggaggcagcgaagaaagcagagctccagcgagatcagcctcgccgtggagcgcgccaggcgtagacgcgaggaggaagaaaggcgcatgcaggaagagcgcagagccgcgtgcgccgagaagcttaaacgccttgatgaaaagttcggcgcacctgacaaaaggttgaaagccgaaccggcagctcctccggcagcaccatctacccccgctcctccaccagccgtgccaaaggagctcccggccccaccagctcctccccctgccagcgcccctacaccagaaaaagagcctgaggagcccgcccaggcacctcctgcgcagtccactcccacccctggcgtggccgctgcaccaaccctagtaagcggagggggttccacctcatcaacatcctcaggctcctttgaagcttctccggtcgaacctcagctaccctcaaaagaaggtccagaaccccccgaggaagtcccccccccaacgactcccccggtccctaaggttgaacctaagggagacgggatcggccctacacggcagccgccatcccagggcctggggtatccaaagtaccaaaagtcgctaccacctcgttttcagcgccagcagcaagagcagctcttgaaacagcagcagcagcatcagtggcagcaacaccaacaggggagcgcacctcccaccccagtgcctccatctccaccacagcctgtgactctgggcgcagttcccgctcctcaagcaccacccccccccccaaaagcactctacccaggggccctcggacgacctcccccaatgccaccaatgaacttcgatccgaggtggatgatgattcctccttacgtggacccccgattgcttcagggccggccacccctcgacttctatccacctggggtccacccctccggactggtacctcgtgagcggtccgattcggggggaagtagctctgagccattcgaccggcacgctcctgccatgctccgagagcgaggaactccgccagttgaccccaagttagcctgggtcggtgatgttttcacggccactccagccgaacctcgcccgctgaccagccctctacggcaagcggcagatgaggatgacaagggcatgagatcagagacgcctccagtgccacccccccctccatacctggccagctacccggggttccctgaaaatggggcaccaggtcctcctatatcacggtttcctcttgaagagccagggcctaggccactcccatggccccccggatccgatgaagtcgcaaaaattcagaccccacctccaaaaaaggagcctcccaaggaggagacagctcagctgaccggccccgaagcaggacgtaagcctgccagaggagttggcagtggcggacagggaccacctccgccccggagagagtctagaacagaaactcgttggggaccaagaccagggtccagccgccgtggaattccacctgaggagcctggtgctcccccgcggcgtgccggccccattaaaaagccccctccccccaccaaggtagaagagttacccccgaagcccctggaacagggggatgaaactcccaagccccccaagcccgaccccctgaaaattacaaaagggaagcttggcggccccaaagagacgcctcccaatggaaacctttcacctgcccctagactgaggcgggactacagctatgagcgcgtaggccctaccagctgccgaggccgggggcgaggggagtactttgcccgcgggcggggcttccggggtacctatggtggcagaggtaggggggcgcgctctagagagttcagaagctacagggagtttagaggcgacgatggtagaggtggtggtacaggcggaccaaatcacccgcccgcacctcgcggccggactgcctcagaaaccagaagcgaaggatcagagtatgaagagattcccaagaggaggcggcagcgcgggtccgaaacagggtccgaaacacacgagtccgacctagcgccatcagacaaggaagcaccaacaccaaaggaaggtacgctgacccaggtccccttagcacctcctccccccggtgcccctccctccccagcgccggccagattcaccgcccgggggggcagggtcttcacaccaaggggtgtgccctcacggagaggccgcggaggaggcagaccgccaccccaggtgtgtccgggatggtccccacccgccaagtcccttgccccaaagaaaccaccaaccggcccactgcccccgagcaaagagcctctcaaggagaagcttattcccggacccctcagccctgtagccaggggcgggtctaatgggggcagcaacgtcggcatggaagacggcgaaagaccccgcaggaggagacacggccgcgcacaacagcaggacaagcctcctaggtttagacgcttgaagcaggagagagaaaacgcggcgcgaggctcagagggaaaaccttcactcacgctccctgcctcagcacccggacccgaggaggctttaacgaccgtgacagttgcacctgcaccccgacgagccgcggcaaagtctcccgatctaagcaatcagaactccgaccaggcaaacgaagagtgggagaccgcctcagaatcctccgattttaccagtgaaaggaggggagataaggaagcccctcctcccgtgttgctgacccctaaagccgtcgggactcccgggggtggcggtggaggcgccgtgccaggaatctcagctatgtctcgtggagacctgtctcaacgagctaaggacctaagtaaacgtagcttttccagccagcggccgggaatggaaaggcagaatcgacgaccgggacctggcggaaaagccggaagctccggatccagttcgggagggggcggcggcggcccaggcggacgcactggaccagggaggggggacaaaagaagctggccttctcctaagaatcgttcaagaccccctgaggaacgtccacctggcctgccgctaccacccccccctccaagttcaagtgcagttttccgactggatcaggtcatccactcaaaccccgcgggcattcagcaagccctggcgcagctttcttcaagacaggggagcgttaccgcccctggagggcatcccaggcataagcctggtcctccccaggccccacagggtccgagccccaggcctccaaccagatatgaaccccagcgtgttaatagtggcttgtcctcagacccgcatttcgaagagcccggaccaatggtccgcggcgtaggcggaacgcctcgcgattccgctggcgtctcacccttcccgcctaaacgcagggagagaccaccacgcaaacctgaactgctgcaagaggagagtctgccaccgccacattcttctggcttcttgggctcaaagcctgagggtccaggcccacaggcagagtcgagggacacaggcaccgaggccctgacaccacatatctggaacaggttacacaccgctacttcacggaagtcttaccggccatcaagcatggagccctggatggaaccgttgagtccctttgaggatgtagcaggaactgagatgagccagagcgatagtggcgtggacttatccggcgacagtcaagtgagctctggaccatgctcacagcgcagctctcccgacggaggcctcaaaggagctgcggagggaccccctaagagaccaggtgggagctctcccctgaatgcggtgccctgtgaaggtcccccagggagtgagccgccacgccggcctcctccggcgccccatgacggggaccgcaaagaattgccccgcgaacaacctttgccccccgggccaattggtactgaacggtcccaacataccgaccgggggacagaacccggtcccatacgccctagccaccgtcccgggccacccgtgcaattcggcaccagtgacaaagacagtgatcttaggctggttgtgggtgactctctgaaggctgaaaaggaacttacagcctccgtgacagaggccatacctgtctctagagactgggaacttctgccatctgctgctgcaagcgctgagccccagtccaagaatctggatagtggccattgcgtgcctgagcccagtagctccggccagaggttgtatcctgaggtgttttacggtagcgcaggtccctccagctctcaaatctctggaggtgctatggattctcagctgcaccccaactccggcggtttcagacctggcacgcctagcctgcacccctatcggtcgcaacctctatatctgccacctggacccgctccaccatccgctttgctgtcaggtgtagcactaaaaggccaattcctggattttagtaccatgcaggctacagagctgggaaagttgcctgcaggaggagtgctgtacccaccaccttcgttcctatatagcccagctttctgcccttcaccgttacccgatacctctttacttcaggttcggcaggacctaccctctccttccgacttttactctacacccttgcaaccagggggacagagcggttttttgccttcaggcgcccccgctcaacagatgttgctgcctatggtagatagccaactgccagtcgtaaactttggatcactgccacccgcccccccccctgccccaccaagtctatcactgcttcccgtcgggccagctctccaaccccctagcctggcggtgcgcccaccccctgctccggcaactagggtgctcccttcacctgcccgcccattccctgcttccctgggacgcgccgaattgcatcctgtggagctgaaaccattccaggactaccagaaactaagttccaatctgggggggccaggatcctcaaggacacctcccaccggccggtcctttagtggcttgaattcccgcctgaaagccacgcccagtacatatagcggggtcttccggacccagcgggttgacctttaccagcaggcatcccctcccgacgcgctccgttggatccccaagccatgggagcgcacaggcccgccgcctcgggagggcccatctcgaagagcagaggaaccaggttccaggggagacaaagagcccggactcccacctccacgctag

SEQ ID NO: 344369 - DNA, 6474 bp, Artificial Sequence
  derived and/or modified sequence
atgtcagatcggtccgggcccaccgccaaagggaaggacggcaaaaagtattcttctctcaaccttttcgatacgtataaaggtaagagcctggaaatccaaaaacctgcagtggccccacgccacggactacagagccttggcaaagtcgctattgctaggcgaatgcccccccccgctaacctgccctccttgaaggccgaaaacaagggcaacgaccctaacgtcagcctggtccccaaagacggaacagggtgggcctccaaacaagaacagtctgatccgaagtctagcgacgcctccaccgcccagccgccggagtcccagcctctgcctgcctcccagacaccagcatccaatcagcccaagcgaccccccgccgcacccgagaacactccgctcgttccatcgggagtgaaatcctgggctcaagcctccgttacacacggagcccacggagacgggggccgcgccagctccctactttctcggttctcccgcgaagaatttcctaccctgcaagccgctggagaccaggataaagccgccaaggagcgggaatccgccgagcaatcatcaggacctggaccaagtcttcgacctcaaaatagtactacctggagagatggcggcggcagaggaccagacgaacttgagggccctgactccaaactgcaccatggacacgacccaagaggcggcctgcagccctccggccctccccagtttcctccctatcgtgggatgatgccccctttcatgtatccaccctacttgccctttcccccaccttacggtccgcagggcccctatagataccctacgccggatggacccagtcgatttcctagggtggcagggccccggggaagcggccctccgatgcggctggtagaacctgttggaaggcccagcattttaaaggaagacaatttgaaggaattcgatcagctggaccaggaaaacgatgatggttgggcaggagcccacgaggaggtcgactacacagaaaaactcaaatttagtgacgaggaggacggccgggactctgacgaggaaggtgcagaggggcacagagactcacaatcagcaagtggcgaagagcggccacctgaagccgacggtaaaaagggaaacagcccaaattctgagcctcccactccaaagacagcctgggccgaaacgagtcggccacctgagacggaaccaggcccccctgcccccaagcctccgttaccaccccctcatcgtggccctgctggcaactggggtccccctggggactatcccgacaggggtgggcctccctgtaagccccctgcacccgaggatgaagatgaagcctggaggcagagaaggaaacagtctagcagtgaaattagtttagcagtggaacgcgcccgaagaagaagagaggaggaagagcggaggatgcaggaggagcgacgggccgcttgcgcagaaaagctgaagcgcctggacgagaaattcggggcaccggataagcggttgaaggccgagcccgccgcccccccagccgcacctagtactcctgctccgccacctgctgtcccaaaggaactgcccgctccccccgcccccccccccgccagcgccccgacgccggagaaagagccagaagagccggcccaagccccacctgcccagagcacgccaactcctggcgtggctgcagcacctaccttagtgagtgggggtggctcaacttccagcacatcctccggtagtttcgaggcttcccctgtggaaccacaactccccagtaaagagggccccgagcctcctgaggaagttcctcccccaacaaccccgcccgttccgaaagtggaacccaagggagacggtatcggcccaacccgccagccacctagtcaggggttgggctacccgaaataccagaagagcttaccccccagattccagaggcaacagcaggagcagctgctgaaacagcagcaacaacaccagtggcaacagcatcagcagggctccgcgccacctacacctgttcctccaagcccaccccagcccgtgacactgggcgctgtccctgccccccaggcaccaccccctccacctaaagccctttaccccggggccttgggtaggccaccacccatgccccccatgaactttgatccccgctggatgatgattcccccatacgtcgaccctcgtcttctgcagggacgaccacccctggacttctatcctccgggcgtacatccttctgggttggtgccgcgtgagcggtctgatagcggtgggtcaagctctgagccctttgatcgccatgctcccgcaatgttaagggaacgggggacacccccggtggatcctaagttggcgtgggtgggagatgtgttcaccgctacacctgcagagcctcgtccgctcactagtcccctcagacaggcagctgacgaggacgataagggcatgaggtcagaaaccccccctgtgcctcctcctcccccatacctagccagctatccaggctttccagagaacggggcccctgggcctccaatttctcgcttccctctagaagagcccggtccccgacctctgccgtggcctccgggcagtgacgaggtggctaaaattcaaacacctccacctaagaaggagcctcccaaggaagaaacggctcagcttactggcccggaagcaggtaggaagccggccagaggcgtaggctccggcggtcaggggcccccgccgccccggcgggaatccaggacagagaccagatgggggccaagacctggaagctcccgccgggggatcccccccgaagagccaggtgcccctccccggcgcgctggtcccattaaaaagcccccacctccaaccaaagtggaagagctccctccaaaaccacttgagcagggcgatgagaccccaaagcctcccaagcccgatcctctgaaaattacaaaagggaagctcggaggtccgaaagaaacccctccaaatggtaatctgagccccgccccaaggcttcgcagagactacagctacgagagggttgggcctacaagctgcaggggccgtggccggggagagtattttgcacgcggcaggggctttcgcggcacctacggagggagaggaaggggcgcaaggtcgagagagttcagaagttatcgtgaatttaggggcgatgatggtcgggggggtggcactggaggaccgaaccacccccccgcgccccgcgggcgtaccgcttccgaaacgcgctcagagggatcagaatatgaggagatccctaagagaaggcggcagagagggagcgagactggctcagagacgcacgagtcagacttggcacccagtgataaagaagcgcccacaccaaaggagggaacactgacccaggttcctctcgcacctcctcctccaggagctccaccctcaccagcacctgcgaggtttactgcgcgcgggggaagggttttcactccccgaggagtaccctcccggcgcgggcgcggcggaggtagacctcctccgcaggtctgcccgggatggtccccgcccgctaagtctcttgccccgaaaaagccaccaacaggacccctaccccccagtaaggaaccactcaaggaaaaactcatccctggccctctgtctcctgtcgcccgcggtggcagcaatggcggatcaaacgtgggaatggaagatggcgaacgacccaggcggcgcaggcatgggagggcccagcagcaagataagccgccacggtttagacggctaaagcaggagagagagaatgcggcaaggggcagcgagggaaagcccagcctgacccttcccgcaagcgcgcccggccccgaagaggcacttactaccgtcacagtcgcccccgcccctcggcgtgccgccgcaaagagccctgacctgagcaaccagaactccgatcaggcaaacgaagagtgggagacagctagcgaaagttccgatttcactagcgagaggagaggggacaaggaggcccctcctccggtgctgttaactcctaaggccgtcggtacccccggaggcggcggtggaggagccgtgcctggaatatcggccatgtcaaggggagacctaagccaacgggcaaaagatcttagcaaacggagtttttcctcccagcgtcccgggatggagcgccaaaacaggcgtcccggcccgggaggaaaagccggcagctccggctcatcatctggcgggggcggtggtggccccgggggacggactggccccggtaggggggataagcggagctggcctagcccaaaaaatcggagccgtccacccgaagagagacctcctggcttgcctttgcctccccccccgcctagctcatctgccgtttttcggttggaccaggtcattcactctaacccagccgggatccagcaggccttggctcagctgagtagtcgccaaggttccgtgacagccccaggcgggcatccaaggcacaaacctgggccaccacaggcaccccaggggccctcgcccagacctccgactaggtacgaaccacaacgggtaaacagtggcctttcttctgatccacatttcgaggagccgggtcctatggtccggggcgtgggtggaacacctcgtgattcagcaggggtgtcaccctttcccccaaaaagacgggagcgacctccgcggaagcccgaactgttgcaggaagagagcctgcctccaccccattccagtggatttctcggatccaagcccgagggacccggaccgcaggccgagtcccgggatactgggacggaggcactgaccccccatatctggaaccgactgcataccgcaacctcgaggaagtcctataggccctctagcatggagccctggatggaacctctgtcccctttcgaagacgtggctggaaccgagatgtcccaatcagattctggcgtggatctatcaggagattcccaagtgagctcgggcccctgcagccagcggagctctccagatggcggattaaaaggcgccgctgagggcccacccaagcgccctggcggatcgagtcctttgaacgcagtgccttgtgagggacctcctggctcagagccacctcggaggcctccccctgctccacacgatggggatcgaaaggagctcccacgcgagcaacctctcccacccgggcccattgggaccgagagaagtcagcacactgataggggcacggaacccgggcccatcaggccctcacatcggcctgggcctccagtgcagttcggtaccagcgacaaagactctgacctgagactcgtggtgggcgatagcctcaaggctgagaaggagttgacggcctcagtgactgaagcaatcccagtttctagggattgggagcttcttccaagtgccgcagcttcagcggagcctcagtctaagaacctggacagcggccactgcgttcccgagccctcaagcagcggccagcgcctgtacccagaagtcttctatggaagtgctggaccttcatcatctcagatatcaggtggagccatggatagccaactccaccctaactcaggcgggtttcgtcccggaactcccagcctgcacccttaccggagtcagcccttatatctgccacccgggcccgcccctccctctgcgttactcagtggcgtcgctctcaaggggcagtttctggacttcagtactatgcaggcgaccgaactgggaaagttgcccgcaggaggagtcctctatccacctccatcatttctctatagtcccgctttttgtccgtcacccctgcctgacactagcctcttgcaagtgcgacaggacctacccagtcccagcgacttctacagcacccccctacagcccgggggccagagcggcttccttcctagtggggcgcccgcacagcagatgctgcttccaatggtcgactctcagcttcccgtcgtgaacttcgggagtttaccgcccgccccccctccagctccaccaagtctgagcttgctgcccgtggggcccgctctgcagcccccctccctcgctgtgaggccccctcctgctccagctactcgtgtgttacccagccctgcaaggccctttcccgcctccctgggccgagcggagctacatcctgtggagctgaagccctttcaggattaccaaaaattgtcttcaaatctcggtggacctggttcaagtcggactcctccaacgggccggtccttctccggtttgaattcccgcctcaaggctaccccgtccacctattccggggtgtttcgcacccagcgggtggatctctatcaacaagcctcgccacctgacgcgctaaggtggatcccaaagccctgggagcggactggcccccctcctcgcgagggaccgtcccgtcgcgccgaagaaccggggtctcggggagataaggagccgggactcccccctcccaggtag

SEQ ID NO: 344370 - DNA, 6417 bp, Artificial Sequence
  derived and/or modified sequence
atgagcgacaggagtggaccaacggcaaagggcaaggacgggaaaaagtattcgtcactgaaccttttcgacacctataagggcaagtctctggagattcagaagcccgcggtcgctccaagacatggcctacagtctcttggaaaggttgcaattgccaggcggatgcctccaccagctaatttaccctctttgaaggccgagaataaagggaatgacccgaatgtctcacttgtgcccaaggacggcacaggctgggcctccaagcaagaacagtctgatccaaagtctagtgacgccagcaccgcgcagccccctgagagccagcctctcccagctagccagactcctgcatctaatcaacctaaaaggccccctgcagcccccgagaacaccccactggtgccatcaggtgtgaaatcttgggcacaggcatccgtaacacacggggctcacggcgatggaggccgggcctcgtctctactctcccggttctcacgagaggagtttccaacgttgcaggctgccggcgatcaggacaaggccgccaaggaaagagaaagcgccgaacaatccagcggccctggccccagtctacgaccccaaaacagcacgacttggcgagatggcgggggacggggaccagacgagctggaggggcccgattctaaactccaccatgggcatgatccacggggcggcctgcagccaagtggaccacctcagttcccaccttacaggggaatgatgccaccttttatgtatccaccatatttgccattcccacccccctacggtcctcagggcccctatcgctaccccactccagacggacccagcaggttcccaagagtggcaggcccccgcggtagtggtccacctatgaggctggtggaaccagtgggccgtcctagtatccttaaagaagataatctcaaggagtttgaccaactcgaccaggagaacgacgacgggtgggccggtgcccatgaagaagttgactacacagagaagctaaagttttctgacgaagaggatggtagagactctgatgaggagggagctgagggccatagagactcacagtctgcctccggtgaggaacgccctccggaagctgatggaaagaaaggcaacagccctaattcagagccacccacacctaagaccgcttgggcagagacctccagaccacctgaaactgagcccggacctcctgctccaaaaccaccacttcctccaccgggagattatccagacaggggtggtcccccatgcaagcctccagcccccgaagatgaagatgaggcatggcggcaacgcagaaagcagagctcctcagaaatttctttagctgtagagcgtgcgcgacggagaagggaagaggaggagagaagaatgcaggaggagaggagagcggcgtgcgctgagaagctaaaacgcctggatgaaaagttcggcgccccagacaagagattgaaggccgaaccggccgccccaccggccgctccctcaactcccgcgcctccgccagccgtcccgaaggagttgcctgccccgcccgccccgccccccgcatccgctcctactccagagaaggagcccgaggaaccagctcaggctcctcccgcccagtcaaccccaactcccggggtcgccgcggcgccgactctcgtgtccgggggcggaagtactagctcaacctcatcgggaagttttgaggcgtctcccgtggaaccccagttgccttctaaagagggacccgaaccccctgaggaggtgccacctcccaccaccccacccgtgccgaaggtggaacccaagggggatggcatcggcccgacgaggcagcctccctctcagggactgggctatccaaagtaccagaagtcccttccccctcggttccagagacagcaacaagaacaacttctgaaacagcagcagcagcaccaatggcaacagcaccagcaagggtcagccccacctacgcccgttcccccaagcccccctcagcccgtgacactgggcgccgttcccgctccccaagcccccccgccgcccccaaaagctctataccccggcgccctcgggcggcctccccccatgccgccaatgaacttcgacccgcgatggatgatgattcctccgtatgtagacccccggctcttgcagggcaggccaccccttgatttttatccaccaggggtgcatccctcagggcttgtaccacgcgagaggtcagactcaggggggtcgagcagcgaacccttcgataggcacgctccagcaatgctgcgagaaaggggcacacctcctgtggatcccaaattagcttgggtaggcgacgtgttcactgcaacccctgctgagcctcgtccattgacatcgcctctgaggcaggccgcggacgaggatgacaaaggcatgcggtctgaaacccccccagttccgccaccgcctccgtatctggcttcctacccaggctttcctgaaaacggagcaccagggcccccaatctctcgattcccactggaggaaccaggtcccagacccctgccttggccgccaggttccgacgaggttgctaaaatccagacccctcctccaaagaaagaaccaccgaaagaagagactgcgcagctcaccggccctgaggcaggccggaagccagctagaggagtgggtagcggcggccaaggacccccaccaccgcggagggagagccgcactgagacacggtgggggcccaggccaggaagctcaagaaggggtatcccaccagaggagcctggagcacccccacgccgcgctggaccgatcaagaagcccccgcctcccaccaaagtggaggagcttcctccgaaaccgcttgaacagggcgacgaaacacccaaaccgccaaagccagatccactgaagataacaaaagggaaactcgggggtcccaaggagacgcctcccaacgggaacttgtctcccgctccacggctccgtcgcgactatagttacgaaagagtgggccctacttcttgtcgtggaagaggcagaggtgagtacttcgccagaggccggggattccgcggcacatatggaggacgcggaaggggcgccgcgggcaacagtgccgttacggagtctttcgaggaaatgatgggcgtcgaagtcggacagggcgatcagacaacacttctgctgccagaagccgcgcttccagctcgtcacggggctcgcgtgcagtccatgcgcaaatctccgagtggcgccgggtcaggagctcagaaacaggctgccaggcccatgagagtgatatggctgcttcagacacgccgcttaccccaccctcgccgcgaacatagtcccagaagtcgatctccaaccacaagaagcccaactttcccagctccagctcggttcactcccggagtgggagagtcttctttgccggaaggaatctccccaggtcccagaaggagagagccccctcaagtatgccccggctggagccctccagcaaagagcctcgccccgaaaaaaccacccactggccctctacccccttccaaggaaccccttaaagagaagcttatcccaggtccgctgtcaccagtagcaagggggggctcaaacggcgggtccaacgtgggaatggaggatggtgagagacctaggagaaggcgtcatggtagagctcagcagcaggataagccaccgagattccggcggcttaagcaggaaagagagaatgctgctcgtgggtctgaaggaaaaccttcactgaccctgcctgcctcagcgccgggccccgaggaggctttgaccacagtcactgttgcaccggcacctaggagagctgcagcgaaatcccctgacctcagcaatcagaatagtgaccaggccaacgaggagtgggaaacagcctcagagtcatcagactttacttcagaacgtaggggggataaggaagcaccaccccctgtgctcctgacaccaaaagccgtggggactccggggggtggcggcggaggagcggtacccggaatctctgccatgtctcgcggcgatctgagccagcgggcaaaggacttgtcaaagaggtctttctcgtctcagcgtccgggcatggaaagacagaatcggcgccccggaccaggcggcaaagctggcagctcagggagctctagtggcggaggcggagggggccctggaggtcggaccgggccgggccgcggagataagaggtcttggcctagtcctaagaacaggagtcggccaccggaagaacgacctcctggcctccccctgccaccaccacctccgtctagctccgcggtgttccggcttgaccaagtgatccatagcaatcccgccgggatccagcaggcgctggcccaattgtcgtcccgccaggggtcagtgaccgctcctggcggacatcctcggcacaaacccggtccacctcaggctccgcagggtccctctccacgacccccgactaggtacgagccccagcgggtgaactccggacttagttctgatcctcattttgaggaacctggccccatggttcgcggggttgggggaacaccacgcgatagcgcaggcgtctctccgtttccccccaagcgacgtgaaaggccaccgcgcaaacccgaactgcttcaagaagagtcactgccgccgccgcattcctctggtttcctagggtcaaaacccgagggtcctggtccacaggctgaatctagggacactgggaccgaagcgctgactccacatatttggaaccggctccataccgccacatcgcggaaatcctaccggcccagtagcatggagccctggatggaacctctttcacctttcgaagacgtggctgggaccgagatgtcccaaagtgactccggagtggatctcagcggagacagccaggtaagttcagggccttgtagtcagaggtcttcaccagatggcggtctgaaaggggccgcagaaggcccacctaaacgccctggagggtcttcgcctttgaacgctgtgccctgcgaaggcccaccaggaagcgaacccccccgaaggccacctcctgccccacatgacggtgatagaaaggaactcccaagggaacagccactgccgcccgggccgatcggaaccgagagaagccagcacacagaccggggaactgagccaggcccgattcgacccagccatcgcccaggtccacctgtgcagtttggtacgagcgataaggactcggatctcagactcgttgtcggcgacagtctcaaagccgaaaaagaactcacagctagtgtaaccgaggctattcccgtgtcgagggattgggaacttttaccgtctgccgctgcctcagcagagccccagagcaagaacctggactccggacactgcgtgccagaacccagcagctcaggtcagcgactgtaccctgaagtgttttacgggagtgccgggcccagttcgtctcaaataagtggcggccatggcctgtcagtcacgtcgaaacaatggcggcgtcctggcacaccgagtttacatccttatcgctctcagcctttatatttgccccctgggcctgcaccccccagtgcactgctgagcggggtcgctcttaagggtcaatttctcgactttagtactatgcaggcaaccgaactggggaagctgccggctggtggagtactctaccctcctcctagtttcttgtactcccctgctttctgcccctcacctctgcccgacacctctctcttgcaggtacgccaggacctgccctcgccttcggacttctactcaacccccctgcagccaggcggccagtctggattccttccaagtggcgctccagctcaacagatgttattgcccatggtggactcccagttgcctgttgtcaatttcggtagtctgccgcccgcccctcccccagctcctccctctctgtccttgcttccggtaggtcccgcacttcaaccaccatctcttgcggtgcgccccccccctgctccagctacacgtgtgctgccttcacccgctcgcccctttcccgcatccctaggacgcgccgaactgcatcctgtggaacttaagccattccaggattaccagaaattaagctcaaatttggggggtcctggaagctccagaacacccccaaccggtcgatcattctctggccttaattctcgccttaaggccaccccctcaacgtatagtggggtgtttaggacccagagagttgacttataccagcaggcgtcgcctccagatgcattacgctggattccaaagccctgggaacgtacaggccctcctccccgggagggtccctcacggcgggctgaagagcctggttcaagaggcgataaggagcctggacttccaccgccacgctag

SEQ ID NO: 344371 - DNA, 6450 bp, Artificial Sequence
  derived and/or modified sequence
atgtccgatagaagcgggccgaccgccaaagggaaggatgggaagaaatacagcagcctcaacctctttgatacctataaagggaagagtctggaaatacaaaagcctgccgtcgccccccgccacgggcttcagagccttggcaaagtggcaatcgcacggaggatgcctcccccagccaatttaccaagtctgaaagcggagaacaagggaaacgaccccaatgtgtcattggtgcccaaggatggcacaggatgggcctcaaaacaggaacagagtgacccgaagagctcggatgcttctactgcccagccccccgaatcccagccactcccggccagccagacacccgcctcaaatcaacctaagcgcccccccgccgcccctgaaaataccccgttagtacctagcggggttaagtcatgggctcaagctagcgtgacacacggggcacacggagatggagggcgagcaagcagtttgctgagccggttttctcgagaggagttcccaaccctgcaggcagcgggggaccaggataaagctgccaaggagagggagtcagcagagcagtcatccgggcccggtcccagccttaggccacagaactcaaccacatggcgagatggcggagggcgagggcccgacgagctagaagggcccgatagtaagcttcatcatggacacgatcctcgcggcggcttacagcctagcggccctccacaatttccaccttatagaggcatgatgcccccatttatgtatccaccttatcttcccttcccacctccttacgggccccaaggtccctatagataccccacgccggacgggccatctcgctttccccgggtagccggtcctcgaggtagcggcccacctatgagacttgtggaacctgtcggccggccaagcattctgaaggaggacaatctgaaggagtttgaccagctggatcaggagaatgatgatggttgggccggcgcccacgaagaggtggattacacggagaagctgaagttcagcgacgaagaggatggccgtgactcagatgaggagggggccgagggacatagagactcccagagcgcatcaggagaggagagaccccctgaagccgacggcaaaaagggcaattctccaaacagcgaaccccccacgccaaaaactgcctgggccgaaacatcacgaccccccgagactgaacccggcccaccggctccgaagccgcctctgccacccccccacagaggtccagccgggaattggggcccccccggcgattacccagataggggcggtcctccctgtaagccccctgctcctgaggacgaggatgaggcctggcgccagaggcggaaacagtcctcctccgaaattagtctcgctgtggagagggcccgacgacgccgggaggaggaggagaggaggatgcaggaagagcggagggccgcctgtgcagagaagctcaaacgccttgacgagaaattcggagcaccagataagaggctgaaagccgaacccgctgctccccccgccgctccctcaactcctgctcctccccctgccgtgcccaaggagcttccagccccccccgcacccccaccggcatctgcccccacccctgagaaggaacctgaggagcccgcccaggctcctcccgcccagagcacacctacccccggcgttgccgcagcccctacgctggtctcaggcggcggatcaaccagttccacatccagtggttcatttgaggcctcccccgtggagccccaactgcccagcaaggaagggcccgaacccccagaggaggtaccgccacctaccacccccccggtgcccaaggtggaacctaagggggatggaattgggcccacacgtcagcctccttcacaaggcctgggctatcccaagtatcagaagtctctccctcctagatttcagcgacagcagcaagagcagctgctcaagcagcaacagcagcatcagtggcagcagcatcagcagggaagcgctccccctacaccggtccctccttctccaccccagcctgtgacactcggcgctgttccagccccacaggccccaccccccccccccaaggccttgtaccccggggctctgggcagacctccgcccatgccacccatgaattttgatccaagatggatgatgatccccccctatgtggacccccggctgctccaagggagaccgccactggatttctatcccccgggtgttcacccctcaggtctggttcctagggagcgctccgattctggcggttcaagctctgagccattcgacagacacgcaccagcgatgcttcgagaacgtggcactccccccgtagatcctaagttggcatgggtgggggacgtctttacggctacgcctgccgaaccgaggcccttaacatccccgctgcgccaagctgccgatgaggacgataagggaatgcggagcgagacccctcccgtgccgccacctcccccttatctcgcttcatacccaggctttcccgagaatggcgcccccggaccaccaataagccggttccctcttgaggagccagggccacgaccactgccttggccacccgggagtgacgaggtcgcaaaaattcagacaccacctcccaaaaaggagccaccaaaggaagaaaccgcccaactgacaggacccgaagccggtcgaaaaccagcacgcggcgtcggcagtggcggacagggccctccaccgcctagacgcgaatccagaaccgagactaggtggggtccgcgcccaggcagctctagacgagggatccctcctgaggaacccggagcgcctccccgcagggccggccctattaagaaacccccgccaccaacaaaggtggaggaactgccccctaaacccctagagcagggagacgagacacccaaacctcccaagccggatccattaaaaatcactaagggcaagcttggggggccaaaagaaacacctcctaatggaaacttatcacccgcgccaagactgcgaagggactactcctacgaaagagttgggcccacctcgtgccggggcaggggacgaggggagtacttcgctcgcggcaggggatttcgggggacctatggcggaagaggtagaggggcagcgggaaattcggcggtcaccgagtcctttgaggagatgatgggggtagaggtcggacagggagaccagactacgcttttgttgccagaggctgcccttcccgcgcgccatggggcacgcgtgcaatccatgcgaaagtctccttcaggcgccggcagcggagcacagaaacaagccgcaagacctatgcgggtgatttggcttctgcaaacacgtaggctgccacacccgaggcgggagcactcccctcgcagcaggtcacctaccaccaggtctccgacattccccgcccccgctagatttaccccgggcgtcggtgaaagctctcttcccgaaggtatttcacctgggcccaggaggagagaacctcctcaggtctgtcccggatggtctccgcccgctaaaagcctcgctccaaaaaagccccccacaggccccttacccccatccaaagagccgttaaaagagaaattaattccaggccctttgtcacccgtagctaggggaggaagtaacgggggcagcaatgtcggcatggaagatggagaacggcccaggcgtaggcggcatggccgggcgcagcagcaggacaaacctccgcgcttccgcagactgaaacaggaacgggaaaacgcagccagaggatccgagggcaagccctccttaacacttcctgccagcgcgccaggaccggaagaagctctaacaaccgtgactgtagctccagccccacgcagagccgctgccaagagccctgatctatctaaccaaaatagcgatcaagccaatgaagagtgggagaccgcctccgagtcttcagacttcacaagtgagcgaaggggagacaaggaggcgccaccgccggtgcttttgactccgaaggccgtaggcacccctggaggaggaggcggtggagccgtgcctggaattagcgcaatgtcgcgcggcgacctcagtcagcgcgcaaaagaccttagcaagaggagtttcagttctcaacgccctgggatggagagacagaaccggcgccccggcccaggcgggaaggctggcagcagcggctctagctcaggcggcggcggcggagggccaggaggaagaaccgggcctggaagaggagataagaggtcatggccgtcccccaagaaccgctctcgccccccggaagagcgaccccctggtctccctcttccgccacccccaccaagctcttcagctgtctttcgcctcgatcaggtgatccactcaaacccagctgggatacagcaggcattggcccagctaagcagcagacagggttccgtgactgctcctggaggacatcccagacataagccgggccctccacaggcaccccagggaccctcgcctcggccccctacccgttatgagcctcagagagtaaattccggactcagcagtgatccacactttgaggagcctggtcctatggtccgtggagtggggggtaccccccgagacagcgctggagtgtcaccctttcccccaaagcgtagagagagaccccctcggaagccagagttgctgcaagaagaaagtttgccccctccccattcatctggtttcttaggatcaaagcctgagggccccgggccccaagctgaaagtcgggacacagggactgaggctttgacaccccatatttggaaccgtcttcacacggccactagtcggaagagctatagaccaagctcaatggagccctggatggagcctttgagcccgtttgaagacgtggccgggacggaaatgtcccagtccgattctggcgtggacctcagtggggatagccaagtatcatccgggccatgtagtcagcggtcttctcccgatggaggtctcaagggggcagccgagggtcctcctaaaagaccagggggctctagtccgctgaatgctgttccatgcgagggacctccagggtcggaaccaccacgtcgccctccaccagccccccacgacggagatcggaaggaattgccgcgagaacagcctctccctcctggccctatcggcaccgagagatctcagcatactgatcgaggtacggaacccggacctatccggccctctcacagacccggacccccggtgcagttcggcacatccgataaagactccgacctgaggctcgtcgtcggagattccttaaaggccgaaaaagaactgacggcgtcagtgactgaagcaatccctgtgtcacgtgactgggaactccttccttcggctgccgctagcgccgagccgcaaagcaaaaacttggactctggtcactgcgtgccagaaccctccagcagtggccagcggctctacccagaggtgttttatggatctgctggaccatcttctagccagataagtgggggccatggattgtccgtgacttctaagcagtggcgccggccagggactcctagcttacacccataccggtcgcagcccctttacctgcctcccggccctgccccaccgtcggccctgctctcaggagttgccctgaagggtcaattcttggacttctccacaatgcaggcaaccgagctaggaaaactgccagcaggaggggtgctgtacccccctcccagctttttatactcaccagccttctgccccagccctctgcccgatactagcctgctccaggtccggcaggacctgccctccccctccgacttctactcaacaccacttcagcccggaggacagtctggattcctcccatcaggtgcacctgcacaacagatgctgctccctatggtcgattctcaactgcctgtggtcaacttcggctctctgccaccggctcctcctcccgcgccgccctccctaagccttctacctgtcggccccgcactccagccaccgtctctcgccgtgcggccgccacctgcccctgctactcgtgtgctgccatcaccagcacgcccttttcctgcgtcgctgggcagggccgagctgcatcctgtggagctgaaaccattccaagactatcagaagttatcgagcaatttgggcgggccggggagttctcgtacgccacctacagggagatccttttcgggtttgaactccagactgaaagccacaccttccacctactcaggagtgttccggacgcagcgggttgacttgtatcagcaggcatcaccaccagatgctctgcgttggatcccaaaaccatgggagagaaccggcccacctccccgggaaggcccctccaggcgggctgaggagcctgggtctcgtggcgacaaggagccagggctgccccctccccgttag

SEQ ID NO: 344372 - DNA, 4149 bp, Artificial Sequence
  derived and/or modified sequence
atgctgcgtgagcgcggcactccaccagtcgatcccaagctcgcctgggtcggtgatgtcttcaccgccacacccgctgagccaaggcccttgacctccccactgagacaggctgctgatgaagacgacaaaggaatgcgctctgaaaccccccctgtgccacctccgcccccttatttggcctcttaccccggcttcccagagaatggagcaccaggaccccctatttctagatttcccctggaagagcctggaccacggcctctgccctggccacctggatccgacgaagtcgcaaaaattcagactccacctcctaaaaaagagcccccaaaggaggagaccgcacagttaacaggacctgaagcaggaagaaagcccgctcgcggggtagggtcaggcggccagggcccaccgccgcctcgccgggaaagtcggaccgagacgcgttggggcccccgccccggatcgtcccggcgggggattccccctgaagaaccaggagccccccctcggcgggcaggaccaattaaaaagcctccgccacccacaaaagttgaagagctacctcccaagcctctggaacagggggatgaaactcccaaaccaccaaagcccgatcccctgaagattaccaaaggcaagctgggcgggcccaaggagactccgcccaatggtaatctaagtccagccccacgcctccggcgcgactactcgtatgagagagtcggtcctacatcctgcaggggacgtggaaggggggagtactttgctcgaggccgcggatttcggggcacatacggagggagaggcaggggagccagatcgcgggagtttagaagttatcgcgagttcaggggagatgatggccgcggcgggggcaccggagggccaaaccatcccccagcacccaggggcaggacggcctcagagacgcgctccgagggctcagaatatgaagaaattcccaagcggcggagacaacggggcagtgagacagggagcgagactcacgaatcagacttggctccttccgacaaagaggctcccactcctaaggagggcaccttgacgcaagtgccgctagcaccaccaccccccggggctcctccttctccagctcctgcacggtttaccgctagaggcggcagagtgtttaccccccggggcgtaccttcacgcagggggcggggaggcggacgaccaccacctcaggtttgtccagggtggtccccacccgccaagtcactcgcacccaagaaaccacctacaggacccctccctccctccaaggagccattgaaggagaaactcattcccggacctttgagtcccgtcgcccgcggcgggtccaacggaggtagtaacgtaggaatggaagacggagagagacccagacgacggagacacgggcgagcccagcagcaggacaagcccccccgatttcgccggctcaaacaggagagggagaacgctgccagagggtctgaaggcaaaccctctctaactttacctgccagcgcccccgggccagaggaggctctcaccacggtcactgtggcgcccgctcctaggcgggccgccgccaaatcacctgatttgagcaatcaaaatagtgatcaggccaatgaagagtgggagacagcctcggagagcagtgactttaccagtgaaagacggggcgataaagaggcccctccccccgtgttgctcactcctaaagccgttggcaccccaggcggcggcggcggaggggccgtacccggcatttctgccatgtcaagaggggacctcagccagcgtgcaaaagacctgagcaagcggagtttctcgtcccagagacccggaatggagcggcagaacagacgcccagggcccggcggtaaggctgggtcctccggctcttcaagcggaggaggcggcggagggccaggcgggcggaccggtcctggcagaggagataaaaggtcatggccttccccaaaaaatcggagccggccacccgaagagcggcctccggggcttcccttgccaccgccaccaccctcctccagtgcagtgtttaggttagaccaggtcattcatagcaatcccgccgggatacagcaggcccttgctcagcttagcagtaggcaggggtcagtcactgctcccgggggacatccacgacacaagccgggacctcctcaggctccccaaggcccctcccccagaccacccactaggtacgagccccagagagttaattcaggactgtcctctgacccgcactttgaggagcctgggccaatggtgaggggggtaggtggcaccccacgcgattcagccggggtgtcacctttccctcccaaaaggcgtgagcgacctccacgcaaaccggagctgctgcaagaggagtcactgccgccacctcactctagcggattcctggggtctaagcccgagggacccggcccccaggcggagtcaagagacacgggtactgaggcccttacgccacacatctggaacaggctgcatacagccacctcgcgcaagtcataccgaccaagctccatggagccctggatggagcctctctccccttttgaggacgtcgctggcactgaaatgtcacagagcgattcaggcgtggatttgtccggagatagccaggttagctcaggcccctgctcccagagaagttctcccgatggtgggctaaagggggccgccgaggggccccccaagaggccagggggctccagccccctgaatgccgttccatgcgaaggccccccaggatctgaacctcctcgtcgacccccccctgcaccacacgatggcgatcgcaaggaactgccccgagagcagcccctgcccccaggcccaattggcaccgagaggtcccagcacacggatagaggcactgagcccggacccataagaccaagccaccggccaggacctccagttcagtttggtacatccgacaaagacagcgacttgaggctggtggtgggcgattctttgaaggctgagaaagaactcacggcttctgtgaccgaagcgatccccgtctcacgtgactgggaactgttaccaagtgctgcagcctcagccgagccacagagtaaaaatttggattctggacattgcgttcccgagcccagttcctcaggacagaggctttaccccgaggtcttttacggttccgccggcccttcctctagccagattagcggtggggcaatggactcccagctgcatcccaattccggtggattcaggcccggcacaccgagcttacatccatatcggagccagcccttgtacctgccacctggaccggctcccccttctgcccttctgtcgggtgttgcgttgaagggtcagtttctggacttctccacaatgcaagccacagagttgggcaaactccccgcagggggagtgctgtacccgccaccctcattcctgtacagtccagcattctgtccctccccacttccggacacaagccttctgcaggttagacaggaccttccgagtccaagcgacttctattccacgccactccagccgggcgggcaatctgggttcttgccttctggtgctcccgcccaacagatgttactgccaatggtggacagtcagcttcctgtggtgaactttggctctctgccaccggccccaccgccagcgcctccgtccctgagcttgctcccagtgggcccggctttgcagcctccctctctggctgtgcgccctccaccggctcccgccactcgcgtcctgccctctcctgcgcggcctttcccagcctctctggggagagcagagctgcacccagttgagttgaagccctttcaggactaccaaaaactcagctccaatctagggggtccagggtcttccaggacacctccaactgggaggtccttcagtggcctgaactcccgcctgaaggctactccctcgacttattccggggtgttccgcacccagagagttgatttgtaccagcaggcttctccccccgacgctctgcggtggattcccaagccctgggaacggacggggccccctcccagagaggggcctagtcgtcgggcggaagagcccggtagtaggggtgacaaggagcctgggcttcccccaccccgatag

SEQ ID NO: 344373 - DNA, 6417 bp, Artificial Sequence
  derived and/or modified sequence
atgtctgacaggtctgggccgacagcaaaaggcaaggatggcaaaaagtactccagcctgaacttatttgacacttataaaggaaaatcacttgaaatccaaaagccagccgttgcccccaggcacggactgcagtctctgggcaaggtggccattgcccggagaatgcccccccccgctaatctcccatcgctgaaggcggaaaacaagggaaatgacccgaatgtgtcactcgtgcctaaggacggcactggctgggccagcaagcaggagcagtctgacccaaagtcttccgatgcttccactgcccagccccctgaatcccagcccctgcccgccagccagactccggcgtccaaccagccaaaaaggccacctgcggcccccgaaaacactcctctggtgccctccggtgtgaagtcttgggctcaggcctcagttactcacggggcacacggcgatggggggagggcctcatcccttctaagtaggttttcaagggaagaatttcctaccctgcaggccgctggcgatcaagacaaggctgcaaaagagagggagagtgccgaacagtcctcagggcccggcccgagcctacgacctcagaattccaccacgtggagggatggcggaggacgggggccagacgagctcgaggggcctgacagcaagctgcaccatggtcacgaccctagaggaggactgcagccgtcagggcccccgcaatttcctccatatcggggaatgatgccaccattcatgtatcctccctatttaccgttccccccaccctacgggccgcagggcccgtataggtaccctaccccagatgggccctcgcgcttccccagggtggcggggccacgagggagtggacctcccatgaggctggtggagcctgttggacgaccatccattctgaaagaggacaatctcaaagagtttgaccaacttgaccaggaaaatgacgatggatgggcgggtgctcacgaggaggtcgactacactgagaagctgaagttttccgatgaagaagatggaagggattcagatgaggagggcgccgagggccacagggactctcagtccgcaagtggcgaagaaagaccccccgaggccgacggaaaaaagggaaactcccctaattcagaaccccccactcctaaaacagcctgggcagagacgtcccgccccccagaaaccgagcctgggcctccagcgccaaaaccgcctttgccacctcctggggattacccagacagagggggcccaccttgcaagccgcccgctcccgaggatgaggatgaggcctggcgccaacggcgaaagcagtcttcttcagagatttcactcgcagtagaacgggcacgccgcaggcgggaggaggaggaaagaaggatgcaggaagagcgtcgcgccgcctgcgcagagaaactaaaacgcctcgatgaaaagttcggcgcacctgacaagagactgaaggcggaacctgcagcccctcccgctgccccgagcaccccagcgccacccccagccgtcccaaaagagctccccgcacctcccgctccacctcccgcctcagcaccgactccggagaaggaaccagaggaaccagcacaggcgccacccgcacagtctaccccaactcctggcgtggccgccgcgcctactctggtctctgggggagggtccaccagctctaccagtagcggcagcttcgaggcttcccccgtggaaccccagctcccatccaaagaggggcccgaacccccggaagaggtcccaccaccgaccacaccccccgtgccaaaggtcgaaccaaagggagatggcatcggacccacgagacagcctccatcacagggactgggataccccaagtatcagaagtctctacccccccggtttcagaggcaacagcaagagcagttactgaagcaacaacagcaacatcagtggcagcagcatcagcaagggtcagctcctcccacaccggtgcctccctctccgccccagccagtcactctaggtgctgtgcctgccccccaggccccccccccaccgcccaaggctctttaccctggcgctctagggagacccccgccgatgcctccaatgaattttgatccccgctggatgatgatccccccctatgtggacccacggcttcttcaaggccggcctcctctggacttttaccctccaggggtccatccctctggcctggttccaagagaaagaagcgacagcggtggctcgtcatctgagccgtttgaccgccacgcaccggctatgttgcgcgaacgaggaacgccacccgtagaccctaaactggcatgggtcggagacgtctttaccgcgacgccggccgagccacggccacttacatctcctttaaggcaagctgcggatgaagacgacaagggcatgaggagtgaaacaccaccggttccccctcctcctccctacctggcgagctacccgggatttcctgaaaatggggcacccgggccaccaatttccaggttcccgttggaggagcctgggccccggcctctgccctggcctcctggcagtgacgaggtcgccaaaatccaaacccctccaccgaaaaaagaaccacctaaagaggaaacagcccagttaactggtcccgaggcaggaaggaaacctgcccggggggtggggtccggcgggcaggggccccccccacctagacgcgaatcgagaacagagacccgatgggggcctcgacctggatcatcaaggaggggaatccccccagaggagcctggagcgcctccccggagagctgggcccattaaaaaaccaccgcctccaaccaaggtcgaggagctccctcccaaaccccttgagcagggggatgaaaccccgaaaccccctaagcctgaccctctgaaaataaccaagggaaagttgggtgggccaaaggaaacacctccaaatggaaatctctcgcctgcaccccggctgcgaagggactactcctacgaaagggtgggaccaacgagctgtcgcggtagaggccgaggggagtattttgcacgggggcgcggcttccgggggacctatggcggacggggcaggggcgccgcaggtaactccgccgtcacggaatcttttgaagagatgatgggggtggaggtgggccaaggcgaccagacaacactactcttgcccgaagctgcccttcccgcccggcacggcgcgcgggttcagagcatgcggaagtccccatcaggcgccgggtcaggagcgcagaagcaagctgccaggcctatgcgggttatctggcttctgcaaacaagacggctgccccaccctcgccgggagcactccccaaggtcccgatcccccactacgaggagtcctacattcccagctcctgcccgattcacccccggcgtaggggagagcagcttgcccgaggggatctcacccgggcctcggcgtcgcgagccacctcaggtgtgtcccggatggtctcctccagcaaagtccctggctcccaagaagccaccgaccggccccctgcccccctcaaaggagccgctgaaggagaagctcatacccggtcccctctccccggtcgcccgaggtggcagcaatggcgggtccaacgtcggaatggaggatggggagaggcctagacgcagacgacacggacgggcacagcagcaagataaacctcccagattcagacggcttaaacaggagagggagaacgcagctaggggtagtgaaggcaaaccatctctcaccctcccagcttccgccccaggccccgaagaagcattgacaactgtgacagtggcgcctgccccccggagggctgccgccaagtccccagacttgagtaatcagaattccgaccaggccaacgaggaatgggaaacggccagtgagtcatccgacttcacttctgaacggcgtggagataaggaagcaccgccgcccgttctcttaacgcctaaggccgtcgggacgccagggggcggcggcggcggcgcagttcctggtatttctgcaatgagcaggggggacttgtcacagagagcaaaagatctgtctaagcgttctttctccagccagaggcccggaatggagagacaaaaccgccggcccgggcctgggggcaaggcaggctccagcgggagttccagtggggggggtggagggggacctggtggccgtactggcccaggccgtggggacaaaaggagttggcccagtcccaagaatagatccaggccccccgaggagcgcccaccgggcctaccgctccctccgccacccccatccagcagcgcagtttttaggcttgatcaggtaattcatagtaatcctgcgggcatccagcaggcacttgcgcagttatcttctaggcagggatccgtgactgccccgggaggtcatccccggcataaacctggacccccccaagctccccaaggaccaagccccagaccacccacccgctatgagccacagagggtgaatagcggtctctccagcgacccgcacttcgaagaaccaggcccaatggtacggggggtggggggcacaccacgcgactccgccggggtgtcaccctttccacccaagcgacgggaacgcccacccaggaagccagaactgctccaggaggagtctttaccgcccccacactcaagcgggtttctcggttctaagcctgaagggccagggcctcaggcagagtctcgcgacacaggaactgaagcgctcacaccacatatctggaaccggctgcatacggccacgtctcggaagtcctacagaccgtccagcatggaaccctggatggaaccactttctccttttgaggacgtggctggtacggaaatgtcccagagcgacagtggagttgacttgtctggtgatagccaggtgagcagtggtccatgttcacagcgtagcagtcccgacggcggactgaaaggcgccgcagaggggccccccaaaaggccaggaggatcctcacccctcaatgctgtgccctgtgaaggaccacccgggtcagaaccgccccggaggcccccgcctgcaccacacgacggcgaccgcaaagagttacctagggagcagcccctacctcctgggcccataggtaccgaacgatcccagcacacagatcgggggaccgagccaggccctatccgaccgtctcaccgacccggccctccagtacagttcggtacgagtgacaaggactccgatctgaggttagttgtgggcgactcactgaaggccgagaaggagctcacagccagtgtcaccgaggcaatccctgtctctcgcgattgggagcttttgccctctgcggccgcctctgcagaacctcaatcaaaaaatctcgacagcgggcactgcgtgcccgaaccttctagcagcggacagaggttgtaccccgaggtgttctatggctctgctggtccttccagctcacagatcagcggtggacatggcttgtccgtcacgtccaagcagtggcggcgccctggcactccctcactgcatccctatcgcagccagcccttgtatctgcctcccggacccgccccacctagcgctctcttatctggcgtggctttaaagggtcagttcttggattttagtacaatgcaagcaaccgaactcggcaagttacctgctggtggggtcctttacccgcctccctctttcctgtattctcctgctttctgtccctcgcctctgcccgatacttcattgctgcaggtcaggcaggacctcccttccccctccgatttctattccacacctctgcaacctgggggtcagtccggattccttccttcgggggctccagcccagcaaatgctgttgcctatggtagattctcagctgcctgtcgttaacttcggatccctccctcccgcaccaccacccgcccccccctcactgtccctcctcccagttggtcccgccctgcagcctccttccctggcggtgcgcccgccccccgctcctgctacacgcgtattgccatcacccgccagaccttttccagcctctctcggtcgggccgaactgcatcccgtggaactcaaacctttccaggactaccaaaaattgtcaagcaatctcggcggtcctggttcaagtagaactcctcccaccggaaggagcttctctggactgaactcccgcttaaaggctaccccaagcacctacagcggcgtctttcgtactcagagagtagacttgtaccagcaggcctctcccccagacgccctccggtggattcccaagccctgggagaggactggccccccgcccagagaagggccaagcagacgagcggaggaacctggatcacggggcgataaagagcctggactgcctcctcccaggtag

SEQ ID NO: 344374 - DNA, 6417 bp, Artificial Sequence
  derived and/or modified sequence
atgagtgatcgcagcgggcccacagcaaagggcaaagacgggaaaaagtactcctcgctgaatttgtttgatacctataagggcaagagccttgagattcagaaacctgctgtggccccccgccacggcttgcagagtttgggcaaagtggcaattgcccgtaggatgccaccccctgccaacttaccatctcttaaggcagaaaataagggtaacgaccccaatgtgagtctcgtgcccaaggatggaacaggctgggcttccaagcaggaacagtccgatcctaagagtagcgacgcgtccaccgcgcagccccccgaatctcagccacttcccgcctcacagactccagcgtcgaaccagcccaaaagacctcccgctgctcccgaaaacactcccctcgtgccctcaggcgtaaaatcatgggcccaggcctctgtcactcacggggcacacggcgacggtggtagagcctccagcttgctgagccgttttagcagggaggagttcccaaccctgcaggcagccggcgatcaggacaaggcggctaaggagagggaaagcgctgaacagtcttctggtccaggcccgagtttacggccacagaattcaacgacctggagagacggaggcggcaggggccctgatgaactggagggacctgatagtaaactccatcatggacatgatcccagaggcggtctccaaccatctgggcccccccagttcccaccttaccggggtatgatgcctcctttcatgtaccctccgtacttgccctttccacctccctatggcccccagggtccataccggtaccccaccccagacggcccttccaggttccctcgggtggccggaccgcgcggatcaggacctcctatgcgactggtggaacctgtgggacgaccaagcattctcaaggaggacaatctcaaggaattcgaccaattagatcaggagaacgatgacggttgggcgggagctcatgaagaggtggactatacggagaaactgaaatttagcgacgaagaggatgggcgggacagcgacgaggagggagctgagggtcatagagatagccagtccgcgtccggggaggagcggcccccagaagctgacggtaagaagggcaattcgcccaatagtgagccacctactcccaagacggcttgggccgagacctccaggccccccgagaccgagcctggcccgccagccccgaaaccccccctgccccctcccggggactatcccgaccggggtggacccccttgcaaaccccccgcccccgaagacgaagatgaggcatggcggcagagacggaaacagagcagctctgagatctctttggccgtggagagagcccgacgccgccgcgaggaagaagaaagacgcatgcaggaggaaagaagggcagcatgcgccgaaaagctgaagagactggatgagaagtttggcgccccagacaaaagattgaaggcagaacccgctgctccaccagccgccccgagcacaccggccccccctcccgccgtgcctaaggagttgcctgccccgcccgctccaccacccgcctccgcccccacaccagagaaagaacctgaagaacccgcccaagccccgcccgcccagtctaccccgacacctggggtggctgccgcacctaccttagtctcagggggcggtagcactagcagcacctcttccggctcatttgaagcaagtcccgtcgagccccaattgcccagcaaagaaggcccagaaccacccgaggaggtgccgcctcccactacgccccctgtgccaaaggtggagcccaagggagacggaattggccctaccagacaaccaccatcacaaggactgggataccccaaatatcaaaaatctcttccgcctagattccaaaggcagcagcaagagcaactcctgaagcagcagcagcagcaccagtggcagcagcaccagcagggaagcgcacctcctacgccagtcccaccatctccacctcagccagtcacactgggggctgtccccgcaccccaggctccaccgccccctcccaaagccctgtaccccggcgcccttggcagacctcccccaatgcctcccatgaatttcgacccccgctggatgatgatcccaccctatgttgatcccaggttgctgcaaggcagacctccgttggacttctacccacccggggtgcacccgtctgggttggtcccccgagagcggtctgattccggcggctcctctagcgagcctttcgataggcatgcccccgccatgctccgtgagagaggcacccccccagtggaccctaaactagcgtgggtcggcgacgtgttcacagccactccggccgaacctcgccctctcacatctcctttacgtcaagccgctgacgaggatgataaagggatgcgttcagagactccacccgtgcccccaccgcccccttatttggcatcataccctggcttcccagaaaatggagccccaggccctcccatatcccgcttcccgcttgaggagccaggacctagacctttaccttggccacccgggtccgatgaggtggccaagattcagacacccccaccgaaaaaagagcccccaaaggaagagactgcacagctcacgggtcctgaggcaggtcggaaaccggcacgtggagtcgggtccggtggccagggcccgccccctccccgcagggagtctcgcaccgaaacaaggtgggggcctagacctggcagctcccgccgagggatccccccggaagagccaggagcccctccacggcgtgcagggccaataaaaaaaccacctcctcccactaaggtcgaggagctcccacccaagccattggagcagggcgacgaaactcctaagccccccaagccagaccctctgaaaattacaaaaggaaagctcggtggtcctaaagagactccgcccaacggaaatctgagcccggcgccaaggctgagacgcgattattcttacgaacgggtgggacctacaagttgccggggaaggggtcgaggcgagtacttcgcacgtggcagaggcttcagaggcacatacggggggagaggacggggcgcggcaggaaactcggccgtgaccgaatccttcgaggaaatgatgggggtcgaggttggacagggagatcaaaccaccctgctgctgccggaggcagccttgcctgcgcgtcatggggcaagggtccagagcatgaggaagtcgccatctggagctggatccggagctcagaagcaggccgccagacctatgcgtgtaatttggctcctgcaaacacgaaggctgccccaccctcggcgcgaacacagcccaaggagtcggtcccctacaacaaggagtcctacctttcctgcccccgctcgattcacccccggggtgggtgaaagctctctgcctgaaggtataagccccggacccagaaggcgtgaacctccgcaggtctgccccggctggtcccctccagctaagtctctggcccccaagaagccccctaccggacccctgccaccatccaaagaaccccttaaagagaaattgatcccgggcccacttagtcctgttgctcgcggcggctccaatgggggctccaacgtaggtatggaggacggcgagagacctcgacgtcggcggcatggtcgtgcacagcagcaggataagcctcccagatttaggaggctgaagcaggagcgtgaaaacgcggcaagggggtccgaaggcaaaccaagcttgactctgccagcctcagcaccaggacccgaggaagccctgaccaccgtgacagtagctccggctccacgcagagcggctgccaagtcaccagaccttagtaaccagaacagcgatcaggcaaacgaggaatgggaaaccgccagtgaatcttcagactttacatctgaacgcagaggcgataaggaagcaccccccccagtattgctaactccaaaggctgtgggcacccccggaggtggggggggaggcgccgttcctggaattagcgcaatgtcccggggcgatctgtcacagcgcgcaaaggacctgtctaagcggtctttttcctcccagcgtcccgggatggagagacagaatcgccgtccaggcccgggcggaaaggccggctcctccggcagttctagtgggggcggcggtggagggcctggtggacgaaccggacccggaaggggtgataaacgcagctggccatctccaaaaaatcggagccggcccccagaagaacgtccgccagggctcccactcccccccccccctcctagcagctccgccgtattcagattggaccaggtgatccactctaaccctgctggcatccagcaggcactggcgcaattgagttccagacagggctcggtcaccgcccccggaggccacccacgccacaagcctggccctcctcaggcacctcaaggccctagtcctcggccacctaccagatacgaaccccaaagggtgaactcaggcctatctagcgatccccacttcgaagagccaggccctatggtacgcggagtaggaggaactccaagggacagtgccggggtttccccatttccacctaaacggcgtgagcgaccgccaagaaagcctgagctcctgcaggaggagagcttgcctccaccacatagcagtgggtttctgggatctaaaccagaaggcccgggaccacaggctgagagccgcgatacaggaacagaagccttgactccacacatatggaaccgactgcacactgcgacatcacggaaaagttaccgcccctccagcatggagccctggatggagcctctctcaccattcgaagatgtggctggtacagaaatgagtcaaagtgactctggtgtagatctgtccggagactctcaggtttcttctggtccttgctcccaaaggagcagcccagacggcgggttaaagggcgctgccgaagggcctcctaagaggcctggtggatcttccccgttaaacgcggtgccatgcgaagggccgcccggatctgagccccctagacgaccaccgccggcacctcacgatggcgatagaaaagagttaccccgggagcagccactgccccccggccccattggaactgagcggagccaacacactgacaggggaactgaaccggggccaatccgcccgtcacatcgcccaggccctcctgtgcaatttggcaccagcgacaaggactctgatctgaggctggtggtgggtgacagtctaaaagccgaaaaagagcttacagcgagtgtgacagaggcgatcccagtgtctagggattgggagctcttgcctagcgctgctgcttcagccgaaccccagagcaagaatctggatagcggtcattgtgtgcccgaaccctcctcctctggacaacgcctctaccccgaggtgttttatgggtccgctggaccctcatcaagtcagatatctggggggcacggcttgtcagtcactagcaaacagtggcggagacctggaacaccgtctcttcacccctacagatcccaacctttatacctcccccctggtcccgccccaccgagcgcacttttatcaggggtggccttaaaggggcaattcttggatttctccaccatgcaggctaccgaactagggaagctccccgcaggcggagtgctgtaccctccaccatcctttctctatagccctgctttttgtcccagcccactgcctgacacaagcttactgcaggtgcggcaggatctgccctccccaagcgatttctacagcactccactgcagcctgggggccagagtggatttctcccatctggtgccccggcacagcagatgttactgcccatggtcgacagtcagctccctgtggtgaattttggcagcctgccccccgcccccccacctgcacccccttccctgagcctgctgccagtcggccccgcattgcagccccccagtcttgccgtgagacctcccccggcgcctgccacccgcgtgctccccagcccggcgaggccgtttcctgcctcgcttggacgtgccgaacttcatccagtggaactgaaaccattccaggactaccaaaaactgtcctccaacttggggggccccggcagcagtaggacgccccccaccggccgctctttttctggacttaatagtaggctcaaggccacaccttcaacctactccggcgtctttagaacccaaagagtggacttgtatcagcaggcgtccccccccgatgctctccgctggatccccaagccatgggagcggacgggaccaccccctcgtgagggcccgagccggagggccgaagagcctggatcgcgaggagataaggagcccggccttccgcccccacgatag

SEQ ID NO: 344375 - DNA, 6450 bp, Artificial Sequence
  derived and/or modified sequence
atgagcgatcggtcaggacccaccgctaaaggtaaagatggtaagaagtattccagcctcaacctgttcgatacatacaaagggaagagcttggagatccagaaaccggccgtggcccctcgccacggtttgcagagcttgggcaaagtggcgattgcgcgccgaatgccccctccggcaaatctcccttctttgaaagctgaaaacaaagggaatgacccaaacgtgagcttagtaccaaaggacggtaccggttgggcaagcaaacaggagcagagcgaccccaagtcatcggatgcttctacagctcaacccccagagtcacagccgctgcccgcaagccagacaccagctagcaatcagcccaaacgaccccccgctgcgcctgaaaatactcctctagtgcctagcggagtgaaatcctgggcccaggcctccgttacgcatggagcgcacggggatggggggagggcttccagtttgctgtcccgtttttcaagagaggaattcccaactctgcaagctgcaggcgatcaggataaggccgctaaagagagggaatccgctgaacagagctctggtccaggcccctctctgaggcctcagaactctactacctggagagatggcggagggcggggcccagatgaactggagggaccagattcaaaactgcatcatgggcacgacccaagaggagggctgcagcctagtggcccaccccagttcccaccctacagaggcatgatgccaccgttcatgtatcctccatacctaccctttccccctccgtacggaccccagggcccataccgatatccaacgcctgacggcccaagccgatttcctagagttgcggggccgcgcggttctggcccgccaatgcggctcgtggaacctgtggggagacctagcatactgaaggaagataaccttaaggagttcgaccagctggatcaggaaaatgatgatggctgggctggggcccacgaggaggtcgattacacagagaaactgaaattttcagatgaggaggacggcagggattccgatgaggaaggtgccgagggtcatagagatagccagtcagcatctggggaggagcgacccccagaggccgatggcaagaagggcaatagcccgaatagtgaacccccaacgccaaaaactgcgtgggccgaaacctctagaccccctgagactgagcctggaccccccgctccaaagcccccgctgccccccccacacagaggcccagcgggtaattgggggcctcccggcgattatccagacagggggggaccgccttgcaaaccacccgctcccgaagatgaagacgaagcctggcggcagagaaggaaacagtccagcagtgaaatttcacttgctgtcgaacgtgctcggaggcgtcgagaggaagaggagagaaggatgcaggaagaaagaagagctgcctgcgccgaaaaattgaagaggctggacgagaaattcggagctcccgacaagaggttgaaggcagaaccggccgcccctcctgctgcgcccagtactcctgccccccctcctgcagttcctaaagagctgcccgcacctccggctcccccccccgcttccgctcctaccccagagaaagagcccgaagaaccagcacaggcgcctcctgcccagagtaccccaacacccggggtcgcagcagctccaacactggtgtccgggggtgggagcaccagctccacatccagcgggagtttcgaggcttcccccgtggaacctcaactgccgagtaaagaggggcctgagcctcctgaagaggtacctccccccaccacccccccagtgcccaaagtcgagccgaagggagatggaatcggcccaacgaggcagcccccgagccaggggctaggttatcccaaataccagaaaagcctgccgccacggttccagagacagcagcaggaacagctgctgaaacagcagcagcagcaccagtggcagcagcaccagcaagggtccgctccacctacgccagtaccaccctccccgccgcagcccgtaaccctgggtgctgtgccagcccctcaggccccaccaccccctccaaaagcattatacccaggcgcccttggtcgcccaccaccaatgccgcccatgaactttgatccgagatggatgatgattccgccatacgttgaccccagattgctccaagggcgaccccctcttgacttctacccccccggggtacacccttctgggctcgtgccccgggaacgcagcgactcgggcgggagttccagcgaacccttcgatagacacgctccggcaatgctaagggagcggggaacccctcccgtcgatcctaagcttgcatgggtgggggatgtgtttaccgctacccccgccgagcctcggccccttacgagccctctgcgacaggccgcggatgaagatgataaaggaatgagatccgagaccccgcccgttcctccaccacctccctaccttgcctcttaccccggctttcccgagaacggcgccccagggccgcccatttctagattccctctcgaggagccgggccccagacctctcccttggcccccagggagcgatgaggtggctaagatccagactccccctcctaagaaggagccacctaaagaagaaaccgcacagttgacaggaccggaagccggcaggaaacccgctagaggcgtcggttcaggggggcagggccccccaccacccagacgagagtctagaacagaaactcgctggggcccgagaccaggctccagtaggcgaggaattcctcccgaggagcccggggctcctccaagaagggccggcccaatcaagaagccaccacctcctacgaaggtggaggaactgccaccgaaacccctggagcagggagatgaaactccaaaaccccccaagcctgatcccctaaaaattaccaagggtaagcttggtgggcccaaggaaacgcccccgaacggaaatttatctcctgcaccccgcctacgacgggactactcatatgaacgggtggggccgacctcatgtcgagggcgagggagaggcgagtattttgcgcgcggcagagggttcagaggcacatatgggggccggggtaggggcgcagctggaaatagcgccgtgaccgaaagtttcgaagaaatgatgggtgtcgaagtcgggcagggcgatcagacaacgctcctcctgccagaggcagccctcccagcacgccacggcgccagagtgcagagcatgaggaaatcccccagtggagccgggagcggagctcagaaacaggccgcccgccctatgcgggtgatttggttattgcagacgagaaggcttccgcacccccggcgggaacactccccccgctccaggtccccaactacgcggagtcccacctttcccgctccggctcgctttacccccggggtcggtgagagctctcttcctgagggtatttctcccggccctcgaagacgggagccaccccaagtgtgcccaggctggagccctcctgctaagtccctcgctccgaagaagcctcccaccggccctctgccacccagtaaggagcccctgaaagaaaaactcatcccaggtcccctaagccctgtggctcgcggagggtcaaacggaggatctaacgtgggtatggaagatggcgagaggccccgcagaaggaggcatggcagggcacagcagcaagataagcctccaaggtttcgacggttgaagcaggagagagaaaatgctgctaggggcagcgagggcaaaccaagtctaacactaccagctagcgcaccgggacccgaggaggcattgactacagtgaccgttgccccagcaccaagacgcgctgccgccaagagccctgacctcagcaaccagaattcagatcaggccaacgaggaatgggagactgcttccgagtcaagcgatttcaccagcgaaagaaggggagataaagaggcccctccaccggtgttacttacacccaaggctgttggtactcccggtggaggaggcgggggcgccgtgccaggcatatctgcaatgagcaggggggatttatctcaacgagctaaagatctgtctaagcggagtttcagctcacagcggccgggtatggagcgtcagaatagaaggccaggacctggagggaaggccgggtcttccggatctagttcaggggggggcggcggaggacctgggggacgaactggccctggccggggggacaagagaagctggcccagtccaaagaaccgcagccgccccccagaggagagacctccggggctgcccttgcctcctccacccccctccagttccgccgtttttcggcttgaccaggtcatccacagtaatcctgccgggattcaacaagctctcgcccagttgtcttctcggcaaggctccgtaacggcccccgggggccatcccaggcataagccgggaccccctcaggcccctcagggacctagccctagaccacctacccggtacgaaccccagcgtgtgaactccggtctctcctctgaccctcacttcgaagaacccggcccgatggtgcgtggtgtaggcggcaccccccgggattctgcaggtgtcagtccatttccacccaaacgccgagaaagaccaccacgtaaaccagaacttctgcaggaagagtctctcccgccccctcatagcagtggctttttagggtcgaagccagagggacccggtccgcaggccgaatcaagagataccggtaccgaggccctgaccccccacatctggaatcgcctccacaccgcgacaagcaggaagtcatacagaccatcatctatggaaccctggatggagcccctgtcccccttcgaagacgtggccggcacagaaatgtcccaaagcgacagcggtgttgatttgtccggcgattctcaggtcagtagcggaccttgctcacagcgctcctccccagacggggggctgaagggcgccgctgaggggccaccaaaacggccaggaggctccagcccccttaatgccgttccttgcgagggcccgcctgggtcggaaccacctcgcaggcctccaccagccccgcatgacggagacaggaaagaactccctcgggagcaacctctgccacccggcccaatagggacagaacggagtcagcacacagatcgtggcactgaacctgggccaatccgacctagccatcggccagggccgccagttcagttcgggacatccgacaaggattccgatctgagactagttgtcggggatagcctcaaagcagaaaaagaactcacggcctcagtgacagaggccatccctgtttctcgcgattgggagctgctgccatccgccgccgcttccgcggaaccccagtcaaagaatcttgacagtgggcattgcgtcccagagccttcttccagtgggcaaagactgtatccagaggtgttttacggttcagcggggccctccagttctcagatcagtggaggacacgggcttagtgtcaccagcaagcagtggcggcgccccggcacaccttcactgcatccctaccgttcacagccactatatttgccacctggccctgcccctccctcagccctgttaagcggcgtcgcactcaaaggacaatttctcgacttcagcaccatgcaggctaccgaactgggcaaactgccagcaggcggcgtcctgtaccctccaccatcgtttctgtacagccccgccttttgtccttcacctttgcctgacacttctctgctgcaagtgagacaggacttgccctcacccagcgatttttattccacacccttgcagcccgggggacaaagtggatttctaccaagcggagccccagcacagcaaatgcttctccctatggttgacagccagctccctgtggtgaatttcggcagtctgccacctgcaccaccgcccgcaccacccagcctgagtttgctgcccgtgggccctgctcttcagcctcccagcctagctgtgcggccacctccagcaccagcaacacgggttctgccatcgccagcacggcccttccctgcatcgttaggccgggctgaactgcaccctgtcgagctgaaaccttttcaggattatcagaaactaagtagtaatttgggcgggcctggatcttctaggacgcctccaaccggaagatctttttcaggtttgaattcaagactcaaggccactccctcaacgtattcgggagtttttcgtacccaacgcgtcgatctttaccagcaggccagtccacctgacgccctgcgctggattccgaagccctgggaacgcacaggacccccacctagggagggtccgtcccgtcgcgcagaggagcccgggtccaggggagataaggagcccggccttcctcctccaagatag

SEQ ID NO: 344376 - DNA, 4149 bp, Artificial Sequence
  derived and/or modified sequence
atgctgcgggagcgagggacacctcccgtggatccaaagcttgcctgggtcggcgacgtgttcacggccactccggccgagccccggccacttaccagccccctgcgccaggcagctgatgaagatgacaaaggcatgcgctcagagaccccaccagtaccgcccccgccgccctatcttgccagctaccctggttttccggagaatggagcaccagggccgcccatatcgagatttccactagaggagccaggacccagacccctgccatggccgccaggtagtgacgaggttgcgaaaatccaaacccccccgcccaagaaggagccacctaaggaggagactgcccagctcacaggccccgaggctggcaggaagcctgctcgcggagtaggaagcgggggccagggccccccgccgccaagaagggagtctagaactgaaacgcgctggggaccccgacccggtagttctcgaaggggaatcccacccgaagaacccggagcgccccccagacgcgctggaccaatcaagaaaccacccccaccaacaaaggtggaggagctcccccctaaacccctggaacagggagacgagaccccgaagcctcctaaaccagacccactaaagatcactaagggaaaactgggcggccccaaggagactcctcccaacgggaatcttagtcctgccccccgactccgccgtgattactcctatgaaagagttggtcccacaagctgcagggggcgcgggcgcggtgaatatttcgcccggggtagggggtttcggggaacctacgggggcaggggaaggggagctcggtcacgggagtttcgtagctatcgggaatttcgcggagatgacggtagaggaggggggacaggcggacccaaccatccacctgccccccgtggaagaacagcgagcgagactagaagcgagggcagtgagtatgaggaaatccctaagcgtcggagacagagaggatccgagactggtagcgaaacgcacgagtccgatctggctccttctgataaagaggcacccaccccgaaggaaggtacattaacgcaggttccactggcccccccaccacccggcgctcctcccagccccgcccccgctcgctttactgccagagggggtcgggttttcacccctaggggagtcccctcacgaagaggacgaggtggcgggaggcctcccccccaggtttgccccggctggtccccgcccgcaaagtctttggccccaaagaagcctcccacgggcccgttgcccccatctaaagagccactgaaagagaaattaattcctgggcccttaagtcctgtagccagggggggctctaatggagggagcaatgttggcatggaagacggcgaacgcccaaggcgtcgcagacatgggcgagcacagcagcaagacaaacctcctcgtttccgaaggctgaagcaggagcgggagaatgcagccagaggatccgaggggaaaccctccctaacactgcctgctagtgcccctggtcccgaagaggcactcactactgtgacagtggccccagctccgagacgcgccgccgcaaaaagcccagacttgtccaaccagaactccgaccaggctaacgaagagtgggagactgcgagcgagtcatctgacttcacctccgagcgccggggagacaaggaggcccccccccccgtcctgttgaccccgaaagcagtaggcacccccggaggcggcggaggcggcgctgtgcccggaattagcgccatgtcgaggggcgatctatctcaaagggctaaggatctttccaagcggtccttctctagccagcggcctgggatggagcgacagaatcggcggccaggcccaggaggtaaagctgggtccagcggctcttcctctggaggcggggggggaggtcccggaggacgtacaggccccggcagaggtgataagcgctcatggccaagccctaagaaccggtctagaccaccagaggaaaggccccccggactacccctcccccccccacccccaagttcaagcgcggtgttccggcttgatcaggtcatccatagcaatcctgcaggcattcagcaggccttggcccaattatccagccggcaaggatccgttaccgcccctggcggtcacccccgccataagccaggccctccacaggccccacagggcccatcaccaaggccacccacacggtacgagccacaacgtgtgaatagcggcctgtccagcgacccccattttgaggagcccgggccaatggtccgaggtgtagggggtaccccccgggattcggctggcgtgagtccattccctcctaaacggagagaaagacctcccaggaaaccagaactgttgcaggaagaatctttgcctccccctcactccagcgggtttcttgggtctaaacccgaaggaccgggaccccaggccgaaagtcgcgacactggaacggaagcgctcacacctcacatttggaatcgtctgcatactgctacgagcagaaaatcctacaggccgtccagcatggagccttggatggaaccgttgagtcctttcgaggacgtggctggtactgagatgagtcaatccgattcaggggtagacctcagtggcgactctcaggttagctccgggccttgttcccaaaggagcagtcccgacggcggcctcaagggagccgctgagggtccacctaaaaggcccggcgggtcatccccattgaacgcggtaccgtgcgaggggccccccggctcagagcctcccagacgaccaccccccgccccacacgacggtgatcgaaaggaactaccccgggagcagcctctgccccccgggccaattggcacggaacgttcacaacacacagatcgagggactgagcccggcccgatcagaccctctcacagaccgggtcctcctgtacaatttggaacaagtgataaggacagcgacctcagattggtggtgggtgacagcctgaaggcagaaaaggaactcaccgcctccgttacagaagctattcctgttagtcgcgattgggagctcttgccatccgcagccgctagcgccgagccccagagcaaaaacttggacagcgggcattgcgtgccagagccatcttcctctggccagaggctttaccccgaggtgttttatgggagcgctggacctagcagttcacagatctccggaggtgccatggatagccagctgcaccctaacagtggaggttttcgcccaggaacaccctccctgcacccctaccgatcacaacctttatacctgccacctggacccgccccacctagcgccctgctatctggggtggccctgaaaggccaattcctggattttagtacaatgcaggcaactgaacttgggaaactgccggctggtggagttctctatcctccacccagtttcttatattctcccgcgttttgcccctcccccttgcctgacacttctcttctacaagtccggcaggaccttccatccccttcagatttctactcaactccgcttcaacctgggggtcaatctgggtttctaccgtctggtgctccagcgcaacagatgttactacctatggtcgactcccagctcccggtggtgaactttggctctcttcccccggctcctccacccgcccctccttcattaagcctgctgcccgtgggacctgccctgcagccaccctccttggctgtgcgacctccaccggccccggctacacgcgtcctgccatccccggctaggccctttcccgcatcattaggccgagctgagctccacccagtggagctcaaacccttccaggattatcagaagcttagcagtaacctggggggcccggggtccagcagaactccacccaccggtcgtagcttctccgggctcaattcccgactcaaggccacgccatcgacctactcaggcgtcttccgcacccagagggtcgatctgtaccaacaggcttcaccacctgacgctctcaggtggattccaaagccctgggagagaactggcccacctccacgggaaggaccatcccgtcgggctgaagagccggggtcccggggggataaagagccgggcctgcctcccccacgatag

SEQ ID NO: 344377 - DNA, 6450 bp, Artificial Sequence
  derived and/or modified sequence
atgagcgacaggtctggcccgacagccaagggtaaggatgggaagaagtactcttctctgaatctctttgatacctataaagggaagagtctggaaatccaaaaacccgccgttgctcctaggcatggcttgcagagcttgggcaaggttgccattgccaggcgtatgcccccaccagccaacctaccatctctgaaggctgagaacaagggaaacgatccaaacgtgtcccttgtgcccaaagacgggacaggttgggcctctaaacaggagcagagcgatccaaaatctagcgatgcctccactgctcagcctcccgaaagtcagcctctgcctgcaagtcagacaccagcttcaaatcagcccaaaagaccaccagccgctcctgagaatacgcccttggtgccaagcggcgtcaagtcctgggcccaggcctcagtcacacacggtgcccatggtgatggtgggcgggcgagcagcctgctgagccgctttagtcgcgaagagttccctactttacaagcagccggagaccaggataaagccgccaaagaaagggagtcagccgagcagtcctccggaccggggccgtccctgcgcccacaaaactccacgacttggcgtgatggaggagggagaggacctgacgaactggaaggacctgactcaaaattgcatcacggccacgacccacgagggggcctccagccttctggccccccccagttccccccttataggggaatgatgcctccgttcatgtatcccccctacttaccttttccacccccttatggtcctcagggaccatatagatatcctacaccagacgggccttcgaggttccccagggtggcaggacctcgcggatccggacctcccatgcggctggtcgagccggtggggagacccagcatcttgaaggaggataacctaaaggaatttgatcagctggatcaggagaatgatgatgggtgggccggggcccacgaagaggtggattatacagaaaaactgaagttttcggacgaggaggatggccgggatagcgatgaggagggcgctgagggccaccgcgacagccagagtgctagtggggaggaacgcccacccgaagcagacgggaagaaaggaaactcccccaactcggaacctccaaccccaaaaactgcctgggcagagaccagtaggccacccgagaccgaacccggacctccagctcctaagcctcctttgccacccccccataggggaccagccggcaactggggaccgcccggagattatccagatcgggggggtccaccctgcaaacctccagcaccagaggatgaggatgaagcttggagacagcgacggaaacagtcaagttcggagatatcactggccgtggaaagagcaagacgaaggcgggaagaagaggagcggcgcatgcaggaggagagacgcgcggcgtgcgctgagaaactcaagcggcttgatgaaaagtttggcgcacccgacaaaagactgaaggcagagcctgcggctcctccagctgcaccctccactcccgcgcctcccccagcagtgccgaaggaacttcccgcccccccagcacccccaccagcgagtgctccaactcctgagaaagaacccgaagagcctgctcaggccccaccagcacaaagcaccccaacacccggtgtggctgccgcacccacactggtgtcagggggcgggtcaacatctagtacaagttccggctcctttgaagcttcacccgtggagcctcagcttcccagtaaagaggggccagagccccccgaggaagtgccacccccaaccacaccccctgtcccaaaggtggaaccaaagggggatggcatcgggccaacgaggcagcccccatcacaaggcctgggctatccaaaataccaaaaatccctcccccctcgatttcagcggcaacagcaagagcagctgctgaaacagcagcaacagcaccaatggcaacaacaccagcagggttccgcgcctcctacacccgtgcccccaagtcccccccaaccagttacattgggggctgtgccggccccacaggctccaccccctcctcctaaggcactgtatcccggggcccttggaaggcccccgccaatgccccccatgaacttcgacccaagatggatgatgatccctccatatgtggaccctcgcctactgcagggaagaccccctctggatttttacccaccgggggtgcaccctagcgggctcgtcccacgcgaacggtcagattccgggggtagctccagcgagccatttgatcggcatgctcccgcaatgctcagggaacgcggaacccctccagtagatcctaaactagcttgggtgggtgatgtgttcaccgcaacgcccgccgagcctagaccactaacctctccattgagacaagctgctgatgaggatgacaaaggaatgagatcagaaacacctcctgttccaccacccccaccctatctggcgagctatcccggcttccccgaaaatggcgctccaggaccacctatcagtcgctttcctctcgaggagccggggccaaggcctctcccctggcctcctggatcagacgaagtcgcaaagattcagacccccccacccaaaaaggaaccccccaaggaggaaacagcccagttgaccgggcctgaggccggacggaagccagcacgaggcgtcggttccggcggacaaggcccacctcctcctcgccgggaatcgaggaccgagacacggtggggaccccggcctggatcatctcggagggggattcctccagaggagccaggtgcgcctcctagacgcgctggcccaataaaaaaacctcccccacctacaaaggtagaagaactgcctccgaagccgttggagcagggcgacgagacgcccaagccgcctaagccagatcccctcaaaattaccaagggaaagctaggagggcccaaagagactcctcccaatggaaacctgagcccagctcctcgactgcgccgtgattacagctacgagcgcgtcggccccacttcctgcagggggagagggcgcggcgagtactttgctagaggaagaggctttaggggaacgtatggaggacgcggccggggcgctgccggaaatagcgctgtcactgagtcttttgaagagatgatgggcgtggaggtcgggcagggggatcagacgacgctgttgctgccagaggctgcgttaccggctaggcacggggcccgggtgcagtctatgcggaagagcccatctggtgcaggaagtggcgcacagaaacaagcagccagaccaatgcgggtcatctggctcctccagacccggcggctaccgcatccacgccgagagcattctcccaggtcgcggtcaccaactacgaggtctcctacctttccagcgcccgccagatttactcccggggtgggtgagagctcactgccagagggcatcagtcctggaccaagaaggagagagcctccgcaggtgtgtccagggtggagtcctccggcgaagagtctggcccctaagaaaccgccaacaggcccactgccgcccagcaaagaaccattgaaggagaagcttatccccggcccattgtcccccgtggcccgtgggggatcaaatggcggatcaaatgtgggaatggaagatggcgaaagaccacggcggaggcggcacgggcgggcacaacagcaagacaaaccccctcggttcaggcgcttaaagcaggaaagggaaaacgccgctcgcgggtcggagggcaagcccagcctgaccttacctgcctccgcccctggcccagaggaggccttgactacagtcactgtggcaccagctcctagaagagccgccgcaaagtcccctgacctgtccaaccagaatagcgaccaggcaaatgaagagtgggaaacagcctctgagagttctgatttcacgagcgaaaggcgcggtgacaaggaagcccctcctcccgtgttattgacccccaaagcggttgggacaccaggggggggcggagggggtgcagtgcccggcatctctgctatgtcacgcggagatttgagccagcgggcgaaggacttgagcaaacgttccttttcatctcaacgcccaggaatggaaagacaaaatcggcgccctggccccggtggcaaggcagggtcttctggctcctctagcggtgggggcggtggaggcccaggaggacgtaccggcccaggccgaggcgataagcgcagctggcctagccccaagaaccgttcgcggccacccgaagagagaccacctggtcttccattgcccccaccccctccgagttcaagcgccgtgtttaggctcgatcaggttatacattctaacccggctgggatacaacaggccctggcccagctcagcagccggcaaggatccgtgaccgctcccgggggacatccccgccataaaccagggcctccccaggcacctcagggcccctccccccgcccacctacgcgttacgagccccagcgcgtgaactctggactgtcctctgatccgcactttgaagaaccaggtccgatggttaggggggtggggggcacacctagagacagtgctggagtatcccctttccccccaaagcgcagagaacggcctcctagaaagcccgagttgctccaggaagagtcgttaccacccccgcacagctcaggctttctgggatctaagccggagggcccagggccccaagcagagagcagggatacaggtacagaggcgttaactccacatatatggaatcgccttcataccgccaccagccggaaaagttacagacccagttctatggagccatggatggagccactgagtccattcgaagatgtggctggtactgagatgtcccagagtgactccggtgttgatctatctggtgactcacaggtgtcatctggcccatgttctcagcgctcttcgccagacgggggccttaagggggcagcagaaggcccacctaagagaccagggggaagctcccccctcaacgccgtaccctgtgagggccctccagggtctgagcctccccgaagaccaccacctgctcctcacgatggcgaccgaaaagagctgcccagagaacagccacttcccccagggccaatcggcaccgagagatcccaacatacggaccgaggcaccgaacctggccctatccgccccagccatcggcccggtccacccgtccaatttgggacttctgataaagacagtgacctgcgcctcgtcgtgggtgactcactgaaggccgagaaggaactgaccgccagcgtaacagaggctattcctgtcagccgcgactgggaactcctgccctcggcggcagcttccgctgaacctcaaagcaaaaatctggacagtggccattgtgttcccgaaccctcctcttccgggcaaaggctttatcccgaggtgttctacggatctgcagggccctcttctagccaaatcagcggaggtcacggactttcagtgaccagcaagcaatggaggcgcccggggacgcccagtctgcacccttaccgtagccagcccctctacctaccacccggcccggccccaccaagtgccctgctctctggggtagccctcaaggggcagttcctggacttctcaaccatgcaggcaaccgagctgggaaagctgcccgctggaggtgtcctttatccacccccgagttttttgtatagccccgccttttgcccatcacccctgcctgacacctccctgctccaggtgaggcaggacctaccctccccatctgacttttacagcacccctctgcagcctgggggccagagcggcttcttgccgtcaggagcccccgctcaacagatgttacttcccatggtggatagccagctccctgtggttaattttggatctctgccaccggctccccctcctgcgcccccctcactgtccctcttgcccgtgggccctgccctacagcccccatcgctcgcagtccgacctcctcccgctccagcaacacgggttcttcctagtcctgctaggccgtttcccgcctctctcgggcgagccgaacttcaccctgttgagctgaaacccttccaggattaccaaaagctctctagcaacttgggaggtcctggcagctcacgcactcctcccacgggcaggtcattttctggactgaattcacggctgaaggccacaccaagtacgtactccggtgtgttccggactcaaagggttgacttataccagcaggcttctccccctgacgccctccggtggattcccaagccctgggagcgcaccggtccaccccctcgagaaggcccatcgcgaagggcagaggagcccgggagtcggggtgacaaagaaccaggtttacctccaccaagatag

SEQ ID NO: 344378 - DNA, 4149 bp, Artificial Sequence
  derived and/or modified sequence
atgctgcgtgaacgtggtacaccacctgtggaccctaagctcgcctgggttggcgacgtgtttaccgcgacgcctgccgagcctcggccactcacaagccccctgagacaagccgctgatgaggatgataaaggcatgcgatccgagaccccccctgtgcctcccccacctccttaccttgcgagctacccaggattccctgagaatggagcgcccgggccgccaattagccgattcccgctggaggaacctggcccacgccccttgccttggccacccggcagtgatgaagtcgccaagattcagactcctcctccgaagaaggagccaccaaaggaagaaaccgcccagctaacgggaccagaggctggccgcaagcctgcccgaggggtcggttctgggggacaaggacctccaccacctagaagagagagcaggacagagaccaggtggggtccaagacccggctcctctagaaggggcattcccccagaggagccaggcgccccaccgcgccgagctggacccattaaaaagccgccaccacctacaaaggtggaggagctgccgccgaagcctctggaacagggagacgagacacccaagcccccaaagcctgatcctctgaaaatcacaaaaggaaaactcgggggccccaaggagacgcctccgaatggcaacctttcacctgctccccgactcaggcgagactatagctacgaacgtgttgggcccacgagctgtcgcggtagaggtagaggtgagtactttgctcgtggacgggggttcagaggaacctacgggggtcggggcaggggtgcccgctctcgcgagtttcggtcctaccgggagttcaggggagatgatggaagaggagggggcaccggcggcccaaatcacccccctgctccccggggtcggacggcttcagaaaccagaagcgaaggaagcgagtatgaggagattcctaaacgccgccgccaaaggggatctgagactggttctgagacgcacgaaagtgacctggcgcctagtgacaaggaagcccctaccccaaaggaaggcacgctcacccaggtgccgctggcccccccaccccccggtgctccaccttcccctgctccagccaggttcacagctaggggtgggagagtctttaccccccgaggcgtgccttcacgcagggggagaggtgggggacgtcctcccccccaggtttgccccggatggtctcccccagctaaaagcctcgcccccaagaaacccccaaccggcccactgccgccaagcaaggaacccctgaaagaaaagctcatccccgggcctttatccccagtcgctcggggtggaagtaacggaggatcgaatgtgggtatggaggatggagagaggcccaggcgacggaggcacggaagagctcagcagcaggacaagccaccgcgatttcgaaggctgaagcaggagcgggagaatgccgcccgaggatccgaaggcaagccctcgctcaccctcccagcttccgcacccggccctgaagaggcactgactaccgtgaccgtcgctcccgcacccagacgcgctgccgcaaagtccccagatctgtccaatcagaacagcgaccaggcaaatgaggagtgggagactgccagtgagagctccgatttcaccagcgaaaggagaggcgataaggaagcccctccccccgtccttctgacacctaaggcagtcggcactccaggcggaggcggaggaggcgctgttccgggaataagcgcgatgagcagaggggacctgtctcagagagccaaggacctgagcaaacggagttttagcagccaacggccagggatggaaaggcaaaatcgacgccctgggccaggagggaaagctggcagttcaggttccagcagtgggggaggcggaggaggacctggcgggagaaccggacctggtcgaggtgacaaaaggtcatggcccagtcccaagaataggtctaggcctcctgaggaacggccccctgggctgcctttgccccctcctcccccttcttcctccgctgtcttcaggcttgatcaggttattcactccaaccctgctggaatacagcaggcgctagctcaattgtcatctaggcagggttcggtgactgctcctggagggcatcctaggcataaacccggcccaccacaggcccctcagggtccctccccaagaccgcccacacggtatgagcctcaaagagttaattccggcttaagcagcgatccacatttcgaggaacccggccctatggtccgcggagtgggaggcactcctagagatagcgctggggtgtctcctttcccccccaagcggcgagaaaggccaccacggaaaccagaattgctgcaagaggagagcctgcctccccctcacagctctggttttctcggtagcaagcccgagggccctggcccgcaggcagaaagtagggacaccggcaccgaggcccttacccctcatatctggaatcgactccacactgcgaccagtcgaaagagttacagaccatcatccatggaaccgtggatggaaccgttaagcccatttgaggatgtggcagggactgagatgtcacagtccgactctggggtggacctctccggcgactcacaggtatcctcagggccatgctctcagcgcagcagcccagatggcggacttaagggagccgccgagggcccccccaagcggcccggaggctcatcacctctgaatgcggttccatgcgaaggcccaccgggctctgagccgccgcgacggcccccgcccgctccccacgatggagatcgcaaagagcttcctagagagcagcccctgcccccaggccccataggcactgagcgcagccagcacacagacaggggaaccgagcccggccccattcgtccttctcatcggcccggcccacccgtccagttcgggacgtctgataaggatagcgatctccggctggtcgtgggcgattctttgaaggcggaaaaggagcttacagcttcagtcacggaagccattcccgtaagtcgggattgggaacttctccctagcgcggccgcctcagctgagccccagagtaaaaatcttgatagcggccattgtgtcccagagcccagctcaagcggccagcggctgtaccccgaggtgttctacggcagtgcggggccctcctcaagtcagatatccggcggggctatggacagccagttgcatcccaactctggaggttttcgcccagggaccccatctttgcacccttatagatcccagcccctgtacctaccacccggtcccgctcccccctcggccctgctttcaggcgtggccctgaaaggtcaatttttagacttcagtactatgcaggccaccgaattaggcaaactgccagccggcggggtgctctatcctcctcccagcttcctttacagcccagcattttgtccttccccattacctgatacttctctgctacaagttcggcaagacttaccatcaccttcagacttctattctacgccgctgcagcctggagggcagtcaggcttcctgccttcaggcgcacccgcccagcagatgctgctccccatggttgatagtcaactgccggtggtgaactttggcagccttcctccagctccaccccccgcaccgccatcgctttcgctcctgccagttggccctgcccttcagcctccctctctcgcagtacggcctcccccagcaccagccaccagagtgctgcccagccctgcccgtccattccctgcttcgcttggccgagcggagctgcaccctgttgaactgaagcccttccaggattaccagaaactttcctcgaacctgggaggtcctggctcctcacggacgccacccaccggcaggtccttttccggcctcaacagccgcctcaaagcaactccctccacgtacagtggggtgtttaggacacagcgggtggacttataccaacaggcttcccccccagacgccttgagatggatcccgaaaccatgggagaggactggtccccccccccgtgagggcccttcccggagagcagaagagcctggctctaggggcgataaagagccaggtcttccacccccacggtag

SEQ ID NO: 344379 - DNA, 6474 bp, Artificial Sequence
  derived and/or modified sequence
atgtctgacagaagtggccccacagccaagggcaaggatggcaagaagtacagcagcctgaacctgtttgacacctacaagggcaagagcctggagatccagaagccagctgtggcccccaggcatggcctgcagagcctgggcaaggtggccatcgcccggaggatgcctcctccagccaacctgcccagcctgaaggccgagaacaagggaaatgaccccaacgtgtccctggtgcccaaggatggcaccggctgggccagcaagcaggagcagagcgaccccaagagcagtgatgccagcacagcccagcccccagagagccagcccctgcctgccagccagaccccagccagcaaccagcccaagaggcctcctgctgcccctgagaacacccccctggtgcccagcggcgtgaagtcctgggcccaggcctctgtgacccatggagcccatggagatggcggccgggccagcagcctgctgagccgcttcagccgggaggagttccccaccctgcaggccgccggggaccaggacaaggccgccaaggagcgggagagcgctgagcagagcagcggccctggccccagcctgcggccccagaacagcaccacctggagagatggcggcggccggggcccagatgagctggagggccctgacagcaagctgcaccacggccatgacccccggggcggcctgcagcccagcggccccccccagttccccccctaccggggcatgatgccacccttcatgtacccaccctacctgcccttccccccaccctacggcccccagggcccctaccgctaccccaccccagatggccccagccgcttcccccgggtggccggcccccggggcagcggcccccccatgaggctggtggagcctgtgggccggcccagcatcctgaaggaggacaacctgaaggagtttgaccagctggaccaggagaatgatgatggctgggccggggcccacgaggaggtggactacacagagaagctgaagttcagtgatgaagaagatggccgggacagtgatgaggagggcgctgagggccaccgggacagccagagcgccagcggggaggagcggcccccagaggctgatggcaagaagggcaacagccccaacagcgagccccccacccccaagacagcctgggccgagaccagccggcccccagagacagagcccggccccccagcccccaagccacccctgcccccaccccaccggggccctgctggcaactggggccccccaggggactacccagacagaggaggccccccctgcaagcccccagccccagaagatgaagatgaggcctggaggcagaggaggaagcagagcagcagcgagatcagcctggccgtggagcgggccaggagaagaagagaggaggaggagaggaggatgcaggaggagcggcgggccgcctgtgccgagaagctgaagaggctggatgagaagtttggagccccagacaagaggctgaaggccgagcctgctgcccctcctgctgcccccagcaccccagcccctcctcctgctgtgcccaaggagctgcctgcccccccagcccctcctccagccagcgcccccaccccagagaaggagcctgaggagcccgcccaggcccccccagcccagagcacccccaccccaggagtggccgccgcccccaccctggtgtctgggggcggcagcaccagcagcaccagcagcggcagctttgaggccagccctgtggagccccagctgcccagcaaggagggccctgagcccccagaggaggtgcccccacccaccaccccacctgtgcccaaggtggagcccaagggagatggcatcggccccacccggcagccccccagccagggcctgggctaccccaagtaccagaagagcctgcccccacgcttccagaggcagcagcaggagcagctgctgaagcagcagcagcagcaccagtggcagcagcaccagcagggcagcgccccacccacccctgtgccccccagccccccccagcctgtgaccctgggcgctgtgcctgccccccaggcccctcctcctccacccaaggccctgtacccaggggccctgggccggcccccacccatgccacccatgaactttgacccccgctggatgatgatccccccctacgtggacccccggctgctgcagggccggccccccctggacttctacccacctggggtgcaccccagcggcctggtgccccgggagaggagtgacagcggcggcagcagcagcgagccctttgacagacatgccccagccatgctgcgggagcggggcaccccacctgtggaccccaagctggcctgggtgggagatgtgttcaccgccaccccagctgagccccggcccctgaccagccccctgcggcaggccgcagatgaagatgacaagggcatgaggtctgagaccccacctgtgcccccacctccaccctacctggccagctacccaggcttcccagaaaatggagcccctggcccccccatcagccgcttccccctggaggagcccggcccccggcccctgccctggcccccaggcagtgatgaggtggccaagatccagaccccaccacccaagaaggagccccccaaggaggagacagcccagctgaccggccctgaggccggcaggaagccagcccggggcgtgggcagcggcggccagggccccccacctccaagaagagagagcaggacagagacccgctggggcccccggcccggcagcagccggcggggcatccccccagaggagcccggggcccccccaagaagagctggccccatcaagaagcccccaccacccaccaaggtggaggagctgccccccaagcccctggagcagggagatgagacccccaagccacccaagccagaccccctgaagatcaccaagggcaagctgggcggccccaaggagaccccacccaacggcaacctgagccctgccccccggctgcggcgggactacagctatgagcgggtgggccccaccagctgccggggccggggccgcggggagtactttgcccggggccggggcttccggggcacctacggcggccggggccgcggggcccggagccgggagttccgcagctaccgggagttcagaggagatgatggccggggcggcggcaccggcggccccaaccaccccccagccccccggggccgcacagccagcgagaccaggtctgagggctctgaatatgaggagatccccaagagaagacggcagaggggcagcgagaccggcagcgagacccatgaaagtgacctggcccccagcgacaaggaggcccccacccccaaggagggcaccctgacccaggtgcccctggcccctcctcctcctggggccccacccagccctgccccagcccgcttcaccgcccggggcggccgggtcttcaccccccggggcgtgcccagcagaagaggccggggcggcggccggcccccaccccaggtgtgccccggctggagccccccagccaagagcctggcccccaagaagcccccaacaggccccctgccccccagcaaggagcccctgaaggagaagctgatccctggccccctgagccctgtggcccggggcggcagcaatggaggcagcaatgtgggcatggaggatggagagcggcccaggagaagaagacatggccgggcccagcagcaggacaagccaccccgcttccggcggctgaagcaggagagagaaaatgctgcccggggcagcgagggcaagcccagcctgaccctgcctgccagcgcccctggccctgaggaggccctgaccaccgtgacagtggccccagccccccggcgggctgctgccaagagcccagacctgagcaaccagaacagcgaccaggccaatgaggagtgggagacagccagcgagagcagtgacttcaccagcgagcggcggggggacaaggaggcccctcctcctgtgctgctgacccccaaggctgtgggcacccctgggggcggcggcggcggcgctgtgcccggcatcagcgccatgagcagaggagacctgagccagagggccaaggacctgagcaagaggagcttcagcagccagaggcctggcatggagcggcagaacagaagacctggccctgggggcaaggccggcagcagcggcagcagcagcggcggcggcggcggcggccctgggggccgcactggacctggccgcggggacaagaggtcctggcccagccccaagaacagaagccggcccccagaggagaggcctcctggcctgcccctgcccccacctccacccagcagcagcgctgtgttccggctggaccaggtgatccacagcaacccagctggcatccagcaggccctggcccagctgagcagccggcagggctctgtgacagcccctgggggccaccccaggcacaagccaggccccccccaggccccccagggccccagcccccggccccccaccaggtatgagccccagagggtgaacagcggcctgagcagtgacccccactttgaggagcccggccccatggtgcggggcgtgggcggcaccccccgggacagcgctggggtgagccccttcccccccaagaggcgggagcggccccccaggaagccagagctgctgcaggaggagagcctgcccccaccccacagcagcggcttcctgggcagcaagccagagggccctggcccccaggccgagagccgggacacaggaacagaggccctgaccccccacatctggaaccggctgcacacagccaccagcaggaagagctaccggcccagctccatggagccctggatggagcccctgagcccctttgaagatgtggccggcacagagatgagccagagcgacagcggcgtggacctgagcggggacagccaggtgagcagcggcccctgcagccagaggagcagcccagatggcggcctgaagggagctgctgagggcccccccaagaggcctgggggcagcagccccctgaatgctgtgccctgtgagggccccccaggcagcgagcccccccggcggcccccaccagcccctcatgatggagacaggaaggagctgccccgggagcagcccctgcccccaggccccatcggcacagagaggagccagcacacagaccggggcacagagcccggccccatccggcccagccaccggcccggcccccctgtgcagtttggcaccagtgacaaggacagcgacctgcggctggtggtgggggacagcctgaaggccgagaaggagctgacagcctctgtgacagaggccatccctgtgtcccgggactgggagctgctgcccagcgctgctgccagcgctgagccccagagcaagaacctggacagcggccactgtgtgcctgagcccagcagcagcggccagaggctgtacccagaggtgttctacggcagcgctggccccagcagcagccagatctctggaggagccatggacagccagctgcaccccaacagcggcggcttccggcccggcacccccagcctgcacccctaccgcagccagcccctgtacctgcccccaggccctgcccctccttctgccctgctgtctggagtggccctgaagggccagttcctggacttcagcaccatgcaggccacagagctgggcaagctgcctgctggaggagtgctgtaccccccacccagcttcctgtacagccctgccttctgccccagccccctgcctgacaccagcctgctgcaggtgcggcaggacctgcccagccccagcgacttctacagcacccccctgcagcccggcggccagagcggcttcctgcccagcggggccccagcccagcagatgctgctgcccatggtggacagccagctgcctgtggtgaactttggcagcctgcccccagcccctcctccagccccacccagcctgagcctgctgcctgtgggccctgccctgcagccccccagcctggccgtgcggcccccaccagccccagccaccagggtgctgcccagccctgcccggcccttccctgccagcctgggccgggcagagctgcaccctgtggagctgaagcccttccaggactaccagaagctgagcagcaacctgggcggccctggcagcagcaggaccccacccaccggccgctccttcagcggcctgaacagccggctgaaggccacccccagcacctacagcggggtcttccgcacccagagggtggacctgtaccagcaggccagccccccagatgccctgcgctggatccccaagccctgggagaggacaggccccccaccccgggagggccccagccggcgggcagaggagcccggcagcagaggagacaaggagcccggcctgcccccaccaagatag

SEQ ID NO: 344380 - DNA, 6417 bp, Artificial Sequence
  derived and/or modified sequence
atgtctgacagaagtggccccacagccaagggcaaggatggcaagaagtacagcagcctgaacctgtttgacacctacaagggcaagagcctggagatccagaagccagctgtggcccccaggcatggcctgcagagcctgggcaaggtggccatcgcccggaggatgcctcctccagccaacctgcccagcctgaaggccgagaacaagggaaatgaccccaacgtgtccctggtgcccaaggatggcaccggctgggccagcaagcaggagcagagcgaccccaagagcagtgatgccagcacagcccagcccccagagagccagcccctgcctgccagccagaccccagccagcaaccagcccaagaggcctcctgctgcccctgagaacacccccctggtgcccagcggcgtgaagtcctgggcccaggcctctgtgacccatggagcccatggagatggcggccgggccagcagcctgctgagccgcttcagccgggaggagttccccaccctgcaggccgccggggaccaggacaaggccgccaaggagcgggagagcgctgagcagagcagcggccctggccccagcctgcggccccagaacagcaccacctggagagatggcggcggccggggcccagatgagctggagggccctgacagcaagctgcaccacggccatgacccccggggcggcctgcagcccagcggccccccccagttccccccctaccggggcatgatgccacccttcatgtacccaccctacctgcccttccccccaccctacggcccccagggcccctaccgctaccccaccccagatggccccagccgcttcccccgggtggccggcccccggggcagcggcccccccatgaggctggtggagcctgtgggccggcccagcatcctgaaggaggacaacctgaaggagtttgaccagctggaccaggagaatgatgatggctgggccggggcccacgaggaggtggactacacagagaagctgaagttcagtgatgaagaagatggccgggacagtgatgaggagggcgctgagggccaccgggacagccagagcgccagcggggaggagcggcccccagaggctgatggcaagaagggcaacagccccaacagcgagccccccacccccaagacagcctgggccgagaccagccggcccccagagacagagcccggccccccagcccccaagccacccctgcccccacctggggactacccagaccggggcggccccccctgcaagcccccagccccagaagatgaagatgaggcctggaggcagaggaggaagcagagcagcagcgagatcagcctggccgtggagcgggccaggagaagaagagaggaggaggagaggaggatgcaggaggagaggagagctgcctgtgccgagaagctgaagaggctggatgagaagtttggagccccagacaagaggctgaaggccgagcctgctgcccccccagctgcccccagcaccccagcccctcctcctgctgtgcccaaggagctgcctgcccccccagcccctcctccagccagcgcccccaccccagagaaggagcctgaggagcccgcccaggcccccccagcccagagcacccccaccccaggagtggccgccgcccccaccctggtgtctgggggcggcagcaccagcagcaccagcagcggcagctttgaggccagccctgtggagccccagctgcccagcaaggagggccctgagcccccagaggaggtgcccccacccaccaccccacctgtgcccaaggtggagcccaagggagatggcatcggccccacccggcagccccccagccagggcctgggctaccccaagtaccagaagagcctgcccccacgcttccagaggcagcagcaggagcagctgctgaagcagcagcagcagcaccagtggcagcagcaccagcagggcagcgccccacccacccctgtgccccccagccccccccagcctgtgaccctgggcgctgtgcctgccccccaggcccctcctcctccacccaaggccctgtacccaggggccctgggccggcccccacccatgccacccatgaactttgacccccgctggatgatgatccccccctacgtggacccccggctgctgcagggccggccccccctggacttctacccacctggggtgcaccccagcggcctggtgccccgggagaggagtgacagcggcggcagcagcagcgagccctttgacagacatgccccagccatgctgcgggagcggggcaccccacctgtggaccccaagctggcctgggtgggagatgtgttcaccgccaccccagctgagccccggcccctgaccagccccctgcggcaggccgcagatgaagatgacaagggcatgaggtctgagaccccacctgtgcccccacctccaccctacctggccagctacccaggcttcccagaaaatggagcccctggcccccccatcagccgcttccccctggaggagcccggcccccggcccctgccctggcccccaggcagtgatgaggtggccaagatccagaccccaccacccaagaaggagccccccaaggaggagacagcccagctgactggacctgaggccggcaggaagccagcccggggcgtgggcagcggcggccagggccccccaccaccccggcgggagagcaggacagagacccgctggggccccaggcctggcagcagcagaagaggcatccccccagaggagcccggggccccaccccggcgggccggccccatcaagaagcccccaccacccaccaaggtggaggagctgccccccaagcccctggagcagggagatgagacccccaagccacccaagccagaccccctgaagatcaccaagggcaagctgggcggccccaaggagaccccaccaaatggaaacctgagccctgccccccggctgcggcgggactacagctatgaaagagtgggccccaccagctgccggggccggggccgcggggagtactttgcccggggccggggcttccggggcacctatggaggccggggccgcggggctgctggcaacagcgctgtgacagagagctttgaggagatgatgggcgtggaggtgggccagggcgaccagaccaccctgctgctgcctgaggccgccctgcctgcccggcatggagcccgggtgcagagcatgaggaagagccccagcggggccggcagcggggcccagaagcaggccgcccggcccatgagggtcatctggctgctgcagacccggcggctgccccacccccggcgggagcacagccccaggagccgcagccccaccaccaggagccccaccttccctgccccagcccgcttcaccccaggagtgggggagagcagcctgcctgagggcatcagccctggcccccggcggcgggagcccccccaggtgtgccccggctggagccccccagccaagagcctggcccccaagaagccacccaccggccccctgccccccagcaaggagcccctgaaggagaagctgatccctggccccctgagccctgtggcccggggcggcagcaatggaggcagcaatgtgggcatggaggatggagagcggcccaggagaagaagacatggccgggcccagcagcaggacaagcccccacgcttccggcggctgaagcaggagcgggagaatgctgcccggggcagcgagggcaagcccagcctgaccctgcctgccagcgcccctggccctgaggaggccctgaccaccgtgacagtggccccagcccccaggagagctgctgccaagagcccagacctgagcaaccagaacagcgaccaggccaatgaggagtgggagacagccagcgagagcagtgacttcaccagcgagaggagaggagacaaggaggcccctcctcctgtgctgctgacccccaaggctgtgggcaccccaggcggcggcggcggcggcgctgtgcccggcatcagcgccatgagcagaggagacctgagccagagggccaaggacctgagcaagaggagcttcagcagccagaggcctggcatggagcggcagaacagaagacctggccctgggggcaaggccggcagcagcggcagcagcagcggcggcggcggcggcggccctgggggccgcacaggccctggccgcggggacaagaggtcctggcccagccccaagaacagaagcaggcctcctgaggagcggcccccaggcctgcccctgcccccacctccacccagcagcagcgctgtgttccggctggaccaggtgatccacagcaacccagctggcatccagcaggccctggcccagctgagcagccggcagggctctgtgacagcccctgggggccaccccaggcacaagccaggccccccccaggccccccagggccccagccccaggcctcccaccaggtatgagccccagagggtgaacagcggcctgagcagtgacccccactttgaggagcccggccccatggtgcggggcgtgggcggcaccccccgggacagcgctggggtgagccccttcccccccaagagaagagagaggcctcccaggaagccagagctgctgcaggaggagagcctgcccccaccccacagcagcggcttcctgggcagcaagccagagggccctggcccccaggccgagagccgggacaccggcacagaggccctgaccccccacatctggaaccggctgcacacagccaccagcaggaagagctaccggcccagctccatggagccctggatggagcccctgagcccctttgaagatgtggccggcacagagatgagccagagcgacagcggcgtggacctgagcggggacagccaggtgagcagcggcccctgcagccagaggagcagcccagatggcggcctgaagggagctgctgagggcccccccaagaggcctgggggcagcagccccctgaatgctgtgccctgtgagggccccccaggcagcgagcccccaagaagacctcctccagcccctcatgatggagacaggaaggagctgccccgggagcagcccctgcccccaggccccatcggcacagagaggagccagcacacagaccggggcacagagcccggccccatccggcccagccacaggcctggcccccctgtgcagtttggcaccagtgacaaggacagcgacctgcggctggtggtgggggacagcctgaaggccgagaaggagctgacagcctctgtgacagaggccatccctgtgtcccgggactgggagctgctgcccagcgctgctgccagcgctgagccccagagcaagaacctggacagcggccactgtgtgcctgagcccagcagcagcggccagaggctgtacccagaggtgttctacggcagcgctggccccagcagcagccagatcagcggcggccacggcctgtctgtgaccagcaagcagtggaggaggcctggcacccccagcctgcacccctaccgcagccagcccctgtacctgcccccaggccctgccccacccagcgccctgctgagcggcgtggccctgaagggccagttcctggacttcagcaccatgcaggccacagagctgggcaagctgcctgctgggggcgtgctgtacccacctccttccttcctgtacagccctgccttctgccccagccccctgcctgacaccagcctgctgcaggtgcggcaggacctgcccagccccagcgacttctacagcacccccctgcagcccggcggccagagcggcttcctgcccagcggggccccagcccagcagatgctgctgcccatggtggacagccagctgcctgtggtgaactttggcagcctgcccccagcccctcctccagccccacccagcctgagcctgctgcctgtgggccctgccctgcagccccccagcctggccgtgcggcccccaccagccccagccaccagggtgctgcccagccctgcccggcccttccctgccagcctgggccgggcagagctgcaccctgtggagctgaagcccttccaggactaccagaagctgagcagcaacctgggcggccctggcagcagcaggaccccacccaccggccgctccttcagcggcctgaacagccggctgaaggccacccccagcacctacagcggggtcttccgcacccagagggtggacctgtaccagcaggccagccccccagatgccctgcgctggatccccaagccctgggagaggactggacctccaccccgggagggccccagcagaagagctgaggagcccggcagcagaggagacaaggagcccggcctgcccccacccaggtag

SEQ ID NO: 344381 - DNA, 6450 bp, Artificial Sequence
  derived and/or modified sequence
atgtctgacagaagtggccccacagccaagggcaaggatggcaagaagtacagcagcctgaacctgtttgacacctacaagggcaagagcctggagatccagaagccagctgtggcccccaggcatggcctgcagagcctgggcaaggtggccatcgcccggaggatgcctcctccagccaacctgcccagcctgaaggccgagaacaagggaaatgaccccaacgtgtccctggtgcccaaggatggcaccggctgggccagcaagcaggagcagagcgaccccaagagcagtgatgccagcacagcccagcccccagagagccagcccctgcctgccagccagaccccagccagcaaccagcccaagaggcctcctgctgcccctgagaacacccccctggtgcccagcggcgtgaagtcctgggcccaggcctctgtgacccatggagcccatggagatggcggccgggccagcagcctgctgagccgcttcagccgggaggagttccccaccctgcaggccgccggggaccaggacaaggccgccaaggagcgggagagcgctgagcagagcagcggccctggccccagcctgcggccccagaacagcaccacctggagagatggcggcggccggggcccagatgagctggagggccctgacagcaagctgcaccacggccatgacccccggggcggcctgcagcccagcggccccccccagttccccccctaccggggcatgatgccacccttcatgtacccaccctacctgcccttccccccaccctacggcccccagggcccctaccgctaccccaccccagatggccccagccgcttcccccgggtggccggcccccggggcagcggcccccccatgaggctggtggagcctgtgggccggcccagcatcctgaaggaggacaacctgaaggagtttgaccagctggaccaggagaatgatgatggctgggccggggcccacgaggaggtggactacacagagaagctgaagttcagtgatgaagaagatggccgggacagtgatgaggagggcgctgagggccaccgggacagccagagcgccagcggggaggagcggcccccagaggctgatggcaagaagggcaacagccccaacagcgagccccccacccccaagacagcctgggccgagaccagccggcccccagagacagagcccggccccccagcccccaagccacccctgcccccaccccaccggggccctgctggcaactggggccccccaggggactacccagacagaggaggccccccctgcaagcccccagccccagaagatgaagatgaggcctggaggcagaggaggaagcagagcagcagcgagatcagcctggccgtggagcgggccaggagaagaagagaggaggaggagaggaggatgcaggaggagcggcgggccgcctgtgccgagaagctgaagaggctggatgagaagtttggagccccagacaagaggctgaaggccgagcctgctgcccctcctgctgcccccagcaccccagcccctcctcctgctgtgcccaaggagctgcctgcccccccagcccctcctccagccagcgcccccaccccagagaaggagcctgaggagcccgcccaggcccccccagcccagagcacccccaccccaggagtggccgccgcccccaccctggtgtctgggggcggcagcaccagcagcaccagcagcggcagctttgaggccagccctgtggagccccagctgcccagcaaggagggccctgagcccccagaggaggtgcccccacccaccaccccacctgtgcccaaggtggagcccaagggagatggcatcggccccacccggcagccccccagccagggcctgggctaccccaagtaccagaagagcctgcccccacgcttccagaggcagcagcaggagcagctgctgaagcagcagcagcagcaccagtggcagcagcaccagcagggcagcgccccacccacccctgtgccccccagccccccccagcctgtgaccctgggcgctgtgcctgccccccaggcccctcctcctccacccaaggccctgtacccaggggccctgggccggcccccacccatgccacccatgaactttgacccccgctggatgatgatccccccctacgtggacccccggctgctgcagggccggccccccctggacttctacccacctggggtgcaccccagcggcctggtgccccgggagaggagtgacagcggcggcagcagcagcgagccctttgacagacatgccccagccatgctgcgggagcggggcaccccacctgtggaccccaagctggcctgggtgggagatgtgttcaccgccaccccagctgagccccggcccctgaccagccccctgcggcaggccgcagatgaagatgacaagggcatgaggtctgagaccccacctgtgcccccacctccaccctacctggccagctacccaggcttcccagaaaatggagcccctggcccccccatcagccgcttccccctggaggagcccggcccccggcccctgccctggcccccaggcagtgatgaggtggccaagatccagaccccaccacccaagaaggagccccccaaggaggagacagcccagctgaccggccctgaggccggcaggaagccagcccggggcgtgggcagcggcggccagggccccccacctccaagaagagagagcaggacagagacccgctggggcccccggcccggcagcagccggcggggcatccccccagaggagcccggggcccccccaagaagagctggccccatcaagaagcccccaccacccaccaaggtggaggagctgccccccaagcccctggagcagggagatgagacccccaagccacccaagccagaccccctgaagatcaccaagggcaagctgggcggccccaaggagaccccacccaacggcaacctgagccctgccccccggctgcggcgggactacagctatgagcgggtgggccccaccagctgccggggccggggccgcggggagtactttgcccggggccggggcttccggggcacctacggcggccggggcagaggagctgctggcaacagcgctgtgacagagagctttgaggagatgatgggcgtggaggtgggccagggcgaccagaccaccctgctgctgcctgaggccgccctgcctgcccggcacggggcccgggtgcagagcatgaggaagagccccagcggggccggcagcggggcccagaagcaggccgcccggcccatgagggtcatctggctgctgcagacccggcggctgccccacccccggcgggagcacagccccaggagccgcagccccaccaccaggagccccaccttccctgccccagcccgcttcaccccaggagtgggggagagcagcctgcctgagggcatcagccctggccccaggagaagagagcccccccaggtgtgccccggctggagccccccagccaagagcctggcccccaagaagcccccaacaggccccctgccccccagcaaggagcccctgaaggagaagctgatccctggccccctgagccctgtggcccggggcggcagcaatggaggcagcaatgtgggcatggaggatggagagcggcccaggagaagaagacatggccgggcccagcagcaggacaagccaccccgcttccggcggctgaagcaggagagagaaaatgctgcccggggcagcgagggcaagcccagcctgaccctgcctgccagcgcccctggccctgaggaggccctgaccaccgtgacagtggccccagccccccggcgggctgctgccaagagcccagacctgagcaaccagaacagcgaccaggccaatgaggagtgggagacagccagcgagagcagtgacttcaccagcgagcggcggggggacaaggaggcccctcctcctgtgctgctgacccccaaggctgtgggcacccctgggggcggcggcggcggcgctgtgcccggcatcagcgccatgagcagaggagacctgagccagagggccaaggacctgagcaagaggagcttcagcagccagaggcctggcatggagcggcagaacagaagacctggccctgggggcaaggccggcagcagcggcagcagcagcggcggcggcggcggcggccctgggggccgcactggacctggccgcggggacaagaggtcctggcccagccccaagaacagaagccggcccccagaggagaggcctcctggcctgcccctgcccccacctccacccagcagcagcgctgtgttccggctggaccaggtgatccacagcaacccagctggcatccagcaggccctggcccagctgagcagccggcagggctctgtgacagcccctgggggccaccccaggcacaagccaggccccccccaggccccccagggccccagcccccggccccccaccaggtatgagccccagagggtgaacagcggcctgagcagtgacccccactttgaggagcccggccccatggtgcggggcgtgggcggcaccccccgggacagcgctggggtgagccccttcccccccaagaggcgggagcggccccccaggaagccagagctgctgcaggaggagagcctgcccccaccccacagcagcggcttcctgggcagcaagccagagggccctggcccccaggccgagagccgggacacaggaacagaggccctgaccccccacatctggaaccggctgcacacagccaccagcaggaagagctaccggcccagctccatggagccctggatggagcccctgagcccctttgaagatgtggccggcacagagatgagccagagcgacagcggcgtggacctgagcggggacagccaggtgagcagcggcccctgcagccagaggagcagcccagatggcggcctgaagggagctgctgagggcccccccaagaggcctgggggcagcagccccctgaatgctgtgccctgtgagggccccccaggcagcgagcccccccggcggcccccaccagcccctcatgatggagacaggaaggagctgccccgggagcagcccctgcccccaggccccatcggcacagagaggagccagcacacagaccggggcacagagcccggccccatccggcccagccaccggcccggcccccctgtgcagtttggcaccagtgacaaggacagcgacctgcggctggtggtgggggacagcctgaaggccgagaaggagctgacagcctctgtgacagaggccatccctgtgtcccgggactgggagctgctgcccagcgctgctgccagcgctgagccccagagcaagaacctggacagcggccactgtgtgcctgagcccagcagcagcggccagaggctgtacccagaggtgttctacggcagcgctggccccagcagcagccagatcagcggcggccacggcctgtctgtgaccagcaagcagtggaggcggcccggcacccccagcctgcacccctaccgcagccagcccctgtacctgcccccaggccctgcccctccttctgccctgctgtctggagtggccctgaagggccagttcctggacttcagcaccatgcaggccacagagctgggcaagctgcctgctggaggagtgctgtaccccccacccagcttcctgtacagccctgccttctgccccagccccctgcctgacaccagcctgctgcaggtgcggcaggacctgcccagccccagcgacttctacagcacccccctgcagcccggcggccagagcggcttcctgcccagcggggccccagcccagcagatgctgctgcccatggtggacagccagctgcctgtggtgaactttggcagcctgcccccagcccctcctccagccccacccagcctgagcctgctgcctgtgggccctgccctgcagccccccagcctggccgtgcggcccccaccagccccagccaccagggtgctgcccagccctgcccggcccttccctgccagcctgggccgggcagagctgcaccctgtggagctgaagcccttccaggactaccagaagctgagcagcaacctgggcggccctggcagcagcaggaccccacccaccggccgctccttcagcggcctgaacagccggctgaaggccacccccagcacctacagcggggtcttccgcacccagagggtggacctgtaccagcaggccagccccccagatgccctgcgctggatccccaagccctgggagaggacaggccccccaccccgggagggccccagccggcgggcagaggagcccggcagcagaggagacaaggagcccggcctgcccccaccaagatag

SEQ ID NO: 344382 - DNA, 4149 bp, Artificial Sequence
  derived and/or modified sequence
atgctgcgggagcggggcaccccacctgtggaccccaagctggcctgggtgggagatgtgttcaccgccaccccagctgagccccggcccctgaccagccccctgcggcaggccgcagatgaagatgacaagggcatgaggtctgagaccccacctgtgcccccacctccaccctacctggccagctacccaggcttcccagaaaatggagcccctggcccccccatcagccgcttccccctggaggagcccggcccccggcccctgccctggcccccaggcagtgatgaggtggccaagatccagaccccaccacccaagaaggagccccccaaggaggagacagcccagctgactggacctgaggccggcaggaagccagcccggggcgtgggcagcggcggccagggccccccaccaccccggcgggagagcaggacagagacccgctggggccccaggcctggcagcagcagaagaggcatccccccagaggagcccggggccccaccccggcgggccggccccatcaagaagcccccaccacccaccaaggtggaggagctgccccccaagcccctggagcagggagatgagacccccaagccacccaagccagaccccctgaagatcaccaagggcaagctgggcggccccaaggagaccccaccaaatggaaacctgagccctgccccccggctgcggcgggactacagctatgaaagagtgggccccaccagctgccggggccggggccgcggggagtactttgcccggggccggggcttccggggcacctatggaggccggggccgcggggcccggagccgggagttccgcagctaccgggagttcagaggagatgatggccggggcggcggcactggaggccccaaccaccccccagccccccggggccgcacagccagcgagaccaggtctgagggctctgaatatgaggagatccccaagagaagacggcagaggggcagcgagactggaagtgagacccatgaaagtgacctggcccccagcgacaaggaggcccccacccccaaggagggcaccctgacccaggtgcccctggcccctcctcctcctggggccccacccagccctgccccagcccgcttcaccgcccggggcggccgggtcttcaccccccggggcgtgcccagccggcggggccggggcggcggccggcccccaccccaggtgtgccccggctggagccccccagccaagagcctggcccccaagaagccacccaccggccccctgccccccagcaaggagcccctgaaggagaagctgatccctggccccctgagccctgtggcccggggcggcagcaatggaggcagcaatgtgggcatggaggatggagagcggcccaggagaagaagacatggccgggcccagcagcaggacaagcccccacgcttccggcggctgaagcaggagcgggagaatgctgcccggggcagcgagggcaagcccagcctgaccctgcctgccagcgcccctggccctgaggaggccctgaccaccgtgacagtggccccagcccccaggagagctgctgccaagagcccagacctgagcaaccagaacagcgaccaggccaatgaggagtgggagacagccagcgagagcagtgacttcaccagcgagaggagaggagacaaggaggcccctcctcctgtgctgctgacccccaaggctgtgggcaccccaggcggcggcggcggcggcgctgtgcccggcatcagcgccatgagcagaggagacctgagccagagggccaaggacctgagcaagaggagcttcagcagccagaggcctggcatggagcggcagaacagaagacctggccctgggggcaaggccggcagcagcggcagcagcagcggcggcggcggcggcggccctgggggccgcacaggccctggccgcggggacaagaggtcctggcccagccccaagaacagaagcaggcctcctgaggagcggcccccaggcctgcccctgcccccacctccacccagcagcagcgctgtgttccggctggaccaggtgatccacagcaacccagctggcatccagcaggccctggcccagctgagcagccggcagggctctgtgacagcccctgggggccaccccaggcacaagccaggccccccccaggccccccagggccccagccccaggcctcccaccaggtatgagccccagagggtgaacagcggcctgagcagtgacccccactttgaggagcccggccccatggtgcggggcgtgggcggcaccccccgggacagcgctggggtgagccccttcccccccaagagaagagagaggcctcccaggaagccagagctgctgcaggaggagagcctgcccccaccccacagcagcggcttcctgggcagcaagccagagggccctggcccccaggccgagagccgggacaccggcacagaggccctgaccccccacatctggaaccggctgcacacagccaccagcaggaagagctaccggcccagctccatggagccctggatggagcccctgagcccctttgaagatgtggccggcacagagatgagccagagcgacagcggcgtggacctgagcggggacagccaggtgagcagcggcccctgcagccagaggagcagcccagatggcggcctgaagggagctgctgagggcccccccaagaggcctgggggcagcagccccctgaatgctgtgccctgtgagggccccccaggcagcgagcccccaagaagacctcctccagcccctcatgatggagacaggaaggagctgccccgggagcagcccctgcccccaggccccatcggcacagagaggagccagcacacagaccggggcacagagcccggccccatccggcccagccacaggcctggcccccctgtgcagtttggcaccagtgacaaggacagcgacctgcggctggtggtgggggacagcctgaaggccgagaaggagctgacagcctctgtgacagaggccatccctgtgtcccgggactgggagctgctgcccagcgctgctgccagcgctgagccccagagcaagaacctggacagcggccactgtgtgcctgagcccagcagcagcggccagaggctgtacccagaggtgttctacggcagcgctggccccagcagcagccagatcagcggcggggccatggacagccagctgcaccccaacagcggcggcttccggcccggcacccccagcctgcacccctaccgcagccagcccctgtacctgcccccaggccctgccccacccagcgccctgctgagcggcgtggccctgaagggccagttcctggacttcagcaccatgcaggccacagagctgggcaagctgcctgctgggggcgtgctgtacccacctccttccttcctgtacagccctgccttctgccccagccccctgcctgacaccagcctgctgcaggtgcggcaggacctgcccagccccagcgacttctacagcacccccctgcagcccggcggccagagcggcttcctgcccagcggggccccagcccagcagatgctgctgcccatggtggacagccagctgcctgtggtgaactttggcagcctgcccccagcccctcctccagccccacccagcctgagcctgctgcctgtgggccctgccctgcagccccccagcctggccgtgcggcccccaccagccccagccaccagggtgctgcccagccctgcccggcccttccctgccagcctgggccgggcagagctgcaccctgtggagctgaagcccttccaggactaccagaagctgagcagcaacctgggcggccctggcagcagcaggaccccacccaccggccgctccttcagcggcctgaacagccggctgaaggccacccccagcacctacagcggggtcttccgcacccagagggtggacctgtaccagcaggccagccccccagatgccctgcgctggatccccaagccctgggagaggactggacctccaccccgggagggccccagcagaagagctgaggagcccggcagcagaggagacaaggagcccggcctgcccccacccaggtag

SEQ ID NO: 344383 - DNA, 6474 bp, Artificial Sequence
  derived and/or modified sequence
atgagcgaccggagcggccccaccgccaagggcaaggacggcaagaaatattcaagcctcaatctgtttgatacatacaagggcaagtcactggagatccagaaaccggcagtggccccaagacatggactgcagtccttggggaaagtcgccatcgcaaggcggatgccaccgccagccaatctacccagcctcaaagctgagaacaaaggtaatgatcctaatgtctcactggtgccaaaggatggaaccggttgggcaagtaaacaggaacagtcagaccctaagtcatctgatgcttccactgcccagccccctgaatcgcagccactccccgcctcacagacacccgccagcaatcagcctaagcgccctcccgccgcccctgaaaatacacccttggtgcccagtggcgtcaaatcctgggctcaagcctcggtcacacacggtgcccatggcgatggtggacgggctagctctctgctatccagattttccagagaggaatttccgaccctgcaggcagccggcgaccaggataaggccgcaaaagagcgagaatcagccgagcagtctagcggccctggaccgtccctaaggccccagaactccactacctggcgggatggcggaggtcggggccctgacgaactagagggccccgatagcaaactccaccatgggcatgacccccgaggtggactgcagccaagcggccccccacaatttcccccgtaccgcggaatgatgcctcctttcatgtaccctccgtatttgccatttcctcccccgtatgggcctcagggtccatataggtaccccactccggacgggcccagccgctttccgcgcgtggctgggccaagggggtctggaccaccaatgaggctggtagaaccggtggggcggcctagcattctgaaagaggacaacctgaaagagtttgaccagctggaccaggagaatgatgacgggtgggcaggagctcacgaagaggttgattacactgagaagctgaaatttagcgatgaagaagatggccgtgatagcgatgaggaaggagccgagggccatagggattcccaaagcgcttccggcgaagagcgtccacctgaggcggatgggaagaaagggaacagtccaaacagtgagcctccaactccaaaaacagcctgggcagaaacaagcaggccaccggaaaccgagccaggacccccagcacctaagcccccactaccaccccctcacagggggcccgctggaaattgggggcctccgggggattaccccgatcgcggtggaccgccttgcaagccacccgcccccgaggacgaggacgaagcttggagacaacgtagaaagcagagcagcagcgagataagcctggcggtagagcgtgccaggagacgacgggaggaggaggaaaggcgcatgcaggaggaacgcagggccgcatgcgctgagaagttaaaaagactcgacgaaaagttcggggcaccagacaagaggcttaaggcagagcctgctgctcccccggccgccccttccacacccgctccccctcccgccgtaccaaaggaactgcccgctccccccgcccctccccccgcttccgcccccacaccagaaaaggagcccgaggagccagcccaggcaccccccgctcagagtactcctacccctggggtagcagccgcacccacactcgtttccggtggaggttctacctcctcaacgtctagcgggtcttttgaagcctccccagtggaaccacagctccccagcaaggagggtcctgaaccgccggaggaagtgcctccccctacaaccccaccggtaccaaaagtggagcctaaaggcgacggcatcggaccaaccaggcaacccccgtcccagggactaggttaccccaagtatcagaaatctttgccaccccgctttcagaggcagcagcaggaacagttactgaagcagcaacaacagcatcagtggcagcaacaccagcaggggtctgctccccccactcctgtacccccctctcccccgcagccagtaaccctgggtgcagtgcctgctccacaggctcccccgcccccgcctaaggctctttacccaggcgctctgggtagacctccccctatgccacctatgaactttgatcctcgatggatgatgataccgccttatgtggacccacgcttgctccagggacgacctccccttgacttctaccccccaggggtgcaccctagcggattagtccctcgggaaagaagcgattccggggggagcagctccgagccttttgacaggcacgcgcccgccatgctaagggagcggggcactccccctgtggacccaaagttagcctgggtgggtgacgtctttactgcaaccccagccgagcccagaccattaacctcgccattacgccaagcagccgatgaggacgacaaaggcatgaggtctgagacccctccggtgccaccgccaccaccgtacttagcctcttatccagggttccccgaaaacggagcaccagggccgccaatttcacgctttccacttgaggaacccgggccgcgtcctctaccctggcccccaggatccgatgaggttgcgaagattcaaactccacctccaaagaaagaacctcccaaagaagagactgctcagctcaccggacctgaggctggaaggaagccagcaagaggcgtggggagcggcggtcagggtcccccgcctcctagaagagagtcccggactgagacccgttggggtccacgccctgggagctccaggaggggcatacccccagaagagcctggtgctcctccccggcgtgcagggcccataaaaaagcctccacctcccaccaaagtagaagaattgccaccaaagccccttgaacaaggtgacgaaaccccaaagcctccaaaacctgatccattaaagatcacaaagggaaagctcgggggtcctaaggagacaccacccaatggtaaccttagtcctgctcctaggttgcggcgggactacagctatgagagggtagggcctacttcctgtcgggggcggggacgcggtgaatatttcgcccgtgggaggggtttccgcggcacgtacggaggcagaggccgtggggctcgttcacgtgaatttcgctcttaccgtgagttcagaggagacgacggtagaggtggcgggactggcggaccgaatcacccacctgcgcctcggggtcggaccgcaagcgaaacaaggagtgagggctccgaatacgaggagattcctaagcggaggagacagcgcggatccgaaactgggagcgagactcacgagagcgatctcgctccaagcgataaggaggcccctacccctaaggagggtacgctgacccaggtacctctcgcgccacccccacctggagcccccccaagcccagccccagcacgctttaccgcgcgcggcggaagagtgttcacgccgcgcggagtgccctccagaaggggaaggggaggcgggcggccccccccccaagtctgtcctggttggtctccccctgcgaagtcattagctccaaaaaaacctcctaccgggccgctccccccttcgaaagaaccgctgaaggaaaagctgattcctggccccttaagtcctgtcgccaggggcgggtctaacgggggtagcaacgtgggaatggaggacggcgaacgtccacgccggagaaggcacggaagagcgcagcagcaggacaaacctcctcgtttccgacgactgaaacaggagcgagagaacgctgcccgcggttcagaaggaaaacccagtctgactctgcctgcgtccgcccctgggccagaggaggccctcactactgttaccgtggccccagccccacggagggcagctgctaagagccctgatctatccaatcagaattccgatcaagcaaacgaggaatgggagaccgcaagcgaatcgtcagactttaccagcgagaggaggggggataaagaggccccaccacctgtattgctgacccccaaggcagtaggaactcccgggggagggggaggtggggccgtgccaggcatcagcgccatgtctagaggagacctgagtcaacgagccaaagatctgtctaagcggtcattcagcagtcagaggcccgggatggaaaggcaaaaccgcagaccgggacctggtggaaaggccggatcatctggatccagtagcgggggagggggcggcgggcccggaggaagaacaggaccaggccgcggggataaaagatcttggccctcacccaagaacaggtctaggccgccggaggaaagaccaccaggtctccctctcccccctccacccccttcctcctcagctgtattccgcctggaccaggtcatccatagcaacccagcaggcatccagcaagccttagcacagctctccagtcgtcagggctcagtcaccgcacctggaggccaccctcggcataaaccagggccgccgcaggcccctcagggtccaagtccccggccgcccaccaggtatgagccgcaaagggttaacagcggattatcttcagacccacactttgaagagcccgggccaatggtgcggggcgtcggagggactcccagggatagcgccggggtcagcccattcccgcctaagagacgtgaacggccaccccggaaacctgaactgctccaggaagaatccctacccccgccccatagctcagggttcttgggtagtaagcccgagggtcctgggccccaggccgagagcagggatacagggacagaagccttaacgccccacatctggaatagactgcacacagcaaccagcagaaagagctatcgccccagcagcatggaaccatggatggaacctcttagtccctttgaagatgtggccggaacggaaatgtcccagagtgatagcggggtggatctctccggggactcacaggtgagcagcgggccttgctcccagcggagctcccccgatggggggctgaagggcgccgcagagggaccgccaaagagaccaggtgggtcctcacccctcaacgcggtgccctgcgagggccctcccggctctgaacctccccgcaggccccctccagcccctcacgatggggaccgtaaagaattacctcgcgagcagcctctcccgcctggtccgatcggcactgagaggtctcagcataccgaccggggcacagagcccggacccattcgaccttctcacaggccaggacccccggtgcaatttggaaccagcgacaaggacagtgacttaaggctcgttgttggggacagcctcaaagcggaaaaggagttaacggcaagtgtcacagaggcaattcctgtgagtagggactgggagctcctcccttctgctgctgccagcgcggaacctcagagtaaaaacctggactccggacactgtgtgccggagcctagcagctccggccaaaggttatatccagaggtgttttatggaagcgccgggccctctagcagtcagatttcaggtggcgcgatggattctcaactgcaccccaacagtggtgggttccggccggggactccctcactgcatccctaccgcagccagcccctgtacctccctcccggaccggccccaccctccgccctgctttctggggtcgctctaaaaggccagttccttgacttttccactatgcaggctaccgagttgggtaaattgccggccggaggtgtgctttacccacccccctccttcctctatagcccggcattctgcccatcacctctacccgacaccagcctgctgcaagtgcggcaagacctgcccagcccttctgatttctattccactccactccagccaggtggccagagcggatttctgccatccggggccccagctcagcagatgctgctgccaatggtcgactctcagttgccagtggtgaacttcggtagccttccgccagccccacctcccgctcctccctcgttgtcgctgctgccagtggggcccgctctgcagcctccgagtctcgctgttcggcctcctccggcaccagccacacgtgtattaccctctcccgccagaccgttcccagccagcctcgggcgggccgagctccacccagtggaattaaagcctttccaggactatcagaaactgtcatctaacctgggtgggccaggctccagccgcacgcctcctaccggacggagcttttctggtctcaacagtcgattgaaagcgacacccagcacctacagcggtgtgttcaggacccaacgtgttgacctgtaccagcaggcctcgccccctgatgcactcagatggattccgaaaccctgggagagaaccggtcccccgccacgcgagggaccaagcaggcgcgccgaggaacccggctccaggggcgacaaagaacccggactgcctccccctcgatag

SEQ ID NO: 344384 - DNA, 6474 bp, Artificial Sequence
  derived and/or modified sequence
atgagcgaccggagcggccccaccgccaagggcaaggacggcaagaagtactccagcctgaacctgttcgatacatacaaaggaaagagcttggaaatccagaagccagctgtggctccacgccacggtctgcagtctctggggaaggtggctatcgccaggaggatgccccctcctgccaatctgccttctttgaaggctgaaaacaaaggcaatgaccctaatgttagtttggtaccgaaggacgggaccggatgggccagcaagcaagagcagtcggaccctaagagctctgacgcaagcacggcgcagcccccagaaagccaacctctgccagccagccagacacctgcgtccaatcagcctaaacgtcccccggctgccccagagaatacccctttggtgcccagtggtgtgaagagctgggcccaggcatccgttacccacggcgctcacggagatggcggcagggcctcttccctgctctcaagattttctcgcgaagaatttccaacactccaggcagcaggtgatcaggataaagctgctaaggaacgggagtctgcagaacaatcaagcgggcctggtccctcactcagacctcagaatagtacaacctggagagacggcggcggcaggggcccagatgaactggaggggcctgatagtaaactgcatcacggccacgatccccgcggcgggctccagccaagcggccctcctcagttcccaccgtataggggaatgatgcccccatttatgtaccctccctacctaccgttccctcctccatatggtccacaagggccatataggtacccgacaccagacggccctagtaggtttccccgggtagcaggccctagaggaagtggccctcctatgcgtctggtagaaccggtgggcagaccgtccatccttaaggaagataacctcaaagagttcgatcagctagatcaggagaatgatgacggatgggccggagcccatgaagaggtcgattacacggagaagttaaaatttagtgatgaggaggacggaagggatagcgatgaggagggcgccgagggtcacagggactcccagagcgccagtggagaagaaagaccacctgaggccgatgggaagaaaggaaattccccaaactctgaacctccaacgcccaaaactgcttgggcagaaacctcaagacccccagaaacggagcccggccctcctgcgccaaaaccacctcttccacctccgcaccgaggccctgctggtaattggggtccacctggtgattaccctgaccgcggggggcctccctgcaagccacctgcgccggaagacgaggacgaagcgtggcgacagaggcggaagcagtccagcagtgagatctcactagccgtggagagggctcgtaggcgccgggaggaggaggaaaggagaatgcaagaagaaagacgagccgcctgtgctgaaaagctgaagaggcttgacgagaagtttggagcgccagacaagcggctgaaagccgagcccgctgccccaccagcagcacccagcacacctgcaccccctcccgcagtgcccaaggagttgcctgcgcccccagccccccctcccgcatcagcgcctacacccgagaaggagcctgaggagcctgcccaggcaccacccgctcagagcacgcccacccccggggtagctgccgctcctacccttgttagcgggggcggaagcacctcatcgacgagttccggttcttttgaagcctctcccgtggagcctcagttgccctcgaaagagggaccggagcctccagaggaagtgcccccccccacaactccacccgtcccaaaagttgaacctaaaggggatggtattggccccacccggcagccaccgagccagggtttggggtacccaaaataccaaaaatcattgcctcccagatttcagcggcagcaacaggagcagctcttgaagcagcagcagcagcatcaatggcagcagcaccagcagggtagcgccccaccaacccccgtgccaccgtccccccctcaacccgtgactctcggcgcagtgccagccccccaagctcctccaccaccgccaaaagcgctgtatcctggcgcactcggcagaccaccgcctatgccacccatgaattttgatcctcgttggatgatgatccctccctacgttgacccccgcctgctgcagggccgacctcccctggatttctatcctccaggggttcatccttccggcctggtaccgagggagagatctgacagtgggggaagcagcagcgagccatttgaccggcatgctcctgccatgctccgagaacgcggaaccccaccggtcgaccctaagctcgcctgggtcggagatgtgtttacagcaacccccgcagagccccggccactcacgtctcctctcagacaggctgctgacgaggacgataagggcatgcgatctgagactcctcctgtccccccgccccctccatatcttgccagctatccagggttcccagagaatggagctcctggaccccctatttctaggtttcctttggaggagccaggacctagaccccttccctggccacccggcagcgacgaagtcgccaaaatccagacgccgccccccaaaaaggaaccaccaaaagaggaaacagcccagttgaccggtcccgaggccgggcggaagcctgcccggggcgtaggatctggcgggcaaggccccccacctccaagaagagagtctcgcaccgaaacacgctgggggccccggccaggatcttcacgtcggggaatcccccccgaggagcctggggcccctccaagaagggccgggcccattaagaaaccgcccccacctactaaagtggaggagctaccgccaaaaccgctggaacaaggagacgagacacccaaacctccgaagccggatcctctgaagattacaaaaggcaaattgggcggacctaaagaaaccccaccaaacggcaatctgagtcccgctcctcgccttcgccgagactactcttatgaaagggtgggtccgacatcctgccgcggcagggggcggggtgaatactttgctcgcggtaggggcttccgcggaacctatggaggccggggccgtggcgcgcggtctagagaattccgctcctatcgggagtttcgcggggatgatggacgggggggcgggaccggtggccccaaccacccgcctgccccccggggccggacagcttcggagacccgaagcgagggcagcgaatatgaggagatacctaagcgcagaagacaacgtggctctgagacaggtagcgagactcacgagagtgacttagctccatccgataaagaagcccctacgccgaaggaagggacactgacccaggttccattggcacctccgccaccaggcgctccgccctcaccagcccctgccagatttaccgcccgcggcggccgtgtttttacacctagaggggtcccatccagacgtggaagagggggaggcagaccaccacctcaagtgtgccccggttggagtccccccgccaagtcactggcccccaagaaacctcccacaggacccctgccacccagtaaggaaccgctcaaggagaaactgatcccggggcctcttagcccagttgcaaggggtggttcaaacggaggctccaacgtaggcatggaagatggcgaacgacctcgacggagacggcacggtagagcccagcaacaggataagccgcccagatttagaaggttgaaacaggagagggaaaacgcggctcgtggatctgagggtaaaccatccctaacattacccgcctcagccccaggaccggaggaggcactgacaacggtgacggtcgcacccgccccacgacgcgcggctgccaaatctcctgacctgagcaatcagaactccgaccaggcgaatgaggagtgggagacggcgtccgagtcgagtgacttcaccagtgagcgaagaggcgacaaagaagcaccaccccctgtccttctcacccccaaagcggttggcacccctggaggcggtggagggggggcagtgccagggatttccgccatgtcacgaggcgacctgtcccagcgcgcaaaagatctttctaagcgcagcttctcctcccagagacccggcatggaaaggcaaaacagacggcctgggcccgggggcaaagccggtagctctggatcgtcgagtggtggaggcgggggtggacctgggggccgcaccgggccaggcaggggagacaagcgttcctggccctcacccaagaacaggagccgaccccccgaagaaaggccccccggcctgccactccctccccctcctccaagctctagcgctgtgtttcgccttgatcaggttatccattctaatcctgcaggcatacagcaggccttagcccagctgagttcacggcaagggtctgtaaccgcaccaggagggcaccccagacacaaacccggccctccacaggccccccaggggccttcgcctagacctcccactcgctacgagccgcagagggtgaattctgggcttagttccgaccctcacttcgaggagcctggccctatggttaggggtgtcggcggcaccccgcgagactccgctggagttagccctttcccgccgaagcgtagagagcgtccgccacgcaaaccagaactgcttcaggaagaaagtctccctcctccccactcttctgggtttctaggatcaaaacctgagggacctggcccacaagctgagtcgagagacacgggtacagaggccctgacccctcatatttggaaccgccttcacacagcaaccagtaggaagtcatatagacctagttcgatggagccttggatggagccactttccccatttgaggacgtggccggcacagaaatgagccaaagtgactccggggtggatctgagcggcgacagtcaggtgtctagtgggccctgcagccagcggtcaagccctgacggcgggttaaaaggggccgccgagggacctccaaaacggccgggtggatccagccctctaaacgctgtgccttgtgagggcccccccgggtctgagccacccagacgccctccacccgctccgcacgatggcgatcgaaaggaactgccccgggagcagcctttgccacccggacccataggcaccgaacgcagccagcacacagacagagggacagaacctggtccaatccgcccctcacaccgccccggccctccagtgcagttcggtacgagtgataaagattctgatctgcggctggtagtgggagactcactgaaggcagaaaaagagctgacggcctccgtgacagaggccattcctgtgtcgagggattgggagctgttgcccagcgctgccgcctctgccgagccacagagcaagaacctcgacagcgggcactgcgttcctgagccttccagctccgggcagcgcctgtatcccgaggtcttttacgggtctgctggtccgtcgtcctcccagatctcaggtggagccatggattcgcagctccaccccaacagcgggggctttaggcccgggactccaagccttcatccatatcgttcacagcctctgtacctgcctcccggacctgccccacctagcgccttgctgtctggcgtggcgctgaagggccaattcctcgacttttcgaccatgcaagccaccgagctgggcaaactcccggctgggggcgtgttgtatcctcctccgagcttcctttactctcccgcattctgtccgtccccactgccggacacaagtctcctgcaggttcgccaagaccttccctcgcctagcgacttctattccaccccccttcagcccggaggccagagcggattcctacctagcggtgcgcccgcacagcagatgttactgccaatggtagattcccagctccccgtggtgaatttcggttctctacctccagcccctccacccgctcctccttctctttcactattacctgtgggtcctgcactgcaacccccctcactcgcggtccggcctccccctgcccccgccacaagggtgctgccttctcccgctaggcccttccctgcatctctggggagagctgaactacatcctgtggaactgaaaccctttcaggattatcaaaagctctctagtaacctgggaggaccaggctcatctaggacaccccctaccggaagatcgttttctggattaaactcacgcttaaaggctactcccagtacttactcaggcgtgttccgcacccagcgagttgacttgtaccagcaggcatccccacctgatgcactgcgttggatacccaagccctgggaacggaccggccctccaccccgtgaagggccctcaaggcgggctgaggaacccggatctaggggggataaggagcccgggctcccacctccgagatag

SEQ ID NO: 344385 - DNA, 6474 bp, Artificial Sequence
  derived and/or modified sequence
atgagcgaccggagcggccccaccgccaagggcaaggacggcaagaaatattctagtttgaatctgtttgatacatacaaaggcaaaagtctcgaaatccagaaacccgctgtggctcctcggcatggtctccagtctctcggcaaagtagccatcgctaggcggatgccaccaccagcaaacctgccctctcttaaggccgaaaataagggcaacgaccccaatgtcagtctggtccctaaagacggaactggttgggcctcaaagcaggaacagtcagaccccaaaagttctgacgctagcactgcccaaccacccgagtcccagccactgcccgctagtcaaactccagccagcaaccaaccaaagcgcccgcccgccgctccggagaacaccccactcgtcccgtctggcgttaagtcctgggctcaggcgtcagtcacacacggcgcccatggagacggaggtagagcttcatctctgctcagtaggttttctcgcgaagagtttcctaccctccaagccgcaggcgaccaggataaggccgccaaagaaagggagtcagccgagcagtcctccggccctggacccagcctgaggccacaaaacagtaccacatggagagatgggggcggtagggggcccgacgagctagagggccctgactctaagctgcaccatggccacgacccacgaggagggctgcaaccatcaggacctcctcagtttcctccctatcgcggaatgatgccgccttttatgtaccctccatatctacctttcccgccaccctatggcccccagggaccgtaccgctatcccacacccgatggaccaagccgttttccccgggtggccggacctcggggctctggtccgccaatgcgtctggttgagccagtgggccggccctctattctgaaggaggataatttgaaagaatttgaccagctggaccaggagaatgacgacggctgggccggggctcatgaagaggtagattatactgagaaattgaagttttcggatgaggaggatggacgggattccgatgaggagggagctgagggccatcgagatagccagtcagcctctggtgaggaaagacctccggaagccgatggaaaaaagggtaactctccaaacagtgaacccccaacaccaaaaaccgcctgggcagagacctctcgcccaccggaaactgaacccgggcctcccgctcccaagccacccctccctccaccacatcgaggccccgcaggaaattgggggccgcctggagattaccctgacagaggaggaccaccttgcaagcctcctgcccccgaagacgaagacgaggcctggagacagagacgaaaacaatcaagttccgaaatcagtttggcagttgagagggcccggcggcgacgggaggaagaagaaaggcgtatgcaggaagaaaggagggccgcatgcgctgaaaagctgaagagattggatgaaaaattcggtgctcccgacaaaagactcaaagcggagcccgctgcccctcccgctgctccctcaacccccgcccccccccctgccgtgcccaaagagctgccggccccccccgcaccaccacccgcgtccgcacctacgccggagaaagagccagaagaacccgctcaagcgccacctgcccaatcgactcctacccccggggtggctgccgctcctaccctcgtgtctggcggaggatcaacctccagtacttcgtctggatccttcgaagcttctcctgttgagccccagctgccctccaaagagggccctgagcctcctgaggaagtgccaccccccaccaccccgcccgtgccaaaggtggagccaaaaggggatggcattggacctacacggcagcccccatcgcagggtctgggataccccaaataccagaagtccctgcctcctagattccagcgccagcagcaggagcaactgctgaaacaacagcagcaacatcaatggcagcagcaccagcagggtagcgccccgcctacccctgtgccccctagtcccccccagccagtgaccttaggtgccgtgcctgcaccacaggcacctccgccccctccaaaggctctttacccaggggcccttggacgtcctccacccatgccccctatgaattttgacccgcggtggatgatgattccaccttacgttgaccctcgtctgctgcaaggccgccccccattagatttttatccaccaggcgtgcatccctctggattggtgccaagagaacggtctgactctggtggctcttcatcagagccctttgatcgccatgcccccgcaatgttgcgcgaacgaggaacgccccctgtggatccaaagcttgcatgggtcggtgacgtatttaccgctacacccgcagaaccgaggcccttgacatcacctctgaggcaggctgctgatgaggacgataagggaatgcgttccgagactcccccagtgccacctccaccgccctatctcgcatcataccccggtttcccagaaaacggcgcccctggcccaccaatttctcgctttcctttagaggagccaggccctaggcccctgccctggcctccggggtccgacgaagtggccaagatccagacaccgcccccgaaaaaggagcccccaaaagaggagacagctcagctcaccggcccagaagccgggcgtaaaccagcgaggggagtgggttccggggggcaggggcctccgccaccccgccgagagagccggaccgagacacgctggggaccccgtccaggcagttcgcgtcggggaattcctcccgaggaaccgggagctcctcctcggagagccgggccaataaaaaagccgcctccaccgactaaggtcgaggagttgccccctaagccccttgagcagggagacgagactcctaagcctccaaaaccagacccattgaagatcacaaaaggcaaactgggcggtcctaaggagacccctcctaacggcaatctctcccctgcgccacgcctaaggagagactactcatacgagagggtggggccgacctcctgccgcggacgtggccgcggcgaatatttcgcccgcgggcgcgggttccgaggcacctacggtgggaggggtcgaggagctcggtcccgcgagtttagatcttatcgcgaattccggggcgacgacgggcgaggcggcggtaccggcggtcctaaccatcctccagccccaaggggtaggaccgcttccgagaccagatccgagggatccgagtatgaggagatacccaaaagacgccgacagagaggaagcgaaacaggctctgaaacacacgaaagcgatctcgcgccgtccgacaaggaggccccaacgcccaaagaaggcacgctgactcaagtcccccttgctcccccacccccaggcgccccaccttctcccgctccggcacgctttacagcccgaggcggtagggtctttacgccgagaggggttccatccaggcgcggccgaggcgggggtaggccacccccacaggtgtgtccaggctggtcgcccccagccaaatccctcgctcccaagaagccccctaccgggcctttgccgcccagtaaggagcccctgaaagagaaactgattcccggcccattgagtcccgtcgcgcgcggtgggagcaacggagggtccaatgtcggaatggaggacggtgagaggccccggcgtagacgtcatggccgtgctcagcaacaagacaagcctcctagattcagacgcctcaagcaggagcgtgagaatgccgccaggggctctgagggcaagccttcccttacactccctgcctcagcgcctggtcccgaggaggcgcttactacggtgaccgtcgctcccgccccccgtagggctgcggccaaaagtcctgatctctcgaaccagaacagcgaccaggctaacgaggaatgggaaacagcaagcgaaagcagcgacttcacttccgagcgcagaggagacaaggaggcaccaccgccagtgctcctgactcccaaggcagtcggaacacccggaggcggagggggaggtgccgttcccggaatcagcgctatgtctaggggcgaccttagtcagcgtgccaaggatctttcaaagcgttccttctcttcccagaggccaggaatggaacgtcagaatcgcagacctggaccaggggggaaggccgggtcgtctggttccagttcaggcggcggtggtggcggccccggtggccggactggtcctgggcgaggagataagcgcagctggccatctccgaaaaaccggagcagaccccccgaagaaaggccgcctggcctgcccctccctccgccacctccaagctcatcggccgtgttcagactggatcaagtgatccacagcaaccccgcgggcatccagcaggcacttgctcagctaagcagcaggcagggttcagtaacagcgccagggggtcatccgcgccataagccagggcctccgcaggctccccagggtccaagcccacggccgcctacccgatatgagccgcagagggtgaatagtggcctcagcagcgacccccattttgaggagccaggacctatggttaggggagtggggggaactccaagagattctgccggggtatctccctttcccccgaaaaggcgcgagaggccaccgaggaaaccggagcttctccaggaagaatcactgcctcccccccattcatccggttttctcggctctaagccggaagggccaggtccacaggcggaatcccgcgatactggaaccgaggccctcacaccccatatttggaaccggttacacactgcgacctctagaaagtcctaccgaccatcctccatggaaccctggatggaaccgctgtcccctttcgaagatgtggcagggaccgaaatgagtcagtctgactccggggtagacctttcgggagacagtcaggtgtcatctggtccttgctctcaacgtagttcacccgacggtggactcaagggggccgcagaaggcccccccaaacgacccggagggtccagccctttgaacgctgtcccatgtgaaggcccacccggttccgagccccccagaagacctcctccagcccctcacgacggggaccgcaaagagctcccccgggaacagcctctccccccaggcccaattgggacagagagatcccagcatacagatcgcggaaccgagccgggacccatcagaccatcccatcggcctgggcccccggttcagtttgggacctccgataaagattctgacctccggttggtagtcggcgacagcctgaaggccgaaaaggagctcacggcttctgtgaccgaagccataccagtctcacgagattgggaactcctcccatctgcggctgcctctgcagagccccagagcaaaaatctcgatagcggccactgtgtccctgaaccaagttcaagcgggcagcggttgtacccagaggtgttctatggatcagccggcccctcaagcagccaaatcagtggtggggcaatggactctcagttacaccccaattcgggcggcttccggccagggactccaagtctccatccttaccggtcccagcccctgtatcttccccctggacctgctcctcctagcgcattgttatccggtgtggctctgaaaggccaatttttggattttagtacgatgcaggctacagaactgggaaagcttcccgctggtggtgttctgtatccgccaccatccttcctctacagtcctgctttttgtccgtctccattgcccgacacttcattgctgcaagtgcgacaagacctgccctcaccttcagatttttactcaactccccttcagcctgggggacaatcagggttcctgccctctggcgcacccgcccagcaaatgctcctgcctatggtcgacagtcaactgccggtggtaaattttggtagcctgcctccagccccaccccctgccccaccctccctgagtctgctgcccgttggtccagcactgcagcctccatctctggcagttcgtccacctccagctccggctacccgcgtgcttccctctccggcaagaccttttccagcctccttaggcagagcagaacttcatcccgtggagctgaaaccatttcaggactatcagaaattaagctccaacttgggtggcccaggcagtagcagaacaccacccaccggccggtcttttagcggactcaactccagactgaaggcaactcccagcacctactctggtgtgttccggacacagcgcgtcgatttatatcagcaggcttcaccacccgacgccttacggtggatacctaagccctgggaacgcacaggacctcccccgcgtgagggccctagccgccgggccgaagaacctgggagtcgtggcgacaaggagccaggccttcccccaccaaggtag

SEQ ID NO: 344386 - DNA, 6474 bp, Artificial Sequence
  derived and/or modified sequence
atgagcgaccggagcggccccaccgccaagggcaaggacggcaagaagtactcaagtttaaatctattcgatacgtacaaggggaagagtttggagatccaaaaaccagctgtggcacctcggcacgggctgcagtctctggggaaagtggctattgcacgccggatgcctccgcctgctaacctgcctagcttgaaggccgagaataaggggaatgacccaaatgtgagcctggtaccgaaggatgggaccggctgggcgtcaaaacaggaacaaagcgatcctaagtcctcagatgctagtaccgcacaaccccctgagtcccagcctttgccagccagtcaaaccccagctagcaaccaacctaagaggccaccagccgcaccagaaaataccccactcgtcccctcgggagttaaatcctgggcgcaggcctctgtaacacatggggcgcacggagatggtggacgagcatcctcgttgctgtccaggttcagcagagaggagtttcccaccctgcaggctgcgggagaccaagataaggccgccaaagagcgggaatctgcagaacaatccagtggccccggtccatcactgcggcctcagaactctactacctggcgagatggaggcggcaggggcccagacgagctggaaggaccagacagtaaactgcaccatggacacgatccaagaggcggcctgcagccaagtggaccaccacagttccctccataccgcggaatgatgccaccctttatgtacccaccctatttaccattccctcctccttacggacctcaaggtccctaccgttatcccactcccgatggaccgtcacggttcccccgagtggccgggccgcggggcagcggaccaccaatgcgtctggtcgagccagttggcagaccgtcaatccttaaggaggacaacctgaaagagttcgatcagctggatcaggagaatgatgatggctgggcaggagcgcacgaggaagtggattacaccgaaaagctaaaattcagcgacgaggaagacggtagagatagcgacgaggagggggcggagggtcatcgggactcacaaagtgcctcaggagaggaacgacctcccgaagcggacggcaaaaagggcaatagccccaactcagagccaccgactcccaaaaccgcttgggctgaaacgagtaggcccccagaaaccgaaccaggtccgcccgcccccaagcccccactgccgcccccacatcgaggacccgccggcaattggggaccaccgggggactatcctgaccggggcggcccgccttgtaaaccaccggcccccgaagatgaggatgaggcgtggcggcagcgccggaagcaatctagtagtgaaatttccctggccgtcgaacgggccaggaggcgccgtgaggaagaggagaggcggatgcaagaggaaaggcgcgcagcctgtgccgaaaaacttaagcggctcgacgagaaattcggagcccccgataaacggttgaaagcagaaccggcagctcccccagcggctccaagcactccggccccccccccagcggttcctaaggagcttccagcacctccagccccgccgccagccagtgcccccactccagaaaaggagcccgaagagcctgcacaagcccctccggctcagagcactcccacacccggggtggcggctgctcccaccctggtgtcaggcggaggcagcacttcttccacctccagtgggagtttcgaagcatcccccgttgaaccccagctgccttctaaagagggcccggagcctccagaagaggtgcccccgcccacaacccctcccgtaccaaaggtcgaacctaagggcgacggaatcgggccgaccagacagccaccttctcaggggctgggatacccaaagtaccagaaaagcctccccccccgttttcaacgacaacaacaggagcagctactgaaacaacagcagcagcatcaatggcagcagcaccaacagggatctgcgccacctacgccagtgccccccagcccgccccagccagtcaccttgggcgcggtccccgccccacaggccccacccccgcccccgaaagccctttaccccggggctctaggtcggcctccgcccatgcctcctatgaactttgatcctagatggatgatgattcccccctacgtggatccccggctgctgcaagggcgacctcccctggacttctatccaccaggggtgcatcccagcggtctcgtgccacgcgaacggtccgacagcggtggctcctccagtgagcccttcgacagacatgccccagccatgctgagagagaggggaactccccctgtagaccctaaactcgcttgggttggcgatgtcttcactgctacacccgccgaaccgaggcctctgacaagcccccttcgacaggcagctgatgaggatgacaagggaatgcggagcgaaacaccaccagtacctccaccgcccccttacctggcttcataccctgggtttccggagaatggagcaccaggacctcctataagtcgcttccccctggaggaaccaggtcccaggcctctaccatggccgcccgggtccgatgaggttgccaagattcagaccccaccacccaagaaggagccacccaaagaggagaccgcgcaactgacagggccagaggctggcagaaagcctgctagaggtgtgggatcagggggccagggtcctcccccaccaagacgtgagtctagaacggagaccaggtggggacctcgtcccggctccagtagacgagggattccacctgaagagcctggcgcacctccccggcgcgccggccccataaagaagcccccaccccctactaaggtcgaagagctcccacccaagcccttggaacagggagacgagacacctaaacctccaaaaccggaccctctaaaaattaccaaaggcaaactgggaggcccaaaggagaccccacccaacggcaatctctcgcccgcccccaggctgagaagggattattcttacgaacgcgtgggacccacttcatgccgcgggcggggcaggggcgagtacttcgcaagaggtagaggttttcgggggacttacgggggcagaggaaggggagccagaagccgagaattccggagctatcgggaatttcgcggagatgatggtcggggcggtggcacagggggtcccaatcacccgcctgccccacgcggtagaaccgcatcagaaacccggtcagagggctctgagtatgaggaaattcccaagaggcgcagacagcggggttctgagactggctctgagactcatgaatccgatctggcgccgtccgataaggaagcacctactcctaaggagggaactcttacacaagtacctctggcccctcccccaccaggtgccccgccttcacctgcccccgccagatttaccgcccgtggcggcagagtgtttactcctaggggggtgccgtctaggcgcggacgcggaggtggaaggccacctccgcaggtctgtccgggatggagcccccctgctaagagtttggcccctaaaaaaccaccaactggcccgcttccgccatcaaaggaacctttgaaggagaagctgatccccggacccctgtccccggtggccagaggcggatccaacggcggcagtaatgtggggatggaggatggagaaaggccgaggcgaagaaggcatggccgggcacaacagcaggataaaccccctagatttcggcgcctgaagcaggaaagagagaacgctgcacgcggatccgagggcaagccatcactgacgctgccggctagcgcacccggacccgaggaagccctgactacagtaaccgtagccccagcacctcgtcgagctgccgccaaatcccctgacctgtctaatcaaaattccgatcaggcgaatgaagaatgggaaaccgccagtgagtcgtcagattttacctccgagaggcggggagataaagaagctccccccccagtgctgctcacccctaaagctgttgggacccctggcggaggaggcggcggcgctgtacccggtatctccgccatgtcaagaggagatttgtcccagcgggccaaggacctgagcaagaggtccttttcaagtcaaaggcccggaatggaacgtcagaatcgccggccaggccccggcggcaaggccggtagctctggatcttcttctggcggtggcgggggaggtcccggtggccgaactgggcccgggagaggcgacaagcggtcatggccatcccccaagaatcggagccggccgcctgaagagcggcctccaggtctacccctcccacccccccctccatcatcgagtgccgtttttcgccttgatcaggtcattcacagcaatcccgccggtatccagcaggccctcgcccaactctcatctcggcaaggctccgttactgctcccggaggtcacccaaggcacaaaccgggcccgccacaagcaccacagggccccagccccaggccaccaacccgatatgaaccccagagagttaattcaggcctcagtagtgacccgcatttcgaagaaccaggacccatggtgagaggcgttggaggcacgccgagggattccgccggcgtttccccctttcctccaaagcgtagggagcgcccaccccggaagcctgagctcctccaggaggagagcctgcctcctccacattcctcaggctttctcggaagcaagcctgagggccctggaccccaagccgaatcaagggatacaggcaccgaggccctcactccacatatttggaacaggctgcataccgcaacctctaggaagagttatcgcccttcttccatggagccctggatggagcccttatcacccttcgaggacgtggccggcacagagatgagtcagtcagactccggggtagatctgtccggggacagtcaggtttcatctgggccatgctcgcagagaagttctcctgatggaggcctgaaaggggccgccgagggtccaccgaaaagacccgggggaagctctccgctcaatgccgtgccttgtgaagggccgcccgggagcgagccgccccgtagacccccaccagcacctcacgatggcgatcggaaagagttgcccagagagcagccactgcctcccggtccgatcggaaccgaacggtctcaacataccgaccgaggcacagaacctggccccatccgcccgtcccacaggcccggcccaccggtgcagtttgggacatctgataaggattcagatctgagattggtcgttggcgatagcctgaaagcagagaaggaattaactgcatctgtgactgaggcaatcccagtgagcagggactgggagttactgccctctgcagctgcttctgccgagcctcaatctaaaaatctggacagtgggcattgcgtcccagaaccctcttcctccggacagagactctaccctgaagttttttatggctccgctggaccctcatcaagccagatttccgggggtgccatggattcccaactgcatccaaattctggcgggtttagacctggcaccccttcactccacccctaccgctctcagccactgtacctacctcctggccctgcaccccctagtgctcttctgtccggagttgccctcaaggggcagttcctggacttcagtaccatgcaggccacggagcttggtaagctccccgctggaggtgtcctttatccaccgccttctttcttgtacagtccagcattttgcccttccccacttcccgacaccagcttgcttcaggtgcggcaagacctgcctagcccatcggatttctatagcacgcctctccagcccggaggccaatctggtttcctgccgagcggagcaccagcccagcagatgttgctcccaatggtcgactcccagctgccagttgtgaattttggctcactgccgcctgctccaccacctgcacccccttccctaagtctgcttcccgttgggcctgctttacagccccctagtctcgccgttaggccgccaccagcccccgccaccagggtgcttcccagcccagccaggcccttccctgcttctctcggtagggccgaattgcatcctgtagagctgaagccctttcaagattatcaaaagctgtcaagcaatttaggtggtcccggttcaagccgcacaccacctaccggccgcagctttagcggactcaattctaggttgaaagctactccttcgacctacagtggagtgttccgcacccaaagagtcgatctgtatcaacaagcgtcccccccagatgccttgagatggatcccaaagccctgggaacgtacaggtccaccacctcgggaagggccgagtcggcgtgcagaggagcccgggtcaaggggggataaagagccaggtttgcctccgcccagatag

SEQ ID NO: 344387 - DNA, 6474 bp, Artificial Sequence
  derived and/or modified sequence
atgagcgaccggagcggccccaccgccaagggcaaggacggcaagaaatactccagcctgaatctattcgacacctataagggtaagtctctggaaatccagaagcccgccgtggcaccccgacatggacttcagtccctcggcaaagtggctatcgctagaagaatgccacccccagccaacctccccagcctgaaggccgagaataagggaaacgatcctaacgttagtctcgtgccaaaagacggcaccggatgggcatcaaagcaggaacagtctgacccaaaatcgagcgatgcctctacggcgcagccacccgagtctcagcccttgccagcatcccagacacccgcgtcaaatcagcccaagcggcctccagctgcccctgaaaatacccccctcgtgccttccggggtcaaatcctgggcccaggcttccgttacccacggcgcccacggcgatggcggacgtgcctcctccctgctgagccgtttttccagagaggaattccccaccctgcaggcagctggagaccaggacaaagccgctaaagagcgggagtcagctgagcagagcagtggacctgggccatcactcagacctcagaactccacgacctggagagacggcggaggaaggggaccagacgagctcgagggaccagatagcaagctgcatcatgggcatgatcctagagggggcttgcagccatcaggacccccccagttcccaccctatagaggaatgatgccccccttcatgtaccccccttacctgccgtttccccctccctatggcccccaagggccctataggtaccctactcccgatgggccgagtcggtttcctcgggtcgcaggtcccaggggaagtgggccccccatgcgtttagttgaacccgtcgggagacccagcattctgaaggaagataaccttaaagagtttgaccaactggatcaggagaacgacgacggctgggccggcgcccacgaagaagtcgactacacagagaagcttaaattttccgatgaagaagatggaagagattcggatgaagaaggggctgagggacaccgcgatagtcaaagtgcgagcggcgaagagcgcccgcccgaggcagatggcaagaagggaaactctccaaattcagagccaccaactcctaaaacagcctgggccgagacctcccgacctccagaaacagaaccgggcccacccgcacctaagccccccctgcccccaccccaccgcggccccgccgggaactggggaccccctggcgattaccccgatcgcggcggcccgccctgcaaaccacccgccccagaggacgaagacgaagcctggagacagcgtcgcaaacagagctctagtgaaattagtctggctgttgagcgcgctcggcgcaggagggaggaagaggagcggcggatgcaggaagagaggagagccgcctgcgccgaaaaactgaagaggctggacgagaagtttggcgcacccgacaagcgcttgaaagcggaacccgcagctccccctgccgctccctctacacccgcaccgcctccagccgtgccaaaggaacttccagcaccacccgccccacctccagcctcagcccctacaccagagaaggagccggaggaacctgcacaggccccccccgctcaatccaccccaacgcctggagtcgctgctgctccaaccctggtatccggcggcggatccacgagctcaacctcctctggcagctttgaagcttcccccgtggagcctcaactccccagcaaagaagggcctgagcctcccgaggaggtcccccctcccacaactcctccggtccctaaggtggagcctaagggggacggcatcgggccgacgcgtcagcctccgtcacaaggtttgggctaccctaagtaccaaaagagcttgccccctcgctttcagaggcagcagcaagagcagcttctgaaacagcagcagcaacaccagtggcaacagcatcagcagggaagcgccccccccactccagtacccccttcccccccgcagcctgtgaccctgggggctgtcccagccccccaggctcccccccccccacccaaagccctttatccgggggctctagggagaccccctcccatgccccctatgaacttcgatcccaggtggatgatgatacccccttatgtggatccgagacttctgcaaggtcgccctcccttggatttctatccacctggcgtccatccctccggcttggtcccacgggaaagaagcgattccggaggctcgtcatcggagcctttcgaccgccatgccccagctatgttgcgggaacgtggcacccctcccgttgatcctaagctggcatgggtcggagatgtgtttactgcaaccccagccgagcctcgtcccctgacttcgcctctcagacaggcggccgacgaagacgacaagggaatgcgatctgaaacccccccagtaccccctccgcccccatatcttgcgagctatccgggctttcctgagaatggcgcccctgggccgccgataagccggttcccactcgaggagccgggccccagacccctcccatggccaccaggctccgacgaggtggccaagatccagacaccgccacccaagaaagaaccgcccaaagaggagaccgcgcagctcaccggacctgaggccggtcgcaaaccagcccgtggagtgggatctggaggccagggcccgcctccgccacgacgcgaaagcaggactgagactcgatgggggccacgaccaggatcttcccggcgcggcattccgcccgaggagccaggggccccaccacgccgcgcaggccccatcaagaaaccaccgccacctaccaaggtggaggaactgcctcccaagccacttgagcaaggagatgagaccccaaaaccccctaagcccgatcctctgaagatcacgaaaggaaaactcggaggccctaaggagactcctcccaacggcaacctgtctccggctcccagactgcggcgggactattcctatgagagagtgggaccaacatcttgcagaggacgtggccgtggggagtacttcgctcgcggacgcggcttcagaggcacttacggcgggagaggccggggcgccaggagccgcgagttcagaagctatcgcgaatttcgcggagatgacggaagggggggcggcaccgggggccctaaccatccccccgcaccccgcggaaggactgcctctgaaacaaggtctgaggggagtgaatacgaagaaatcccaaagcgaagacggcagagggggtccgaaaccgggagtgagactcacgagagcgatctggctccatccgataaggaagcccccacgccgaaagaaggcaccctcacacaagtaccgttagcaccgccgccacctggggcacccccgtcccctgcacctgctaggtttaccgccagagggggaagggtcttcactccccggggcgtgccttcacgcagagggagaggcggcggtcgtccccctcctcaagtatgtcccggctggagcccaccagcaaaaagcctggccccgaagaaacctccaactgggcctcttccaccctctaaagagcctctgaaggaaaaacttatccctggtcccctaagtcccgtggctcggggaggttctaatggtggcagcaatgtggggatggaggacggtgaacgccctagacgcagacggcatgggcgtgcgcagcaacaggacaagccaccccggtttagaaggctgaaacaagagagggaaaatgccgcccgcgggagtgagggtaagccgagcttgaccctcccagcatcagcaccagggcccgaagaggctctaacaactgtgacagttgcccctgccccaaggcgtgcggcagccaagtcacccgatctctctaaccagaacagcgatcaggctaatgaggaatgggagaccgcttcagaatcctctgattttacatcagaacgacggggcgataaagaggcacctcccccagttcttctgactcccaaggcagtggggacccccgggggtggtgggggcggagccgtgccaggcatctcagccatgagccggggggatctgtcccagcgcgccaaagatctctctaaacgatccttttcatctcaaaggccagggatggaaaggcagaacaggaggccagggcccggcggaaaggctggatcaagtgggtcttcgagcggcggcgggggcggcggtcctgggggaagaacaggccccgggagaggggataagcgtagctggcctagtccaaaaaacaggtcgagaccgccagaggagcgcccgcccggcctaccacttccccccccaccaccaagctcatccgccgtgttcaggttggatcaggttattcacagtaaccctgccgggatccagcaggccttggcccagctgtcttccagacaagggtcggtcactgcgccaggcggccacccacgacataagcctggacctcctcaggccccacagggaccttcacctcgccccccgacacgatacgaaccccagcgagttaactctggattgtcctctgatccccactttgaggagcctgggcctatggtgcggggagtaggtggcacgcctcgggatagtgctggagtcagccccttccctccaaaaaggcgtgaacggccacctcgtaaacctgagcttcttcaggaggagtccctacctcccccacatagcagtggtttcctcggctcgaagccagagggccccggtcctcaagctgagagccgtgatacaggcactgaagccctgactccccacatatggaaccggttgcataccgctacctcccggaaatcctacaggcccagttccatggaaccctggatggaaccactgagccctttcgaggatgtggccgggacagagatgagccagtcagatagcggggtggatctgtccggcgactcacaggtttcttccggcccctgttcccagaggtcctcgcccgacggcgggttgaagggagccgccgaggggccccccaaacgacccggcgggagttcaccccttaacgctgtgccatgtgaaggcccgcccggcagcgagccaccaaggcgaccgccacctgccccccatgacggtgacaggaaggagctgccaagggagcaacccctcccacccggccccatcggtaccgaacgcagccaacatacagaccgggggactgaaccaggtcctatccgacccagccatagacctgggccacccgtgcagttcggcactagcgacaaggactccgacttaagactggtggttggcgacagcctaaaggcagagaaagaactgacagcctctgtgactgaagccatacctgtcagccgtgactgggagctgttacctagcgccgctgcttccgctgaaccgcaaagcaagaaccttgattccggtcactgcgtacccgaaccgagctcttctggtcagcggctgtatccagaggtgttttacggttccgctggaccctcttcatcccagatatctggaggagcaatggattcacagctccacccgaactctggtggattcaggcccggcactccatccctccacccatatcgctctcagccattatatctcccccccggcccagcccccccttcagctttgctttccggagtcgcgctgaagggccagttcctcgactttagtactatgcaggctactgagctcggcaaactcccagccggcggggtgctttatccaccaccatccttcctctactcacctgctttctgcccttccccactgcctgacacttcacttcttcaggtccggcaagacctcccgagccccagcgacttttattcaacccctctccaacctggggggcagagtgggttccttccttccggagctcccgcccagcagatgcttctaccaatggtcgattcacagttgccggttgtgaattttggctctctccctccagccccacctccagcccccccaagcttgagtctgctgcccgtgggacccgccctccaaccaccatctcttgcagtccggcctcctcctgcgcccgcaacccgcgtgctgccatctcccgcacgcccatttcccgcatccctgggcagagcagagcttcatccagtggagcttaagccctttcaggattaccaaaagctgtcttctaacctgggtgggcccgggtctagtagaacgccccccaccggccgaagttttagcggactaaacagtaggctcaaagcaactccttccacttatagcggagtgtttcgaactcaacgcgtagatctctaccagcaggccagcccgcctgacgcactcagatggattcccaaaccatgggagaggactggcccaccacctagagaaggaccttctcggcgtgccgaagaacccggttccagaggagacaaggaaccagggctccccccgcccagatag

SEQ ID NO: 344388 - DNA, 6474 bp, Artificial Sequence
  derived and/or modified sequence
atgagcgaccggagcggccccaccgccaagggcaaggacggcaagaaatatagctcactcaatctctttgacacatacaaaggaaaatccctcgaaatccagaaaccagctgtcgctccacggcatggtctgcagtcccttggaaaggttgccatcgcacgacgcatgccaccgccagcaaatctgccttcactgaaagctgaaaataagggaaatgatccaaatgtcagcctggtgcccaaggatggaacaggatgggcaagcaagcaggaacagtctgacccaaagagcagcgacgcaagtaccgcccagccgccagagtcccagcccctgcccgcctctcagacccccgcctcaaatcagccaaaacggcccccagccgcacccgaaaatacccccctcgtcccaagcggtgtgaaatcttgggcccaagcttctgtcactcacggggctcacggagatggtggcagggccagcagcctgctttcacgcttttctagagaagagtttcccaccctgcaggcagcaggtgatcaagacaaggcagctaaagagagggaatccgccgaacagagctccgggccaggtcccagcctgagacctcaaaactccaccacctggcgcgatggtgggggaaggggtcccgatgaactggagggccccgattctaagctgcatcatggccacgaccccaggggtgggctccagccttctggccctccgcagttcccaccctaccggggcatgatgcctccttttatgtaccctccctatttgccgtttccccccccatacggacctcagggcccctaccgttatccaacgcctgacggacccagtcggtttccccgcgtagccggtcccaggggcagcggacctccgatgaggttagtggaacccgttgggcgcccctcaatcttgaaggaggataacctgaaagagttcgaccaactggaccaggagaacgacgatggctgggccggtgcccacgaggaggtagattacacagagaaactgaagttctctgatgaggaagatgggcgagattccgatgaagagggagcggagggccacagagattcgcagtctgcttccggcgaagagagaccacctgaggctgatgggaagaagggcaatagtcctaattctgagccccccacccccaagacggcatgggccgaaacctccagacctccagagaccgaacccggacctcctgcccccaagccaccacttcctcccccccacaggggcccagccggaaactggggccctcccggcgattacccagaccgtggtggacccccctgcaaaccaccagcacccgaggatgaagacgaggcatggagacaaaggagaaagcagtcctcttcagagatctctttggcagtggagagggctcgaagaagacgggaagaggaggagcgccggatgcaggaagaacggcgggctgcttgtgccgaaaagctgaaacgcctagatgaaaagtttggagctcctgataagagacttaaggctgaacctgccgcaccccctgctgcaccatccactccagcccctccccctgccgtgcctaaagagctccctgcccctcctgcgccaccccctgctagcgccccgacgccagaaaaggagcccgaggaacctgcccaggcacccccagctcaatccacccccaccccaggagttgccgccgcacccacattagtgtcaggcggaggaagcacctcttccactagctccggctcctttgaggcctcacctgtcgaacctcagttgcctagcaaggaaggcccagagccacctgaggaggttccgccccccacaaccccgcctgttccaaaagttgagcctaagggggacggtatcgggccaactcgacaacccccttcccagggactgggctatcccaaataccagaaaagtctgcctcccaggttccagcggcagcagcaggaacagctgctcaaacagcagcaacagcatcagtggcaacaacatcagcagggctctgctccccccactccagtcccaccgagtccgcctcagcccgttactctgggcgctgtacccgcgccacaagcaccgcccccaccaccgaaagcgctgtacccgggggctctgggtcgtccaccgccgatgcctccaatgaatttcgatcctcgatggatgatgatacccccttacgtagatcctcgcctgttacagggcagacccccccttgatttttacccaccaggcgtgcacccatccgggctggtgcctcgggagcgttccgatagcgggggctcttcctctgagccgttcgacagacacgcccctgccatgctccgggaacggggtactccacccgtggatcccaaattggcgtgggtcggtgatgtgttcaccgcaacgccagctgaaccgcgccccctcacatctccactgcgccaggcagcagatgaagatgacaagggcatgcgctccgaaactcctcccgttcctccccccccgccgtatctggcttcttaccctggatttcccgagaatggcgcccctggcccacccatttcccggtttccactcgaggagccaggtccccgacccctaccatggcctcccggctccgacgaggtcgctaaaatccagacacctccacctaagaaggaaccgcccaaggaagaaaccgctcagctgaccggccctgaagcgggtcgcaaaccggcacgaggggtcgggtctggcgggcagggccctcccccacccaggagagaaagtcggactgagacccgatgggggccaaggccagggtcatctcggagaggaattcctcccgaagaacctggcgctccgcctcgtcgcgccggtcccatcaagaaaccaccacctccgacaaaagtggaggagttaccacccaagccactggagcagggggatgagactccgaaaccacccaaaccagatcccttaaaaatcacaaaagggaagctaggtggccccaaggaaacccctcctaatgggaacctttcaccagctccgagactgcgacgtgattactcctacgaacgggtgggaccgaccagttgtcggggtaggggccggggtgagtattttgcacgcggccgtggattccggggaacctatgggggaaggggaagaggcgcaagaagccgagagttcaggagttatcgtgaatttcgaggggatgatgggagaggcgggggcaccggcggccccaaccatccgcctgctcctcggggtcgaaccgcatccgagacacggtctgaggggtcggagtacgaagagatccccaagcggcggcgccagcgcggatctgaaaccggaagtgagacacacgagtctgacctggccccatccgacaaagaggctcccacaccgaaagaaggtaccctcacgcaggtgccccttgccccacctccccctggggctccccccagccctgctcctgcgaggttcactgcaagaggtgggagggtgtttaccccccgcggcgtccccagccggcggggccgagggggtggtagaccccccccccaagtctgccccggatggagtccacccgccaaaagtcttgccccgaagaaacccccaacggggccccttccccccagcaaggaacccctcaaagagaaattgattccagggccactgtcacctgtagctcgaggagggagtaatggaggttcgaacgtggggatggaagatggtgaacgccctcggcgcagaaggcatgggagagcgcagcagcaggataagcctcctcgatttcgcagactgaaacaggagcgggagaacgccgccagggggagtgaaggcaagcccagcttaaccctacctgcttcagccccaggccctgaagaggcgcttaccaccgtgactgtggcaccagcccctagaagagccgcagctaagagtcctgatttgtccaatcagaattctgatcaggcaaatgaggagtgggaaacagccagcgaatcctccgattttacgagcgaacgaaggggggacaaggaagcaccaccccccgtcctgctcacccctaaggccgttgggacacccggcggcggtggcggcggagctgtccccggcattagcgccatgtctaggggggatctgagccagagagcaaaggacttatcgaagaggagctttagctcacaacgacccgggatggagaggcaaaaccgtcgacccggtccaggtgggaaagccggttcatccggaagttcaagcggtgggggtgggggtgggcccgggggacgcaccggtccgggccggggggacaaaaggtcctggccgtccccaaaaaacagaagccgccctccagaggaacgaccgccggggttaccactcccgcccccacccccttcttcctcagcagttttccgcctggaccaggtgatccactctaacccagctggaatccagcaggcactggctcagctaagttctcgccagggctctgtgacagcccccgggggccacccacgccacaaaccgggtccaccccaggcccctcaggggccctccccccggccaccaacgcgctacgaacctcagcgtgtgaatagtggactcagctctgatccacactttgaagaaccaggtcctatggtgagaggggtaggaggtacacctagggactccgcaggtgttagtccgttccctcctaaaaggagagagcgcccgcctcgcaagcccgagttgctccaggaagagtctctgcccccaccccattcttcaggatttctagggtccaagccagaagggccaggccctcaggctgaaagccgggacactggtacagaagccttgacgccacacatctggaatcgacttcacaccgcaacatcacggaagtcatacaggccttccagcatggaaccctggatggagcctttgagtccatttgaagacgtcgctggaacggagatgtctcagtctgacagcggtgtggaccttagtggggacagccaggtgtccagcggaccctgcagtcagcgctcctccccagatgggggactcaaaggcgccgcagagggaccgcccaaaagaccaggaggatcatccccacttaatgccgtaccatgcgaagggccccccggaagcgaacctccacgccgacctcctccggcaccccacgatggggaccgtaaggagctgcctcgagagcagcctctgcccccagggccaataggtacagaaagatcccagcatacagaccgaggcactgaaccaggtcccatccgcccttcccatagaccagggccccccgtgcagttcggcacatcagataaggactctgacttgcgactcgtggtcggggattctttaaaggccgagaaggagctgacagcctctgtgactgaggcaatccctgtttcaagggattgggagttgcttccctctgcagctgcttctgccgagcctcagtcaaagaacctggatagcgggcattgcgtgcccgagccctcttcatcaggacaacggctgtatcccgaagtattttatgggagcgctggcccctcttcttcccaaatttctggcggcgccatggactcccagttacaccccaacagcggaggcttcagacctggcaccccctcactgcatccttacaggtcgcagcctttgtacctgccaccggggcccgcccctccctctgcactgctgagtggggtcgcgctgaaagggcagtttctggacttctctaccatgcaagctacagaactcggcaagttgccggccggcggggttctgtatcctccacctagtttcctgtatagccccgccttctgcccatcaccactgcctgatacatcattactacaggtcagacaggatttacccagcccttctgatttctactccacaccgttgcaaccagggggccagtctgggttcctgccctcaggggcccctgcacagcagatgctcctgcctatggttgacagccaactacctgtggtgaacttcgggtcactgcctccggcacctccccccgcaccacccagtctgtctctattgccagtggggcctgcacttcagccgcccagcctggcagtccgacctccaccggcccctgcaactcgggtcctccccagccccgcaagaccctttcccgccagtcttggccgcgccgagctgcatcctgtagagttaaagcccttccaggattaccagaagctctcatctaatctaggcggccccggctcatcccgcaccccccccactggtaggtccttttccggcctgaactctaggctcaaagccacgccctctacgtactctggcgtttttagaacccagagggtggacttgtaccaacaggcgtcgccacccgacgcactgcgttggatcccaaaaccctgggaacgaaccggccccccccctagggagggtccttcaaggagagctgaggaaccgggttccagaggcgataaggaacctggcctgcctcctccacgatag

SEQ ID NO: 344389 - DNA, 6417 bp, Artificial Sequence
  derived and/or modified sequence
atgagcgaccggagcggccccaccgccaagggcaaggacggcaagaagtactcctcactcaacttattcgatacgtataaaggaaagtctttggaaatacagaagcccgccgtggcgccccgccacgggttgcaaagcctcggaaaggtagctatagccagacgcatgccgcctccagccaatctgcccagcctgaaggcagaaaacaaaggaaatgaccccaacgtcagcttggtccccaaagatggtaccggatgggcctccaagcaggagcagtctgatcctaagtcaagtgatgccagtactgcccagcctcccgaatcccagcctctccccgcttctcagacacctgctagcaaccagcccaagcgacctccagctgcgcccgagaatacgcccttagtgcccagcggcgtaaaaagctgggctcaggcctctgtcactcacggcgctcacggggacggaggaagagctagtagcctgttaagtcgtttttcaagggaagagttcccaacactccaggcagctggagatcaggataaagccgccaaggagagggagagcgctgaacaatccagtgggcctgggccaagtttacgtccacagaactctactacttggagagatgggggagggcgcggacccgacgaactcgagggtccggatagcaagctgcaccacggtcacgaccccagagggggcctccaaccttctggccctccacaatttcccccatacaggggcatgatgcctcccttcatgtaccccccctatctgccgttcccccctccttatggccctcaagggccttaccgctatcccaccccggacggtccctcgcgcttcccccgtgtggccggacctcggggtagtggtccgcccatgagactagtagagcctgtgggccgccctagcatacttaaggaggataatttaaaggagttcgaccaattagatcaagaaaatgacgacggctgggctggggctcacgaggaagtcgattataccgaaaaacttaagttcagcgacgaggaagatggccgtgacagcgatgaagagggggccgaggggcaccgagacagtcagagcgcctccggggaagaaagaccccctgaggccgatggcaaaaaggggaatagcccaaactctgaaccaccaactccgaaaaccgcgtgggctgagacctctaggcctccggagactgaaccaggccctccagcccctaagcctcctcttccaccacccggcgattacccagaccggggtggacctccttgtaaaccgccagcccctgaggatgaggacgaagcgtggcgccagcggaggaagcagtcatcatctgagataagtctggctgtggagagggcgcgacggcgcagggaggaagaggagcgccgaatgcaggaagagcgaagggccgcatgtgcagagaagttaaagcgtctggacgagaaatttggggctcctgataagagactgaaagctgagcccgcggcgccgcctgccgcacctagtacccccgccccacccccggcagtgccaaaggaactgcctgctccacctgccccaccgccagcctccgcccccacgcccgaaaaagagcccgaagaacccgcgcaagcgccaccagctcagtctacacccacccccggcgtagccgcagctcccaccctggtctcagggggtggctccacatcttccacaagctctggctcgtttgaggcctctcctgtcgaacctcagctgccaagtaaggaaggccctgagccaccggaggaagttcccccgcccaccacccccccagtccccaaagtggagcctaagggggacggtatcggtcccacccggcagccgcctagtcagggacttggatatccgaaataccaaaagtctcttccaccacgttttcagcgccagcaacaggagcagttgttgaaacagcagcagcagcatcagtggcagcagcatcagcagggctcagccccaccaacacccgtgcccccttcccctccacagccagtcaccctcggtgctgtgcccgccccccaggcaccaccgccaccgccgaaagccctttatccaggggctttgggaaggccccctcctatgccgccaatgaattttgatccacgctggatgatgataccaccctacgtggatccacgactgttgcagggaagaccgccccttgacttctatccccccggcgttcaccccagcgggttggtgccaagagagcgctcagatagcggtggctctagctcggagccattcgatcgacatgctccggctatgctccgtgaacgcgggacgcctcctgtcgatccgaaactggcttgggttggagatgtttttacagcaacccccgcagagcctcgaccactgaccagtccgttgcggcaagctgccgacgaggacgataagggaatgagaagtgaaactcctccggtgccccctccaccgccctatctggcaagttatcccggttttccagaaaatggcgccccaggcccccctatctcccggttcccgctggaggagcctggccctagaccgctgccttggccaccaggttccgacgaagtcgctaaaatccagacccctcctcccaaaaaagaaccacctaaggaggagaccgctcaactcacgggccccgaagctgggcgtaagcccgccagaggcgtcggaagtggtggacagggcccacccccgccccgccgcgaatcccgtaccgagactaggtggggtcctaggcccggatcgtcgaggcgaggcatacccccggaagaaccaggagcccctccccggagagctggacccattaaaaagcctcctccgccaacaaaggtcgaagagctcccccctaaacctttagagcaaggagatgagacaccaaagccgcccaaacctgatccactgaaaataaccaagggcaagctcgggggccccaaagagactcctccaaatgggaacctgagccctgccccacgtttaaggagagattattcatatgaacgggtggggcccaccagctgtcggggaagaggacggggtgagtattttgctagaggccgaggcttcagaggcacatacggcggtcgtggccgcggcgccgcgggcaatagcgccgtaacagagtcctttgaggaaatgatgggagtcgaggtggggcagggggaccagacaaccctgctcctaccagaggcggccctgccagctcgccatggcgcgcgcgtccagtctatgagaaagagcccgagcggagccggcagcggagcccagaagcaggccgcacgacctatgcgcgttatctggctgctgcaaacgcgtaggcttccccatccaagacgcgaacactctcctcggtccaggagccctaccactcgctcacccactttccctgcacctgcaaggtttacacccggggtcggcgaaagctccctccctgaggggatctctcccgggcctcgccgccgcgaacctccccaggtgtgccctggctggtcccccccagctaagtccctagcacccaaaaaaccgccaacagggccactgcccccaagtaaggaacctctaaaggaaaaattaatcccaggaccactatccccagtagccagaggtggatcgaatggtgggtccaatgtcgggatggaggacggtgaacgaccaaggcgaaggagacatgggagggctcagcagcaggataagccaccccggttcaggcgcttgaagcaggaacgagagaatgctgcccgtggctcagaagggaagccatccttaacacttcccgcctccgccccaggacccgaggaagccttaaccactgtaaccgtggcaccagccccaagaagagcagccgccaaatcacccgacctctccaaccagaactctgaccaggccaacgaagagtgggagactgcctcagaatcctccgacttcaccagtgagagacggggagataaagaagcgcccccacccgtgctgcttactcccaaggccgtcgggacgccagggggggggggtggcggggcagttcccggtatcagcgcaatgtcccgcggagatttgagtcaaagggctaaggacctgtctaagaggagcttttcgagtcagaggccaggtatggagcgacagaatcgtagaccgggccctggtggaaaggccggtagcagtggcagcagctccggcggcggtgggggcggacctgggggccgcacaggcccgggtaggggagataaaaggagttggccaagccccaaaaaccgatctcgtccacctgaggagagacctccaggactgcccttgccacctccgcctccttcatcctccgctgttttccgtttggaccaagtaatccactctaatcccgcggggattcagcaggccttagcccagctcagctccagacaaggcagcgttaccgccccaggggggcaccccagacacaaacctggcccgccacaggctcctcagggtcccagtccaagacccccaacccgctatgaaccgcagcgcgtaaattcgggtttgagctcagatccccattttgaagaacctggccccatggtcagaggcgtaggcggcaccccaagggatagtgcaggggttagcccattccctccgaagcggcgggagcgccctccccgcaagccagaactcctccaggaagagtcactcccgccgccccactcgagcggatttctgggctccaagccagagggtcctggacctcaggcagagtcccgagataccggcaccgaggcgctgacgcctcacatatggaaccgtttacacaccgccacaagcaggaagtcataccggcccagcagcatggaaccatggatggagcctctgagtcccttcgaagacgtcgctggcaccgaaatgtcacaaagtgacagcggcgtggatttgagcggagattctcaggtatcttcaggaccttgctcccagagaagttcgcccgatgggggccttaagggcgcagctgaagggcctcccaagcgtcccggaggatcctctccactgaacgctgtgccttgtgaaggccctccaggttcggagcctcctaggaggcctccacccgctccgcacgatggtgacaggaaagaattaccgcgggaacaaccgctccctccaggacctatcggcacagagcggtcgcaacacactgacaggggaactgagcctggacctattcgccctagccaccggcccggccccccagtacagtttgggacgagtgataaggattcagacctgcgcttagtggtgggagactccttgaaggctgaaaaggagctcaccgcatctgtgacagaggccatcccggtctccagggattgggaactgctgccatcagctgcagccagcgccgagccacagagcaaaaacctcgatagcggacattgcgtgccagagcccagctcgtcagggcagcgtttgtatcccgaggtattttacggatcagcagggcctagctcttcccagatcagtgggggtcacggcctgtctgttacatccaagcagtggcggagaccgggaactccaagcttgcacccgtatcggagccaaccactgtatcttcctccggggcctgctccaccctctgccttgctgagcggagttgcgctcaaaggtcagttccttgacttcagcacaatgcaggccacagagctgggcaagttaccggcaggaggggtgctctacccgcccccctcattcctgtactcacctgctttttgtccctctcccctccccgatacaagcctcctgcaagtgcgtcaggatctcccaagcccatcggacttttacagcaccccactgcaaccaggtggccaaagtggctttttgccttccggagcaccagctcagcaaatgttactgccaatggtggactctcagctgcccgtagttaactttgggagcttaccacctgcgcccccccctgcacctcctagcctgagcctcctgcctgtcggccccgctttgcagcctccaagcctggccgtacgccctccaccggccccggccacaagggtgctgccatcccctgcccggccgtttccggcttcccttggccgggccgagctgcacccagtcgagctgaaacccttccaggactatcagaagcttagtagcaatctgggaggtcctggttccagtcggacaccgcccaccggcagatcgttctccggactgaacagccggctgaaggccaccccatccacttattccggtgtatttcggacccagagggtggacctgtaccagcaggcctctccccctgacgctctacggtggatacccaagccgtgggaacggacaggtccaccgcctagagaagggcctagcagaagagcagaagagcccgggtcacgaggggataaggagcccggcctgccccctccacgatag

SEQ ID NO: 344390 - DNA, 6450 bp, Artificial Sequence
  derived and/or modified sequence
atgagcgaccggagcggccccaccgccaagggcaaggacggcaagaaatactcatctctgaacctgttcgacacatataaaggaaaatctctcgaaatccagaaacctgcagtcgcccctcggcacggactccaatctctcggcaaggtagccattgcccgcagaatgccacctccggccaacctgccgtccttaaaagcagaaaacaaaggcaacgacccaaacgttagcctggtacctaaggatggcacaggatgggcatcaaagcaagagcaaagcgacccaaaatctagtgatgcatccactgctcagccccctgaaagccaacccttaccagcgagtcaaaccccggcctcaaatcagcctaaaaggcccccagctgcgcctgaaaacacgccacttgtgccgagtggggtaaagtcctgggcccaggctagcgtgactcacggagcccacggcgatggaggtcgcgcttcttctcttctgtcccgcttttctcgggaggagtttcccacgctgcaggctgccggggaccaggacaaggctgcaaaggaacgtgagtccgccgagcagagttctggacctggtccttcattgcggccccagaacagcaccacatggcgtgatgggggggggcgcggtccagatgagcttgagggcccggattcgaagttgcatcacggacacgatcctcgcggtgggctgcagccttcagggcccccccaatttcccccttatcgaggtatgatgccgccgtttatgtaccccccctaccttccattcccgccgccctacgggccccaggggccatacaggtatccaactccagacggcccatctcgattcccccgcgtcgcgggaccgcgggggtcaggtcctccgatgagattggttgagccagtcggacggccttcgatcttgaaagaagacaatctcaaggaatttgatcagctggaccaggaaaatgatgatggttgggcaggcgctcacgaagaagtggactacaccgagaagcttaagtttagtgatgaagaagacggtcgggactctgacgaggaaggcgctgaaggtcacagagacagtcagagcgcatcaggcgaggagcgtccgcctgaggccgacggaaaaaagggtaattcaccaaatagtgaacctcctactcctaagaccgcctgggccgaaacttctcgccctccagaaaccgagcccgggccacctgctccaaagcctcctcttccaccgcctcatcgcggcccagctgggaactggggcccacccggtgattaccctgatcggggaggaccaccatgcaagcctcccgcacccgaggatgaagatgaggcctggagacagagacgtaagcagagcagttctgagatctcacttgcggtcgagcgggccaggagacgccgagaggaagaggaaagaagaatgcaagaggagagaagagcagcttgtgccgagaagctcaaacggctggatgaaaagttcggcgcacctgataagcgcctgaaggctgaaccggcagcacctcccgctgcgccaagcactcccgccccaccccctgccgtacccaaggaactgccggccccacccgcccctccccctgcctcggccccaaccccagagaaggagcctgaagaacctgctcaggctccccctgctcagagcacccccacaccaggtgtggctgcagccccgacacttgtatcaggtggcgggtccacatcgtcaaccagttccggttccttcgaggcatcccccgtggaacctcagttaccttctaaggagggaccagagccgccagaggaggttccgccccccactacgccaccggtacctaaagtcgaaccaaagggggacgggatcgggccaaccagacagccccccagccaaggcctggggtacccaaagtaccagaaatctctgcctccacggtttcagcgccaacagcaagagcagctactgaaacagcagcagcagcaccagtggcagcaacaccagcaggggtctgcccccccaacccccgtgcccccctccccacctcagcctgtgacactgggagctgtcccagcgccgcaggctccaccccctccccctaaagctctgtacccgggtgcgttgggaagaccaccccctatgccacccatgaatttcgacccaagatggatgatgatccctccatacgtggatccccggctgttgcaaggtcgcccccctttagacttttatccacccggcgtccatccgagcgggctggtgcctcgggaaagatccgatagcggaggcagttcatcagagccttttgatcggcacgcgccagccatgcttcgagagcgtggcaccccgcctgtcgaccccaaacttgcttgggtaggcgacgtgtttactgccaccccagccgaaccgaggcctctcacgtcccctttgcggcaggcggccgatgaggatgataaggggatgagatctgaaacaccgccggtgccccccccccccccataccttgccagctaccctgggttcccagagaatggggctcccggaccacctattagcaggtttcccttagaggagcccgggccgaggcccctgccctggcctccaggatcggatgaagtggcaaaaattcagactccccctcccaagaaagagccccccaaggaagaaactgcacagttaactggacccgaggccggacgaaagccagcacgcggagtgggcagcggtggccagggcccaccgccccctcggagagagtcccgcacagagacacggtggggtccacggccaggttcctcccgtcggggaatcccacctgaagagcccggggccccgccaagacgcgctgggcccataaagaagcccccaccgcctacaaaagtcgaggagctgccacctaagccgttggagcaaggggatgagacccccaaacctccaaaacccgatcccctcaagatcacaaagggaaaactaggcggccctaaagagacaccccccaatggtaacctgtccccagcaccacgcctgagacgcgattactcttacgagcgagttgggcctacatcttgcagaggtcgtggaaggggggagtattttgctcgggggcggggtttccggggtacatatggagggcgtggaagaggggccgctggcaactccgcagtgactgagagcttcgaggagatgatgggtgttgaagtaggccagggagaccagacgacccttctgctaccggaggcggctctgccggcccggcacggggctcgcgttcaatccatgcgcaagtccccatccggcgctgggtccggagcacagaagcaagccgcaaggcccatgagggtaatctggctgctgcagactcggcgactaccacatccgagacgtgagcacagccctcggtcacgatccccaacaactcggagtccgacctttccagccccagctcgattcactcctggggtgggggagagttcactgccagaaggtatcagcccgggtccacggaggagagagcctcctcaggtgtgccccggttggagtcctcctgctaagtcactcgcaccaaagaaaccgccaaccggacccctgcctccaagcaaagaaccactaaaggagaagctgattcctggcccgttgagtcccgtggccagaggaggatccaatggggggagcaatgtaggcatggaggatggggaacgcccacgccgtcggcggcatggaagagcgcagcagcaggacaaacccccaagattcagacggctgaagcaggaacgagaaaacgctgccaggggctccgaaggcaaaccgtcactcacgctccctgctagcgctccaggccccgaagaggctctgacaacagttaccgtggctccagcccctcggagggccgccgcgaaatctcccgatctgagcaatcaaaattccgatcaggctaacgaggagtgggaaactgccagtgaatcctccgacttcacatcagagcgccggggagacaaggaggccccacctccagtactccttacacctaaagccgtgggaacccctggtggaggcggtggcggagccgtgcccggcatctctgccatgagccggggggacctgtcacaaagggccaaggatctgtctaaaaggtcattttcctcacagcgccccggcatggaacggcagaatcggagacccgggcctggcgggaaagcgggttcctctggaagctcttccgggggggggggaggaggcccagggggtcgtaccggtcccggcagaggcgacaaacgcagctggccctcccccaaaaatcgctcgcggcctcctgaggagcgtccccctggcctgcctcttcctccaccacccccgtcatcgtccgccgttttccgtctggaccaggtcattcatagtaatcccgctggcatccagcaagcgctcgcgcagctgtcatcacgacaaggatctgtaactgcgcccggcggtcaccctcggcacaagccagggccccctcaagcccctcaggggccaagcccaaggcctcctactagatatgaacctcaaagggtcaactccgggctgtccagtgatccacatttcgaggagcccggcccgatggtgagaggcgtagggggtactcccagggatagtgccggcgtgagtccctttccacctaagagacgcgagcgccctcctcgaaagcctgagctcctacaggaagaatctctgcctcctccacactcatccggcttcctggggtctaaacctgaggggcccggaccccaggcagaatcacgtgacaccggtactgaggctctcacaccccatatatggaaccggctgcacaccgccacatctcggaagagttatcgcccaagctcaatggagccatggatggagcctttgtctcccttcgaagacgtggcgggaactgaaatgagtcagtcagacagcggagtggatctcagcggagactctcaggtatctagtggaccttgcagtcagagaagttcccccgatggaggcctgaaaggtgccgctgagggaccacctaaaagacccggtggttcaagtccactgaacgctgtaccctgtgagggtcccccaggctcagagccccccagaaggccacctcccgcgccacacgatggtgaccggaaggaacttccaagggaacagcctctgccccctggtccaatagggacggagcgtagtcagcatacagacagaggcacggagccgggaccaataagacccagtcaccgtccagggccccccgtgcagttcgggacaagtgataaagattctgacctcaggttggttgtgggcgattcattgaaggcggaaaaggaactgaccgctagcgtaaccgaagccatcccggtgagccgagactgggagttactgccttcagccgccgcctctgccgaaccacaatcaaaaaacctcgattctggccactgcgtccccgagccgagtagttccgggcagcggctatatcccgaggtcttctacggctccgcagggccctcatcctctcagatcagcgggggtcacggcctcagtgtgacatccaaacaatggcgtcgtcctggcacaccgtctttacacccataccgctcccagccactctacctacctcccggtccggcccctcctagcgccctgctgtccggggtggctctgaagggtcagttcttggacttttccacgatgcaggccacagaactagggaagctgccggccggcggagttctgtacccgccaccctcttttctgtactctcccgcattttgtccttcgcccctgccagacacaagccttttgcaggtgcgccaggatctccccagcccgagcgatttctattctaccccacttcagccagggggacagtccggtttcctgccttccggcgccccagcacagcagatgctgcttcctatggttgactcacagctgcccgtggtgaattttggttcgcttccccctgccccaccgcccgcgcctccttccctgtctttgctcccggtgggacccgcactgcagcctcccagtctggccgtacggcccccgccagctcccgccacaagggtgctgccgtcacccgctcgtccatttccggcaagtctgggaagagccgaattgcatcccgttgaactgaagcccttccaggactatcagaaactctccagcaacctcggtggacccgggagttcccgaaccccaccgactggccggtctttcagcggactgaacagccggctcaaagccaccccttcaacatacagtggcgtcttcagaactcagagggtggacttgtatcaacaggcctcccctccggacgccctacgatggatacctaagccttgggaaagaaccggtcccccaccccgggaaggcccctcccggcgcgccgaggagcccggatcccgaggcgacaaggagcctggtctccccccacccaggtag

SEQ ID NO: 344391 - DNA, 4149 bp, Artificial Sequence
  derived and/or modified sequence
atgctgcgggagcggggcaccccccccgtggaccccaagctggcctgggtaggggatgtcttcaccgccactcctgcggagccacgacccctaacctctccacttagacaggccgcggacgaagacgacaaaggcatgagaagcgagacccctccggtcccacctcctcccccatatctcgcgtcttacccgggctttcccgaaaacggcgcgcctggcccaccaatttctcggtttccactcgaggagcccggccctaggcccctgccttggccacccggcagcgacgaagtggctaaaattcaaacaccacctccaaaaaaggagccccctaaagaggagacagctcagctgacagggcctgaagcaggacgcaaaccagctcgtggagtggggagcggagggcagggcccacccccccctagacgcgaaagccggacggagacccggtggggcccccggccaggctcaagcagaagggggattcccccagaagagcccggagctccccctcgaagggccgggcccatcaaaaagccaccaccgcctacaaaggtggaagaactcccgccgaagcctctcgagcagggggatgaaacgccaaaacctcccaagccagatccccttaagatcaccaaggggaagctgggggggccaaaagaaactccccccaacggaaatctgtcacctgccccgcgtttgaggagagactatagttacgagagggtcggccctacctcttgcagagggcgcggacgcggcgagtacttcgcccgtgggaggggattccgcgggacatacgggggtcggggccgaggggctcgaagtcgcgagttcaggtcataccgtgaattccggggagatgacggtagaggtggcggtaccggcggacctaaccacccaccagcccctagaggccgaacagcctctgagactagatctgagggttcagagtacgaggaaattcccaagagacggaggcagagaggatcagaaacaggctctgagacacatgagagtgacctggcaccaagcgacaaagaagcacccactcctaaagagggaaccctgacacaagtgccgctggcccctccaccccccggcgcacctccgagccccgcccccgcacgctttaccgctagaggaggaagggttttcacgcctaggggagtgccatcccggcgtggcagaggcgggggcagacctccccctcaggtctgccctgggtggtctcctcccgccaagagcctcgcgcctaagaagcctccaactggccctttaccacccagcaaggagcccctcaaggagaagctgatacccggaccactgagccccgtcgctcgcggcggttctaatggcggatccaatgtaggaatggaggacggcgaaaggccacgtcgtcgccgtcacggacgggctcagcagcaagacaagcctccacggttcaggaggctgaagcaggagagggaaaatgcagcccggggctcggaagggaagccgagccttacgctgcccgcttcagctccgggccccgaagaggctctaaccaccgttactgtggcacccgcccctagacgggccgcagccaagagccctgatctgagcaaccagaattctgatcaggctaatgaggagtgggaaactgcatctgaatctagcgatttcacgtccgagcgccgcggagacaaagaagccccaccacctgtgctactcacaccgaaagcagtgggtacgcctggcggaggcggcggcggggctgtacccggcatcagcgcaatgagtcgcggagatctgtctcaacgggcgaaagacctgagtaagcgctcgttctccagccagcgcccaggcatggaacgccaaaaccggcggcccgggcccggtggcaaggcagggtcaagcggcagttctagtggcggtggcggaggcggaccaggaggcagaactggaccgggccggggggacaagcgatcctggcccagtcccaagaataggagtaggcctccagaggaacgacccccagggctgcctcttcctcctcccccaccctcaagctccgccgttttcaggctggatcaggtcatccattccaatccagctgggatccagcaggcgttggcacagctcagttctcgccagggcagtgtaaccgcaccgggcgggcatccacgccacaaacccggcccccctcaagcaccacagggcccatcccctaggcctcccactcgttatgaacctcagagagtcaactcaggtctgtcctcagaccctcattttgaggagccaggaccaatggtgaggggcgttggtggcaccccgagggactcagcaggcgtctctccatttcctccaaagaggagagagcgaccacctcgtaagccagaactgcttcaggaagagagccttcccccgccgcatagctcaggatttcttggttcaaagcctgagggaccgggaccgcaggcggagagccgcgataccggcactgaagcactgacccctcatatatggaaccgcctgcataccgcaacctctcgaaaatcttataggccatcctctatggagccttggatggagccactcagcccattcgaagacgtggccgggactgagatgagtcagtctgacagtggggtggatctctccggagattctcaggtctcttcaggcccatgtagccagcggtcatcccccgatggcgggctgaagggcgcggctgaaggtccaccaaagcgccctggaggaagctcacccctgaacgccgttccttgtgagggacccccggggtcagagccaccacggcgaccccctccggcgccccatgatggggacagaaaagagctcccccgcgaacaacctctgcccccaggcccaattggcacagagcggtctcagcacacagatcgggggacagagcccggccctatccggcctagccacagaccagggccacctgtgcagtttggtaccagcgataaagatagcgacctgagacttgttgttggagacagtctgaaagccgagaaggaactgacagcttcagtgacagaggccattccagtgtctcgagactgggagttgctgccgagcgccgctgcatctgctgaaccccagagcaaaaacctggacagcggacactgtgttccagagccaagtagctctggtcaacggctctacccggaagtattttacggctccgcgggaccctccagctctcagatctcaggtggagcaatggattcacagctgcaccctaatagcggtgggttcaggccagggacccccagtttacacccctacagatcccagcctttgtacttgcccccaggtcccgcaccgccatccgcactgctgtccggagtagcgctcaaggggcaattcctcgattttagcaccatgcaagccacggaactgggcaagctaccagccggcggagtcctttaccccccgcctagcttcctgtattcacctgctttttgcccttcccccctgccagacactagcctgctccaggtgagacaggatctgccatctcctagtgacttttacagcactcccctgcaaccaggtggacagagcggtttccttccctccggggccccggcccagcaaatgctgcttcctatggtcgattcacagctgccagtggtgaactttggatcactgccgcccgcgcccccacctgcccccccaagtttgagtctactacccgttggaccggccctacaacctccttcccttgcagtcaggccaccgcctgcgccggctacccgagttcttccgtcgcctgcccggccatttccagccagcctaggtagggccgaacttcatccagtggagttaaagcctttccaggattatcagaagttatctagcaatctggggggcccaggaagctctcggacacctcctacgggacggtctttcagcggtttgaactctcgcctgaaggctacaccctctacatactccggggtgtttaggactcagagagttgacctttaccagcaggccagcccaccagatgccctgaggtggattcccaagccatgggaaagaacaggtccccctcctagagaggggccaagtcgccgcgccgaggagcccggcagccgcggagataaggagcctggtctgcctcccccccggtag

SEQ ID NO: 344392 - DNA, 6417 bp, Artificial Sequence
  derived and/or modified sequence
atgagcgaccggagcggccccaccgccaagggcaaggacggcaagaaatatagctccctgaacttgttcgatacgtacaaaggcaaatctctggagattcaaaaaccggctgtggctcctaggcacggcctgcaaagcttgggtaaagtcgcgatagcccgtcgaatgcccccccccgccaacttgcctagcttgaaggccgagaataagggcaatgaccccaacgtgtcactagtgccaaaggatggcaccggctgggcgtccaagcaggagcaatccgaccctaaatctagtgacgcatccacagcccagccacccgagagtcagcccctccctgcctcacaaacccccgcgtctaaccagcctaaaaggccacccgcagctcccgagaacacccccctggtcccttccggggtgaagtcatgggcccaagcttcagtgactcacggagcacacggcgatggaggccgagcctcttcactgttgtcccgcttctcccgcgaggaattcccaacactccaggctgctggtgatcaggataaagccgccaaagaacgcgagagtgctgagcagtcctccggccccgggccttccctgcgtccccagaattcaacaacttggcgggacggaggcggaaggggtcccgatgaacttgaaggtcccgattccaaattacatcatggacacgaccccaggggcggactgcagccgagtggaccccctcaattcccaccctacaggggtatgatgccgccattcatgtatccgccctatctgccctttcccccaccctacggacctcagggcccatacaggtatcccacacccgatggacctagccgctttcctcgggtggccggtcccagaggtagtggaccccctatgaggctggtggaacctgtgggcaggccaagtatcttaaaagaggataacctgaaggaattcgaccaacttgaccaagaaaacgacgatggctgggcaggtgcacacgaagaagtggactacacagaaaaattgaaattcagcgacgaagaggacggccgggatagcgacgaagagggcgccgaagggcaccgggactctcaaagcgccagtggcgaagagcgtcctccagaagcagacggaaagaaaggaaactcccctaactccgaaccacccacccctaaaacagcctgggccgaaactagtagacctcctgagactgaacccggtccccctgctccaaagccaccactgccccctccaggagattacccggataggggaggccctccctgtaaacctcctgccccagaggacgaagacgaggcctggcgccagagaagaaaacagtctagctcagagattagcctggcagtcgagcgcgcccggcgtagacgcgaggaagaggagcggcggatgcaggaggaacggcgcgcagcttgcgccgagaaacttaagaggttggatgagaaattcggagccccagacaaacggctcaaagcagagccagctgcccccccggccgcaccaagcactccggcccctccccctgccgtgccgaaagaactacctgcgccacctgccccacctccagcttctgccccgaccccggagaaggagcccgaggagcctgctcaggctccacctgctcagtctacccccaccccaggggtggccgcagcgcctacgttggtctcggggggaggtagcacttccagcacatccagcggctcatttgaagcctccccggtggagccacaactgcccagtaaggaaggtcccgagccgccagaggaagtgcccccacctacgacacctccggttccaaaggtcgagccaaagggtgatgggattgggcccactcggcagccaccctcccaaggtctaggatatcccaagtatcaaaagagcttgccccctaggttccaacgtcagcaacaagaacagctcctgaagcagcagcagcagcaccaatggcagcagcaccagcagggcagcgcaccaccgactcccgtgcccccttctcccccccaacctgtaaccctcggcgctgtgcccgctccacaggctccacccccaccccctaaagccttatatcctggcgctttagggagacccccccccatgccgccaatgaatttcgaccctagatggatgatgattcctccgtacgttgacccgagattgctccaggggcggccccccctggatttctacccccccggtgtacacccttccggcctggtaccccgggagcggtcagacagcggagggtccagcagtgagccttttgacagacacgccccagctatgctccgcgaaagaggaaccccacccgtcgaccccaaactggcgtgggttggagacgttttcacagccactccagcagagcctcgcccattgacaagccccctgagacaggcagccgacgaggatgacaaaggcatgcgttctgaaacaccgcccgtgcccccccccccaccttatctcgcctcttaccctggattcccagagaacggcgcccccggcccccctatctcccggtttcctctggaagagcctggccccaggcccctgccatggccaccaggctcagacgaggttgccaagattcaaacacctccacccaagaaggagcctccaaaggaggaaaccgctcagctgacaggccccgaggccggtcgtaagcccgctcggggcgtcggatcgggggggcagggcccaccaccgccaaggcgtgaaagtcgcaccgagacccggtggggccctagacccgggtcgtcaaggcgtgggatccccccggaggagcctggcgcgccccctaggagggctgggcctattaaaaagccccccccacccacgaaagttgaggagcttccaccaaagcctctcgagcaaggggacgaaacacccaaacccccaaagcctgacccattgaagattactaaggggaagttagggggaccaaaggaaacgccaccgaatggcaacttatcaccagcacctcgactgaggagggactacagctacgagcgagtgggcccaacgtcctgccggggccggggtagaggcgaatactttgcgcggggaaggggctttcgtgggacctatggagggagggggagaggggcagctggcaattcggctgtaaccgagtctttcgaggaaatgatgggcgtggaagtgggccagggcgaccagaccacactgttgctgcccgaggccgcattacctgccaggcacggtgcgcgagtgcaaagcatgaggaagtctccgagcggtgccggctccggggctcagaagcaagctgcacgcccgatgcgcgtaatctggctactgcaaacgcggcgtcttccccacccaagaagggaacactcgcccaggagccgcagtcccactaccaggagcccgacttttcctgccccagcccgttttactcctggtgtgggagagtccagtctccctgagggtatttctccagggccaaggaggagagagccacctcaggtgtgccccggctggagcccccctgcaaaatcactcgctcccaagaagccaccaacaggacccttgccgcccagcaaagagcctctgaaggagaagcttattcccggcccactctcacccgttgctaggggcggcagcaatggggggtccaatgtcggcatggaagacggtgagaggcccagaaggcggcgccacggcagggctcaacagcaggataaaccaccgagatttagacgattaaagcaggaacgggagaacgccgctaggggttcagagggtaagccaagcctgaccctaccagcctctgctcccggccctgaggaagcattgaccactgttaccgtcgcccccgccccccgcagagccgccgcgaaatccccggacctgtccaatcagaattccgatcaggcaaatgaagagtgggaaaccgcctccgagtcaagtgactttacgtcggagagacggggcgacaaggaggcaccaccaccggtcctactgacccctaaggcagtgggaacccccggcggcggaggcggaggagcggtgcctggaatctctgctatgtcgagaggcgacctgtcccagcgtgcgaaagacctatccaagagaagctttagtagtcagaggccaggtatggaaaggcagaaccgccgacctggccccggcggtaaagcaggcagcagtggctcctcctcaggcggaggtggcggaggtcccgggggccgcacgggaccaggcaggggcgacaaacggtcctggccctccccaaaaaacaggtcgcgccctcccgaagaacgccctcccgggctgcctctgccaccaccacctccatcatcctcggctgtattccgtcttgaccaggtaatccactcaaacccagccgggatccagcaggccctggcccagctctcgagtaggcagggtagcgtcaccgcccccggcggacacccaagacacaagccgggacctccacaggcaccccagggtccatctccaagacctccaacccgatatgaaccgcagcgcgttaatagcggcctctctagcgacccacactttgaggagccaggccctatggtacggggcgtcggcggcacaccgagggatagcgccggtgtctcacccttccctccaaagagacgcgagcgcccacctagaaaaccagagctcttgcaggaggaaagcctccccccaccccatagcagcggattcctgggatcaaagccagaagggcccggcccacaggctgagtcccgtgacacaggcaccgaagctcttacaccacacatttggaatcgcctgcacaccgccacttcccgcaagtcatacaggccaagtagcatggaaccctggatggagccactcagcccttttgaagacgtagctgggactgaaatgagtcagagcgatagtggagtggatttgtccggcgacagccaggtttcgtctggtccctgttctcagcggagttctccagatgggggattaaaaggggcagcagagggccctcccaagcgcccaggtggctcctcacccttgaatgctgtcccgtgtgaagggcctcccgggtctgagcctcctcgccgaccaccacctgccccgcacgatggggacagaaaagagcttcctcgggagcaacctctgccccccggacccatcggaacagagaggtctcaacacaccgataggggcacggagccagggcccattcgcccatcccacaggccgggtcctcctgtgcagttcgggactagtgataaagactctgacttgaggttggtggtcggggacagtctcaaggctgagaaagagttaactgcctctgtaacagaagcgatccccgtgtcacgcgattgggagcttctgccctcagccgcagccagcgcagaaccacagagcaaaaatctagactcaggtcactgcgttcccgagccatcttcaagcggccagaggctgtatccagaagtgttttacggcagcgccgggcccagcagtagtcagatcagcggcggccacggtctgtcagttacatctaaacagtggaggcggcctgggacaccttcattacatccataccggtcccaaccactttacttgcccccaggaccggcacctcctagcgctttactgtcgggtgtcgccttgaagggccaatttcttgatttttctacaatgcaggctaccgaactcggcaagctgccagcgggaggggtcctttaccctcccccatcctttctgtactcacccgccttctgtccaagcccacttcccgatacaagtctgctccaagtacgacaggatttaccttctccgtccgatttctattctacaccccttcagcccggtggccagtcagggtttctcccttcaggtgcccctgcgcagcaaatgcttctgccgatggtcgatagtcagctccctgtggtcaatttcggctctcttccccctgctccaccacctgctcccccctctctgtcccttttacccgtgggacctgcgctccagccacctagccttgccgtccgtcccccacccgcaccagctacccgtgtgctcccctctcctgccagacccttccctgctagtctgggtcgggctgagttacacccggttgaattgaaaccatttcaggattaccaaaaattaagctctaatctgggagggcctgggtcgtcaagaactccgcccaccggacggagtttttcagggcttaatagtcggctcaaggctaccccttcaacatacagcggcgttttcaggacccagcgagtggacctataccagcaggcttcaccccctgacgcacttcgttggattcccaagccctgggagcgaacgggtccaccacccagagagggacccagtcggcgggccgaagaaccaggcagccgcggagacaaagagccaggcctgccacctccccgctag

SEQ ID NO: 344393 - DNA, 6417 bp, Artificial Sequence
  derived and/or modified sequence
atgagcgaccggagcggccccaccgccaagggcaaggacggcaagaagtacagcagcctgaacctctttgacacatataaaggaaaaagcctcgagatacagaagccagccgtagcccccaggcatggcttgcaatctctcgggaaggtggcaatcgctcgtagaatgcccccacccgccaacctcccatccctgaaggcagagaacaaaggaaacgacccaaatgtctctctcgtgcccaaagatggcaccggctgggcctccaaacaggagcagagtgaccctaagagctccgatgcctcaactgcccagccgcctgaaagccagcctttgccagcaagccagacaccagcatctaaccaacctaaaagacctcctgctgccccagaaaacactccactcgtccctagcggagtcaaatcatgggcgcaagcttctgtgacccacggcgcccacggagatggcgggcgcgccagtagcttgctttccaggttttcaagggaggaatttcctaccttgcaggctgcaggcgaccaggacaaggcggcgaaggagcgggagtcggccgagcagtcctccgggcccgggccctctctcaggccacagaacagcaccacatggagggacggcggcgggcgaggtccagacgaactcgaggggccagactcaaaactccatcatgggcatgacccccggggggggctgcagccttcaggccccccccagttcccgccataccgcggcatgatgcccccgttcatgtacccgccgtacttacccttcccccccccctatggtccccagggaccatatcggtatcccactccagatggcccaagtaggtttccgagagttgccggcccgagagggagtgggcctcccatgaggctggtcgagcccgttggaaggccttcaatattgaaagaggataatctgaaagagtttgaccagttggatcaggagaacgacgatgggtgggcaggtgcccacgaggaagtagattacacggaaaaattaaagttcagcgatgaagaggatggtagagattccgacgaggagggtgcagaagggcacagggacagccaatctgcaagtggcgaagaaagacctccggaagccgatggcaagaaggggaactcaccaaattccgaaccccccacccccaagaccgcttgggcagagaccagcagacctccagagaccgagccaggccctcctgcccccaaaccacctctcccaccacccggtgattaccctgaccgcggtggaccaccctgcaaaccccccgcccccgaggacgaggacgaagcttggaggcagagacggaagcaatccagctccgaaattagcctcgcagttgaacgcgccagaaggaggagagaggaggaggaacggagaatgcaggaagagcggcgggcggcatgtgctgagaaactcaagcgtctggacgagaaattcggtgctccagacaaacgcctcaaggccgagccagctgcaccgccggcagcaccatccacgccggctcccccccccgccgtgcctaaggagctgcccgctccacccgctccacctcccgcttccgcaccaaccccagaaaaggaaccggaggaacccgcacaggctcctcctgcccagagcactccgacgcccggagtggccgccgccccaaccctcgtctcaggaggggggagcaccagcagcacctcctccggttcatttgaggcctcccccgtggaaccccagctgcctagcaaagagggacctgagccacctgaggaggttcccccacctactaccccgcctgtcccaaaggtagagccgaagggcgatggaattggaccaaccaggcagccccccagtcaggggctcgggtaccctaaataccagaagtcactgccacccagattccagagacaacagcaggagcagttgctaaagcagcagcaacagcatcaatggcagcaacatcaacaaggtagcgccccgccgacacctgtcccaccctcccccccacagcctgtgacactgggcgctgttcccgctccacaagctcctcctccacccccaaaagccctgtaccccggtgcccttggcagacctcctcccatgccccctatgaatttcgatccccgctggatgatgatccctccttacgttgacccaaggctccttcaagggcgccctccccttgacttctatccacctggagtgcacccgagtggcttggtgcctcgggagagatccgattcgggtggatccagctccgagccctttgatcgacacgctccagcaatgctgagggagcggggtactcctccagtggaccccaaactggcctgggttggcgacgtgttcaccgcgactcctgctgaacctcgcccactcacatcacctctgaggcaggccgccgacgaagacgataagggcatgcgctccgagacccctcccgttcccccaccacccccttatctggcttcctatccaggatttccagaaaatggagctccaggcccacctatttcgcgatttccactggaagagcccggccctagaccgttaccgtggccccccggaagtgatgaggtcgctaagatccaaacgccccccccaaagaaggagccaccaaaagaagaaacggcacaacttaccggccccgaggccggcagaaagcccgccaggggagttggatccggcggtcaaggcccccctcccccaagacgggagtcacgcacagagaccagatgggggcccaggccaggatcctcccgaagaggtattccgcctgaagagccgggggctcccccccgcagagccggcccaatcaagaaaccaccaccgcccacaaaagtcgaagagctcccccctaaacccctcgagcagggcgatgagacgccaaaaccacctaagccagatccgctgaaaatcacaaagggcaaactgggaggccctaaagagacaccgcccaacggtaacctgagtccagccccccgcctacgacgggattattcatatgaaagggtcggacccacatcttgccgaggcaggggccggggtgaatatttcgctagaggcagggggtttagaggcacctatgggggtcgaggccgcggcgccgcaggaaactcagccgttacggaatcattcgaggagatgatgggagtggaggtgggacagggcgaccagaccactttgctgttgccggaagcagcccttccagccaggcatggcgcccgggtccagtccatgaggaagagtcccagcggagcagggtccggtgcacaaaagcaggcagcccggcctatgcgtgtcatttggcttttacagaccagacgcctcccccaccctaggcgggagcactcaccgaggtcgagaagccccacaactaggagcccaacctttcctgctccagctaggttcacacccggtgtgggcgagtcgtctctccccgagggaatctcgcccggaccaaggagacgggaaccccctcaggtctgtcccgggtggtctcccccggctaagtctcttgcccccaaaaaaccaccgactgggcccctgcctccaagcaaggagcccttgaaggaaaagctgattccaggaccactctctcctgtcgctcgtggcggtagtaatggcggatccaacgtaggaatggaagacggcgagcgccctcggaggaggaggcacggtagagcacaacaacaagataaaccgcccagattcaggcgtctcaaacaggagcgcgagaacgccgcccgagggagcgagggcaagccctctctcacgcttcctgcgagcgctccggggccggaggaagctcttaccactgtgaccgtcgcacccgcaccccgccgcgctgcagccaaatctcccgacctcagcaaccagaactcagaccaagccaacgaagagtgggagaccgcctctgaatcttccgatttcactagcgaacgtaggggagacaaagaagccccccctcccgtgcttttgaccccaaaagccgtaggtacaccaggtggcggaggcggcggggctgtgccgggcatctctgccatgagcaggggtgacctaagtcaaagggcaaaggacctgtccaaaaggagctttagctctcagcgccctggtatggagaggcagaatcgcaggcccggccctggaggcaaggccggcagtagcggttcctctagcggtggcgggggagggggccctggcggacggaccggacccggcaggggcgataaaaggagctggccctctccaaagaatcgctcccgaccccctgaggagcgtcctcccggactaccgctgcctcctccacccccatcttctagcgctgtgttccgccttgaccaggtgatacactctaacccagccgggattcagcaagctctggcccaactttctagcagacagggaagtgttacagcccccggaggccatccacgccataagccgggtccaccgcaagcccctcaaggtccatcaccgcgcccccctacaaggtacgagccacagcgggtcaactccggactgtccagcgatccgcacttcgaagaacccggacctatggttcggggcgtcgggggaacccctcgggactccgcgggagtgtcacccttccctccaaaacggagagaacgaccaccacggaagcccgaattgctccaggaggaatccctacctcctccacatagctcaggatttctgggctccaagccagaaggcccgggcccacaagcagagagcagggataccggaactgaagctctgacaccacacatctggaaccggcttcacacagccacgagccggaaaagttaccgtccttcgtccatggaaccatggatggagcccctctcccctttcgaagacgtcgccgggactgagatgtcccagagcgattccggagttgatttatctggcgatagtcaagtcagtagcggtccttgcagccagcggtctagtccagacggaggcttgaagggagcagctgagggacctcccaagcgacctggtggcagctcacccctcaacgccgttccatgtgagggaccacctggatccgagcctcctcgacggcctcccccagccccccatgacggcgatcggaaggagctaccacgagagcaacccctcccccccggacccattggaactgagcgatctcagcatactgatagagggaccgaaccgggacctattagacccagccaccggcccgggcctcctgtgcaattcggcacaagcgataaggattcggatctgaggctggttgtcggtgactccttgaaggcagagaaagaactgactgctagcgtaaccgaggcgatcccagtaagccgtgattgggagctgctaccctcggctgcagcctctgccgagcctcagagcaagaacctcgattcaggacattgcgttccagaacctagttcttcggggcaacggctgtaccccgaagtcttctacggctcggctggcccaagtagtagccagatctccggtggacacggcctttccgttacatcaaaacagtggagacggcctggaacccctagcctccatccataccggtcccagccactgtacctgccgccagggccagcacctccctctgcgctgctgtcaggggtcgctctaaagggtcagtttctggacttctccacaatgcaggcaaccgaactcggaaaactcccagccggcggcgttttgtatccacctccctccttcctctactcacctgctttctgtcctagcccgctcccggacacctctcttttacaggtgcggcaggacctgccctcaccgagcgacttttacagtacccccctgcagcccgggggtcaatccggctttctccctagtggggcgcccgctcaacagatgctgttgccaatggttgattcgcagctgccggtggtgaatttcggctcactgccaccagcaccccctccagctcctccatcactgtctctattaccggtgggccccgcactacagccgccgtccttggctgttcggccccctcccgcaccagctaccagggtgctaccttccccagcccgcccatttcctgcctcacttggtcgagctgaacttcaccccgtggagctaaagccctttcaggattatcaaaaactgtctagtaacctgggaggccctggcagcagccgaacccctcccacagggaggagcttttcaggactcaattctagactcaaagccacaccaagtacctactccggagtgttccgaacacagagggtggatctctaccagcaggcgtcacctcccgatgcattgagatggatccctaagccttgggagcgaacaggcccaccaccacgcgaaggccctagccgccgggccgaggagccgggtagtagaggtgacaaggaacctggcttaccccctccaaggtag

SEQ ID NO: 344394 - DNA, 6450 bp, Artificial Sequence
  derived and/or modified sequence
atgagcgaccggagcggccccaccgccaagggcaaggacggcaagaagtactccagccttaacctctttgatacctacaaaggaaagtcgctcgagattcaaaaacctgcagtggctcctaggcacggactccaaagtcttggaaaagtcgccatagcccgcagaatgcctcctcccgcaaacctgccatccctgaaggcggagaataaagggaacgatccgaacgtgtccttggtaccgaaggacggaactggctgggcatccaaacaggagcagagtgacccaaaaagttctgatgcctccacagctcagccacctgaaagccagcctctacctgcatctcagacgcctgcttccaaccaaccaaagcggcctcccgcagcgccagaaaatacacctttggtgccttcaggggtaaagtcctgggcacaagcgtctgtcacccacggtgcacacggagacggcggacgcgcctcctcattgctaagtcggttttcgcgggaggagtttcccaccttgcaggccgctggcgatcaggacaaggccgccaaagagcgcgaaagcgcagagcagagcagcggacctggccccagtttgcgacctcagaatagcacaacttggagagatggggggggccggggaccagatgagctggagggtcccgacagcaaacttcatcatgggcacgatccacgagggggtcttcagccctctggaccaccgcagttccccccatacagaggcatgatgccacccttcatgtaccctccgtacttgccatttccccctccctatggaccacaagggccttatcgatatcccacacccgatggccctagtcgcttcccgagggttgccgggccccgtggctccggcccccccatgcggcttgtcgagcctgtggggaggccttctatcctgaaggaagacaatctgaaagaattcgatcaactggaccaagagaatgatgacggctgggctggagctcacgaagaggtcgactacaccgagaagctgaagttttccgacgaagaggacggccgcgatagcgatgaagaaggggccgagggccatcgcgacagccagtccgcttcaggtgaagaaagaccacccgaagccgatggcaaaaagggaaactctcccaacagcgagccacccactcccaagacagcctgggctgagacaagcagacctccggagacagaaccgggcccacctgctccaaagcctcccctaccccccccacatcggggtccagctggaaattggggtccgccgggggactatcctgatcgggggggacctccctgcaagccccccgcacccgaagatgaagacgaagcatggagacaaagaagaaaacagtcttccagcgaaatctcactcgctgttgagcgggctcggcgaagaagagaagaggaggagcgtagaatgcaagaggaacgccgggccgcgtgcgctgagaaactgaagcgtttagatgagaagtttggcgctcccgacaagagactgaaggctgagccagccgcccccccggccgccccatccacaccagctccaccacccgcagttcctaaagagctccctgctcccccagccccacctcccgcctcggctccgacaccagagaaggaacccgaagagcctgcacaagccccgccagctcaatctacccctacccctggggtcgccgcggcccccactctggtgtcaggaggtggatcaacttcttcaacctcatctgggtcattcgaagcctcacccgttgagccccaactccctagcaaagaagggcctgagccccccgaggaagtgcctcctccaacaacaccacctgtgccaaaggtggaacctaaaggtgatggtataggccccacaaggcagccaccctcccaggggctgggttatccaaagtaccagaagtcactacccccccggttccagaggcagcagcaggagcaacttctgaagcagcagcaacagcaccagtggcagcaacatcagcagggctctgccccacctacccccgttcccccgagtcccccccaacccgtaacgctgggggccgttcccgcccctcaggcccccccccctccacctaaagcgttgtaccccggcgcgctgggccgccctccaccaatgccgcccatgaactttgatccgaggtggatgatgatcccgccttatgtcgacccacggctgttgcaggggcggccaccacttgatttctaccccccgggcgtgcatccatccggactggtccctcgggaaagaagcgattcaggcgggtccagctcggaaccttttgaccggcacgcacccgcaatgctgcgggagaggggaacgccacctgtggatcccaagctggcatgggtcggtgacgtctttacagccacccccgctgaacccaggccactcacctcccctttacgccaagcagctgacgaggatgacaaaggcatgagaagcgaaacccctcctgtccctcccccaccaccctatctggcttcttacccagggttccctgagaatggtgccccaggcccacccatctccagattccccttggaagagccaggacctagacccctgccttggccacctggaagtgatgaggtggcaaagatccagacccccccacccaagaaagagcctcctaaggaggaaacagcccaactgacaggccccgaggccgggagaaagcctgcacgaggcgtcggttccggtggtcagggacctcccccacctcggagggaatcaagaactgagactagatggggaccgcgacccggctcttcgcggcgcgggatccctcccgaagagcccggtgcccctccacggagggcaggccccataaagaagccaccaccccctaccaaagtggaagagctcccgccaaagccgctagagcagggtgatgagactcctaagcccccaaagcccgatccgttgaagatcacaaaaggcaaacttgggggacccaaggagacaccgccgaacgggaatcttagcccagcgcctagactgcgccgagattatagttacgaacgggtcggacctaccagctgccgcggaaggggaaggggggagtattttgcgcgcggaagaggcttccgtgggacctacggagggagaggacggggcgcagctggtaattctgcagttacagagtcgttcgaggagatgatgggagtggaagtagggcagggagaccagaccacccttctcctgcccgaggcagctctacctgcacgccatggcgctcgggtacaatcaatgcgtaagagtccatctggcgccggtagcggcgcccagaagcaagctgcccggccaatgagagtcatttggctcttgcagaccaggcgtcttccgcacccccgaagggaacatagcccccgttctcgtagcccaacaacacgcagtcccacctttcccgcgcccgcgagatttacccccggagtgggcgagagttctctccccgaggggattagtcctggcccaagaaggcgcgagccccctcaggtttgtcccggctggtccccccccgccaagagtttagcaccaaaaaagccacccaccggccccctgccaccatcaaaggaacccctaaaagaaaaactgatccctggcccgctgtcacccgttgcaaggggagggtcaaacgggggcagcaatgtgggcatggaggacggagagcgtccacgtagacgtcgacacggtcgggcacagcagcaggataagccgcctagattcagaagattgaagcaggaaagggagaatgctgctagagggtctgaaggtaagccgagcctcaccttgccagcaagtgctccagggccggaagaagccctgacaacagtcaccgtcgcccccgccccaaggagggcagctgctaaatctcctgatctctccaaccagaacagtgaccaagctaacgaagaatgggaaaccgcctccgagagctcagattttacctctgaacgccggggcgacaaagaagcgcctcccccagtccttctgaccccaaaggctgttggaacccctggcggcggcggaggcggcgctgttcccggcattagcgcaatgtcgaggggcgacctgagccagcgcgccaaggacctgtccaagaggtcttttagttctcagagacctggtatggagcgccaaaatcggcggcccggacccggaggaaaagccggtagctccggtagttcttcaggagggggaggggggggccccgggggaaggacgggacctggaagaggggataagagatcttggccatcccccaaaaatcgaagcagacccccagaggaacggccaccgggtctgcccctgccgcccccccctccatcttcctccgccgtctttcggctggatcaggtcatccactcaaacccagccggaattcagcaggccctcgctcagttgtcttctaggcagggtagcgtcactgcacccggagggcacccccgccacaaaccaggtccaccccaagcgcctcaggggccttcgcctagaccaccaacccgctacgagccgcaacgggtcaattcaggccttagcagcgatccgcattttgaggaaccagggcctatggttcgcggcgtcggtggaacgcccagggatagcgccggagtaagcccctttccgcctaaaaggcgtgaacgtccaccccgcaagccagagctcctgcaggaagagagtttacctccaccgcactcaagtgggtttctcggatcaaaacctgagggcccagggccacaggctgagtcaagagacactgggaccgaggctctaaccccacacatctggaatagactgcacaccgccacctcacgaaagagctataggccatcaagtatggagccatggatggaaccgctttcacctttcgaggacgtagccggtactgagatgagtcagtccgacagcggcgtagatctgtccggggactcccaggtgtccagtggaccctgcagccagagatcttcgcccgatggtggtctgaagggggccgcagaggggcctcctaagcgaccagggggttccagcccattaaacgcggtgccatgtgaggggccaccagggtctgagccccctagacgcccaccgcctgcacctcacgatggcgatcggaaggaattgccgagggagcaaccactcccgcctggtccaatcgggactgaacggtcccaacacaccgaccgaggcaccgagcccgggcccatccggccctcacacagacctggcccaccagtccagttcggaacctctgacaaagacagtgacctccgactcgtcgttggtgatagcctgaaagccgaaaaggaactcactgcctctgtgacagaggcaatccccgtaagcagagattgggagctgctacccagtgccgccgcttccgctgagcctcagtccaaaaacttggattccggacactgtgtgcccgaacctagctcaagcggacaacgactttatcccgaagttttttacggaagcgcggggccgagctcttctcagatctcaggtgggcacggattgtctgtaacttctaagcaatggcggcgcccagggaccccatcccttcatccctataggagccagcctttatatctgccgcctgggcctgcaccaccctccgccctgctgagtggggtggccctgaagggccagttccttgatttttccaccatgcaagctaccgagctcggcaagctgcccgcaggaggtgtcttataccctccacctagcttcctgtattcccctgcattctgtcccagcccactacctgacacgagcctgttgcaggtcaggcaagaccttccttctccaagtgacttctattccaccccactccaacctggggggcagtctggtttcttgcccagcggagctcctgcacagcagatgctacttccaatggtagatagccagctccctgtagtgaactttggctccctccctcccgcacctccacctgcacctccaagtctgtcgctgctgcccgtggggcccgcccttcaacccccctccctggccgtgaggccaccccctgcgccagccacacgggttctgccatctccggccaggccattccccgcatccctgggccgcgccgagcttcatccggtcgagcttaagcccttccaggattatcagaaattgtcaagcaacctggggggtcccgggagttctaggacgccgcctaccggccggagcttttcaggccttaacagcagacttaaggcaaccccttcaacatatagtggagtcttcagaactcagcgggtggatctgtaccagcaagccagtccacctgacgcgctccgttggatccctaaaccttgggaacgaacggggccacccccccgagaggggccttcacgcagagcagaagagccaggctctcgcggggacaaggaaccgggcctcccccctcctagatag

SEQ ID NO: 344395 - DNA, 4149 bp, Artificial Sequence
  derived and/or modified sequence
atgctgcgggagcggggcaccccccccgtggaccccaagctggcctgggtgggagacgtgttcaccgcaacccccgccgaaccacggcctctgaccagccctctcagacaggccgccgatgaagacgacaaaggaatgagaagcgagaccccaccagtacccccccctccgccctacctggcttcttatccaggatttccagagaatggcgcccctggccctccaataagcagatttcctctcgaggagccaggcccacgcccactgccctggccacctgggagcgacgaggtcgccaaaatccagacccctccgcctaagaaggaaccaccgaaagaggaaaccgcgcagctgacaggacccgaggccgggcggaagccagctagaggcgtcggctccgggggtcaaggccctccacccccccgacgggagagtaggacggaaacacggtggggccccagacctggctcctcaaggagggggatacctccggaagaacccggggctcccccaagacgcgctgggccaataaagaaaccacctccaccaacaaaagttgaagagcttcctcctaaaccactggagcagggggacgagacacccaagcctcccaaacccgaccctttgaagatcaccaagggaaagctcggcggccctaaggagacacccccgaatggtaatttaagccccgctccaaggctccgccgggactatagctacgaaagagtcggccctactagctgccgtgggagaggtcgcggcgaatactttgccagggggcggggctttagagggacatacggaggaaggggtagaggcgcacgctctcgcgaatttcgttcttacagggagttccgcggcgacgatggacggggcggcggtactggcggtccaaaccatcccccagctccccgggggaggacagccagcgaaacccggtccgagggttctgaatatgaggagattcctaaacgccgtcgtcagcgaggtagcgaaactggcagcgagacacacgagagcgacctcgccccctccgataaagaagcgccgactccaaaggagggtacactgacgcaggtgcccttagcacccccacctcccggcgctccaccatcacccgcccccgctcgattcacagctcgcggtggcagagtcttcacaccccgaggagtcccaagccgacgaggtaggggtggagggcgaccccctccccaggtttgcccagggtggtcaccacccgccaagtctttagccccgaagaagccaccaactgggccactgcctccaagtaaagagcctttgaaggagaaattgatcccggggcccctttcccccgtggcccgcggcggctcgaatggaggctccaacgttggtatggaagacggagaacgccctcggcgacgacgacatggtcgcgcacagcagcaggataagcccccgcgtttccgtcgcttgaagcaggagcgggaaaatgccgctagaggcagcgagggcaagccttccctgacattgccagcctcggctccaggaccagaggaagccttgaccactgtgactgtggcccccgcccctcgacgggcggccgccaaaagcccggatctgtccaatcagaacagcgaccaagccaatgaagaatgggaaacagccagtgagtcatcagattttacaagcgaacggcgtggggacaaggaggctcccccccctgtcctgctgacaccaaaggccgtggggacgcccggagggggtggaggcggtgcagtacccggaatcagcgctatgagccgtggcgatctgagtcagcgggctaaggaccttagtaaaagatccttcagctcgcagcgaccaggaatggagcgtcagaatcgacgtcccggacccggagggaaagctgggtcttctggctcaagtagtggagggggaggaggcgggcccgggggtcgcaccggccccggaagaggggataagcgaagttggccatctcctaagaacaggtctcgccctccagaagaacgccccccaggcctgccattgccaccacctcccccttctagtagcgccgtgttccgacttgaccaagtgatacactctaatccagctgggattcagcaggcccttgcccagttgtcctctcgccagggctctgtgactgcacccgggggccatcctagacacaaacctgggcctcctcaggctccccagggacctagtccaagacctccaacaagatacgaaccccagagagtgaattctggactctcctctgacccgcactttgaagaaccagggccgatggtaaggggagtaggcggcactcctcgggatagcgccggcgtgtcccctttcccgcctaagcggagagagagacctcctcgtaagcctgagcttttgcaggaggagtccctgccaccacctcacagtagcggcttcctcggcagtaaaccagagggaccaggccctcaggcggagagtagggatacggggacggaggctcttaccccacacatttggaaccggctgcatactgcaaccagcaggaagtcctatcgtccctcatctatggaaccatggatggagccactgtccccctttgaggatgtggccggaaccgaaatgtcacaaagcgactctggggtggacctgtctggcgatagccaggtgagcagtggcccctgtagtcaacgcagttcacccgacgggggtttaaaaggagccgctgaaggaccccctaagcgcccagggggtagttctccgctgaacgccgtcccttgtgagggcccccctggctctgaacccccccgcagaccaccgccagccccacacgacggcgataggaaagagctgccaagggagcaacctctgcccccaggtccgatcggcaccgaaaggtcccagcacaccgaccgcggcactgagcctggacctattcggccctcacacaggcccggccctccagtgcagtttggcacttccgacaaagattcagaccttaggctggttgtcggcgatagcctgaaagctgaaaaagaactgacagccagtgtgaccgaggccatccccgttagccgtgattgggagctgttgccttctgccgccgcctctgccgagcctcagtctaagaacttggacagcgggcattgcgtgccagagccctcatcaagcggccagcggttgtatcccgaggtcttctacggatccgcaggaccaagtagctcccagatctccggcggggccatggattcccagctgcacccaaattccggcggctttcgccccggcactccctcccttcacccgtataggtcccagcccctgtatctcccccccggtccggcgccacccagcgccctgctatccggagtggccctgaaaggacaattcctcgacttcagtacgatgcaggcgacggaactcggcaagctgccagccggaggggttctctatcctcccccttccttcctctatagcccagcgttttgcccttcacctctacctgataccagtctcttacaggtcagacaagatctcccctcgcccagtgacttctactcaactccacttcagcctggcggacagagtggctttttaccttctggagcacccgcgcagcagatgttgctgccaatggtcgactctcagctgcccgtggtgaacttcgggtccttacctcctgcccctcccccagctcccccgtccttatcactcctgccggtaggacccgccctgcagcctccatccttagcagtccgcccgccccccgcccctgccacccgggttctgccatcacccgctagaccattcccagcttctctggggagagccgaactgcatcccgtcgaactgaagcccttccaggactaccagaagctgtcttcaaatcttggcggcccaggctcgtctcgcaccccacctaccggtcgtagctttagtggcctcaatagtagattaaaggccacaccatctacctattctggcgtttttcggacgcagcgcgtcgacctgtaccagcaagccagcccacccgacgccctgcgctggatccctaagccgtgggagagaacaggccctcccccacgcgagggcccttcccgacgcgcagaagagccggggagcagaggcgacaaggagcccggccttccacccccaagatag

SEQ ID NO: 344396 - DNA, 6450 bp, Artificial Sequence
  derived and/or modified sequence
atgagcgaccggagcggccccaccgccaagggcaaggacggcaagaagtactcatcgcttaatctctttgacacttacaagggtaaaagtctggagattcagaagccagctgtagctccccgccatggcttgcagagcctgggcaaagtcgccatcgctcgtcggatgccacctccggcaaacttacccagtctgaaagccgagaacaaaggtaatgatcctaatgtgtcacttgtgcctaaagatggcacgggttgggcaagcaagcaggagcagtctgacccaaaatcctccgacgccagtaccgctcaacctcctgagtcccaacccctgcctgctagccaaaccccagcaagtaatcaacctaaaagacctccagcagcacccgaaaataccccattggtgcctagcggagtgaagagttgggctcaggcaagcgtcacgcacggggcccacggggatggggggcgggcatccagcctgctatcacgattcagtcgcgaggagttccctaccctccaggcagcaggcgatcaggacaaagctgccaaagagcgcgaatccgctgaacaatctagtggaccgggcccttctttacggccacagaactctacaacctggagagatggcggtggacgcgggccagacgaactggaggggccagacagtaaacttcaccatggccacgacccccgaggggggcttcagccatcaggccctccgcagtttccaccctaccgcggaatgatgcccccattcatgtatccgccctacctgccgtttcctcctccatatgggccccagggaccctaccggtacccgaccccagatggaccttcacgcttcccgagggtggccggtccccgcggatcagggcccccgatgcgacttgtggaaccagtcggaagacctagcatcctcaaagaggataatctcaaagagtttgatcagttggaccaggagaatgatgacgggtgggccggcgcgcacgaagaggtcgattacacagaaaagcttaagttttcagatgaggaggacgggagggactctgacgaagagggcgccgagggacatagggacagccagtccgcctcgggagaagagagaccacccgaagcggatggcaagaagggcaactctccaaactccgaacctcccactccaaagacagcttgggcagaaaccagcagacctccagagacagagccggggcccccagctcctaagccccctctgcccccccctcatagaggtccggccggcaactggggaccacccggggattaccccgatcgcggcggacctccttgtaaacctccagcaccagaagatgaagatgaagcttggcgccaacggcgtaagcagagcagctctgaaatctccctcgccgtggaaagagcccgcaggagaagggaggaagaggagagaagaatgcaggaagaacgtagagctgcctgtgctgagaagttaaaacggctggacgaaaaattcggtgccccagacaagagattaaaagctgagcctgccgccccacccgccgccccttccacacccgctcctcccccggctgtgccaaaggagctgccagcacctccagcccctccacccgcgtctgctcctacaccggagaaggaacccgaggagcctgctcaagccccccctgcacagtctacacccacacctggagtggcagctgctccgactctggttagcgggggaggctctacttcctccactagctctggaagtttcgaggcctctcccgttgagccacagttaccatcaaaagagggtcccgagcctcccgaagaggtcccaccacctactacaccacctgtgccaaaagttgagcctaaaggcgatgggattggacccactcggcagccaccatcccagggcctgggctatccaaagtatcagaagtcattgccccccaggttccagaggcagcagcaggagcagctcctcaagcagcaacagcagcaccagtggcagcagcatcagcaggggtcagccccccccactccagtacccccatcgccaccccagcctgtcacacttggcgccgtgccggccccccaagccccgccgcctccccctaaggcgctttatcctggcgctctgggcaggccaccccccatgcctccgatgaacttcgaccctcgctggatgatgatcccaccttacgtggatccccgcctgctacaaggccgcccgccactggacttctaccctccaggagtacatccatcaggccttgttcccagagagaggtccgacagcgggggctcaagcagtgagccctttgacagacatgcccctgccatgcttcgcgagcgggggacacctccagtcgatcctaaactggcatgggtgggcgacgtgtttaccgcaactccggccgaaccgagacccttgaccagccctttgcgccaggcagctgatgaagatgataagggaatgaggtctgagacaccacccgtgcccccaccaccaccctacctcgccagttaccctggctttcccgaaaatggggcccctggtccgcctatcagccgcttccctttagaggaaccggggccgcgcccattgccttggccgcctggctccgacgaagttgccaagattcaaacgccaccgccaaagaaagaaccccccaaggaggagaccgctcagttgaccgggcccgaagccggtaggaagccagcgaggggcgtggggtcaggcggccaggggccgcccccacctcgcagagagtctagaaccgagacgaggtggggccctcgccccgggtcttcgcgccggggcatccctcccgaagagcctggagcccccccacgccgagccggcccgattaaaaagccacctccgcccacaaaagtggaagagctgccacctaagccactagaacaaggagatgagacaccaaaaccaccaaagccagatcccctgaaaatcactaaaggcaaactaggtggtcctaaggagacacctcccaacgggaatctgtcccccgccccgcggctgagacgggactactcctacgaacgtgtgggacctacgagctgccgcggacgtggccgtggggagtacttcgcgcgcggtcgaggtttccgggggacctatggtggccgcggaaggggggctgcaggaaactccgccgtaaccgaatcctttgaagaaatgatgggtgttgaggtgggccagggcgaccagaccaccctgctgctcccagaagctgcgctgccagcgaggcacggggctcgggtacagagcatgcgcaagtcgccaagcggcgcaggtagtggggcccagaagcaagccgccagaccgatgagggtgatctggctacttcagactcgccggcttcctcatccaagacgagagcactctccgaggagcagaagtccgacaactagaagcccaaccttcccagccccagctcgtttcacccccggggttggcgaatcctcccttcctgagggaatttctcctggccccaggcggagagagccgccgcaggtctgccccggctggtcacctcctgccaagtcattagctcccaaaaagccccccactggccccttgccgcccagtaaagagccactaaaagagaaactgatacctgggcccctctctcctgtggcccgaggcggcagcaatggggggagcaacgtgggaatggaggatggggagagaccaaggaggcggagacacggtcgagcccaacagcaggacaagccaccacggtttcgccgcctgaagcaggagagagagaacgcagctcgaggaagcgagggcaaacccagcctgacgctgccagcctcagcgcctggtcctgaggaggcccttacaacggtcaccgtcgcccccgctcctcgccgagctgccgccaagtctcctgatctttctaatcaaaactctgaccaggccaacgaagaatgggaaacagcatccgaatcttcagacttcacaagtgagcgtcgaggcgacaaggaggccccgcccccggtgttgttgaccccaaaggctgtggggactccggggggcggcggaggaggcgccgtcccgggaatttccgccatgagccgcggggatctgtctcagagagcgaaagacctgtcaaagagatcattttcatctcagcggccgggcatggaaaggcagaacaggcgccccgggccaggaggcaaagcaggatccagtggatcctctagcggggggggtggcggcggcccggggggtagaacgggcccaggcaggggtgacaagcggtcttggccctctcctaagaatcgctcaagaccccccgaggagagaccaccaggcttgcctctgcctccccctcctccaagctcttctgccgtgttccgccttgaccaggtgattcatagcaatcccgctggtatacagcaggctcttgcacaactgtcctcaaggcaagggtcggttactgctcccggcggtcaccctcgccacaaacctgggcccccacaagcccctcagggtccatcccccagaccacctactcgttatgagccacagcgtgtgaactccggcctctctagcgatccacatttcgaggagcccggacccatggtgagaggtgtggggggtacccctagagactctgccggcgtcagtccgttccctcccaagcgcagggaaaggccccctcggaagcccgagctgctgcaggaggaatcccttccacccccgcactcttccggattcttgggtagcaagccagagggacctggtccacaggctgagagtagggacacaggcacagaggcactcactcctcacatatggaatcgtctgcacaccgccacgagccgcaagtcgtaccgcccttcaagcatggagccttggatggagcccctgagtccattcgaagatgtggccgggacagaaatgtcccagagcgactctggtgtggatcttagcggagactcccaggtatccagcgggccatgctcacagagatcctcacctgacggcgggttgaaaggcgcagctgagggacctcccaagaggccaggaggctcctcccctctgaacgctgtgccttgtgagggacctcccggtagcgagcctcctcgcagaccacctcccgctccccatgatggggatagaaaggaacttcctagagaacaacctcttccacccggcccaattggtaccgagcggagtcaacatactgaccgcgggaccgagccagggcccatacgccccagtcataggccgggcccaccggttcaatttggcacttctgacaaggactccgatttgcggctcgtggtgggtgattccctcaaagcagagaaagaattaactgcatctgtaaccgaggcgataccagtgtcacgagactgggagttgctgcccagtgctgcggcctctgccgagccccagagtaaaaatcttgattctggacattgtgtcccagaaccctcctcctctggccaaagactgtacccagaggtgttttacggttcggctggtccatcctcctcgcagataagcggggggcatggattgagcgtgaccagcaaacagtggaggcggcccggtaccccatcactgcacccataccgaagccaaccattatacctgccccctgggcccgccccacccagcgccctgttgagcggcgttgcgttgaaggggcagttcttggacttcagcaccatgcaagctacagagttgggcaaactgcccgcgggcggcgtgctctacccgcctccttcttttctctattcacctgccttctgtccatctcctctgcctgacacatccttacttcaggtccgccaagacctgcctagcccaagcgacttttattccacccccctgcagcccggaggccaaagcggcttcttgcctagcggtgcaccagcacagcagatgctgctgcccatggtcgactcgcagctgccggtagtgaactttggttccctgccaccagccccacccccggcccctccgagtctatcattactgcccgtcggccccgcgcttcagccgccctccctggctgtgcgccccccaccggccccggcaaccagggtgcttcctagccccgcccgaccatttccggcctccttggggcgagcagaactgcaccccgttgaactgaaacctttccaagactatcagaagctttcttctaatctgggaggccccgggtcatcgcggactcctcccactggccgatcgttcagcggattaaattctagactcaaagctactccaagcacctattccggcgtattccggacacaaagagtggacctgtaccaacaggctagcccacccgacgcactcagatggatccctaaaccatgggagaggaccggacccccaccgcgggaagggccatctcggcgggcagaagagccaggaagtaggggagacaaagagcctggactccccccccctaggtag

SEQ ID NO: 344397 - DNA, 4149 bp, Artificial Sequence
  derived and/or modified sequence
atgctgcgggagcggggcaccccccccgtggaccccaagctggcctgggtcggagatgttttcacggccactccagccgaaccgagaccactcaccagcccactcagacaggcagcggacgaagatgataagggtatgagatctgaaacccctccagtcccacctcctcccccatatctggccagctaccccgggttccctgaaaacggcgcccctggaccacctattagccgcttccctctggaggagcctggaccacgcccgctgccttggccaccaggctccgatgaagtcgcaaaaatccaaacacctccacccaagaaagaaccccccaaggaggagaccgcccagctaaccggaccagaggccggcagaaaaccagcaaggggcgtcgggtcaggaggacagggtccaccccccccgagacgagaatcacgaaccgagactagatgggggcctcgcccagggtcctctcgccggggcatccctcccgaggagcctggggctcccccacggcgcgccggaccgattaagaagcctcctccccccacaaaggtggaggaattgccgccaaagccgctggagcaaggggatgagacacctaaaccgccgaaacctgatccgttgaagattactaaaggtaaactggggggccctaaggagacaccgccgaatggaaacctgtctccagccccacgacttcggagggactattcatatgagagagtaggccctacatcctgtaggggtagggggcggggagagtactttgcaaggggaagaggcttccgtgggacatatggcggacgcggtaggggtgccaggagcagggagttcaggtcttatcgggagtttcgcggcgatgacgggagaggcggcggcactggaggacccaaccatccccctgcacctcgaggtcgaacagcctctgaaaccagaagcgagggcagcgaatacgaagagataccaaagcgacggaggcaaagggggtccgagaccggatctgaaacccatgaaagtgacttggccccatctgacaaggaggcgccaacacccaaggagggcactctaacacaggtgcctctcgcgcctccaccgccaggtgctcccccctctccggcccctgctcgattcactgccagaggaggtcgggtgttcacacctcgaggcgtgccctcccgcaggggccgtggcggcggccgcccgccacctcaggtgtgccccggctggagcccaccggccaagagcctggctcccaaaaaaccacctacaggcccgctccctccgtcaaaggagcccctcaaagaaaagctgatccccggcccattgtcgcctgtggccagaggtggatctaacggcggtagcaatgtggggatggaggacggagagcgccctaggcgcagaaggcatgggagggcacaacagcaggacaaaccacctcgctttcgtaggctgaaacaagagcgagaaaacgcagctcggggatccgaagggaagccttccttgaccctccccgcaagtgcacctggcccggaagaggcccttacaacagttaccgtagctccagctccccggcgggcagcggcgaagtcccctgacctcagcaatcaaaattccgaccaagccaacgaggaatgggaaacagcatcagaatcctccgatttcacttcagagcggcggggggacaaagaagcccccccaccagtcttgcttaccccaaaagccgttggcaccccgggagggggaggcggtggtgctgtgccaggaatctccgccatgtcgcggggggatctctcccagcgcgctaaagaccttagtaagcgctcattttccagccagcgcccaggcatggaacgccaaaaccgtagaccagggccaggagggaaggccggatcatcgggcagtagctccggcggcgggggaggcggcccaggaggaaggacaggccccgggcggggcgataagaggtcgtggcccagtccaaaaaaccggagcagaccaccagaggaacggcctcctgggctccctctgccccccccacccccaagctcttcagctgtgttccgactggaccaagtaatacacagtaacccagcaggcattcagcaagccctcgcacaactgtcaagcagacagggatcggttacagcaccaggaggacaccctaggcataaacctggacctccccaggccccgcaggggccatctccgcggccccccacaaggtatgagcctcagagagtaaactccgggctgtctagtgacccccatttcgaggagcccgggcctatggtacgtggggtgggcggcaccccaagagattcagcaggcgtgagcccttttccccccaaaaggcgagaacgcccacctaggaagccagagctgttgcaggaggaatcccttcctccaccccacagttctgggtttctcggctcaaaacccgaagggccgggcccccaggccgaatcccgcgatactggaactgaagcgcttacaccccacatctggaatagattgcatactgccacaagcaggaagagttaccgcccttctagcatggagccctggatggagcccctcagccctttcgaggatgtggctgggactgaaatgtctcaaagcgactctggcgtggacctatccggcgacagtcaggtgagtagtggcccctgttcccagaggtcttcaccagatggagggctaaagggcgcagcggagggtccacctaagcgacctggggggtcttcccctctcaatgccgttccttgtgagggacccccaggttcagagccacccagaaggccacctcctgccccccatgacggggaccgtaaggagttgcccagagaacagcctttacctccgggccccatcggcaccgaacggtcccagcataccgatcgcggtactgagccgggacctatcagaccatcacaccggcccggcccaccagttcagtttggtacatctgacaaggactctgacttaaggttggtagttggcgactccttgaaggcagaaaaagaactcacagcctctgtcacagaggccatacccgtttcccgagattgggaactcctgccaagcgcagcagcctccgccgagccccagagcaagaatctcgatagcggtcactgcgtccctgagccatctagctcgggtcagaggctgtacccagaagttttctatggctccgccgggccctcatcatcacagatctccgggggcgcaatggacagtcagctccatcccaattccggaggttttcgtccggggaccccttccctccatccatacaggagccaaccactctacctgcctccagggcctgccccaccttccgcccttctcagtggggtggcgctgaaggggcagttccttgacttcagtaccatgcaggctaccgagttgggcaagctgcccgctggcggagtgctgtacccaccccctagcttcttgtattcacccgctttttgtcctagccccctaccagacactagcctcctgcaagtgagacaggatttgcccagcccatcggatttctattccacaccccttcagccaggtggccagtccggtttcctgccatccggtgcacccgctcagcagatgctgctgcccatggttgacagccaactgccagtggtcaatttcgggagtttgcctcccgccccgccccctgcccccccgtccctctccctgctccctgttgggccagccctccaaccacctagcctggccgttcgccctccaccagcccccgctactcgagtgcttccgtccccggccaggccattcccggcatccctaggtcgcgcagaacttcatcctgtggaactgaagccgttccaagattaccaaaaactgagcagcaatttaggtgggcccgggtcctcacgaacacccccaactgggcggagtttctctggcctgaattccagactgaaggctactccaagcacttactcaggagtctttcggactcagagggtcgacctttatcagcaggcaagtcctcctgacgcactgaggtggattccaaagccttgggaaaggaccgggccacctccacgggagggaccttcacggcgagcggaggaacccgggtcacgtggcgataaagaacctggactccccccaccaagatag

SEQ ID NO: 344398 - DNA, 6473 bp, Artificial Sequence
  derived and/or modified sequence
atgagcgacaggtctgggccaaccgctaaaggtaaggacggcaagaagtactctagtctgaacctgttcgacacatacaagggtaagagtctggagatacaaaagcctgctgtggctcccagacacggcctccaatccctggggaaggttgctatcgcaaggaggatgccacctcccgctaatcttccctcccttaaagccgagaacaaggggaacgatccgaatgtgagcctggtccctaaagatgggacaggttgggcctctaaacaggagcagagcgaccccaaatcttctgacgcaagcactgcccagcctcctgagtcacagccacttcccgctagtcagacgccagcaagcaatcagcctaaaaggccccctgctgctcctgaaaatacccccttggtgcctagcggagtgaagtcgtgggcccaggcatcagtgacccacggggctcacggcgatggcggacgagcttcctcattgctgtccagattcagtcgggaagaattccccacactgcaggccgctggagaccaggataaggccgctaaggagcgcgaaagcgccgaacagtctagcgggcctgggccttctctcaggccacagaatagcaccacttggagagacggaggcggacgaggcccagatgagctggagggcccagacagcaaactgcaccatggccatgaccctaggggagggctgcagccaagcggaccaccacaattcccaccttacagaggaatgatgccgccttttatgtaccccccttaccttccgttcccaccaccttacggcccacaaggaccctatcgttacccgacgcctgatgggcctagccgctttccacgcgtggccggtccccgaggatcaggcccaccgatgcgcctagtggagccagtggggaggccttcaatcctgaaagaggacaacctgaaagaattcgatcagttagaccaagaaaatgatgacggctgggctggagcacacgaggaggtggattatacggagaaactgaagtttagcgacgaagaggatggcagagatagcgatgaggaaggagccgagggtcaccgggacagccaaagcgcctcgggtgaggagcggccacccgaagctgatgggaaaaaagggaatagccctaatagtgagcccccaaccccgaagactgcttgggccgagacctctcgcccaccagagaccgagcccggacctcctgctcccaagcctccgttgccgccaccacatagaggccctgccggtaattgggggccacctggggattatccggacagaggcggaccaccttgcaagcctccagcacccgaagacgaggatgaagcatggcgccagcgcagaaagcagtcaagcagcgagatcagtctggccgtagagcgggctcgtcggaggagagaagaggaggagcgaaggatgcaggaggagcgccgtgcggcttgtgcagaaaaacttaaaaggctggatgagaagttcggagcccctgataaacgacttaaggccgagccagccgcaccgcctgcagctccaagtactccggcaccaccccctgcagtgcccaaagagctgcccgcaccccctgcaccgccacccgctagcgctccaaccccggagaaggaaccagaggaacctgcacaagctccccctgctcagtccactcccacacctggcgtagccgcagctcccacactggttagtgggggtggatctacgtcctccacttcctcaggatccttcgaggccagtccagtggagccacaattgccctccaaagaaggcccagagccgcctgaggaagtaccaccacccaccactcctccggtgccaaaggttgaaccaaagggggacggtattggccctacccggcagccaccgagtcagggcctggggtacccgaagtatcaaaagagccttcccccacgcttccagagacaacagcaagagcagctccttaagcagcagcaacagcatcagtggcagcagcatcagcagggttcagcaccccctacccctgttccaccctcaccccctcaaccggtaacactgggagcagtaccagccccacaagcaccgccacccccaccaaaagccctgtatcccggtgcactcggccgacctccgccaatgcccccaatgaactttgatccaaggtggatgatgatccccccttatgtcgacccgagattattgcaaggtcggcctccactcgatttttatccgcctggagtgcacccaagcggactggtccccagggaaagatctgacagtggcggatcaagctccgagcccttcgaccgacatgctcctgccatgctgagagagcgcggaaccccgcctgtcgaccctaagctcgcctgggttggtgatgtgttcactgccaccccggcagagcctcggccactgaccagccctcttcgacaggctgcagacgaagatgacaagggaatgaggtccgagaccccacccgttccgcctccaccaccctatctggcctcctacccaggcttcccagagaatggcgctccgggaccccctattagccgctttccacttgaagaacccggtccccgtcccctgccttggccccctgggtctgatgaggttgcaaagattcaaactccccctcccaagaaagagcctccaaaggaggagacggctcagctgaccgggcctgaggctggcaggaagccagctcgcggtgtgggctccgggggacaggggcctcctccacctcggagggagtctagaaccgagactagatggggccctagacccggttctagcagacgcggtatccccccagaggagccaggcgcaccccctaggagggccggtccaataaaaaagcctcctccccctaccaaggtcgaggaattgccaccaaagccactggagcaaggagacgaaacgcccaagccgccaaaacccgatccactcaaaattactaagggtaagctgggcggaccaaaggagacaccacccaatggaaacctctcgcccgctccaagactgcgacgagactacagttacgagagagtgggacctaccagctgtcgcggacggggtcgcggtgaatattttgcacggggtagggggttcagagggacctatggaggtaggggacgaggcgcaagatctcgggaattcaggagctacagagagtttcgcggagatgacggaagaggcggaggcactgggggacctaatcacccacctgcaccacggggaagaaccgcatctgagacgcgatcagaagggagcgagtacgaggagattcccaaacgcaggcgccaaaggggctctgaaactggctctgagacccacgagtcagacctggccccaagcgacaaggaggctccgaccccaaaggagggtacgttgacccaggtgcctctcgcccctccacccccaggcgctcctcctagtcccgctccagcacgctttaccgctcgaggagggcgtgtgttcactccccgaggtgtccctagcaggagggggcgaggcggagggaggccacctccccaggtttgccccggatggagtcctcccgctaaatccctcgcaccgaaaaaacccccaacgggcccattgccgccaagcaaggagcctctcaaggaaaagttgatcccgggtcccctcagcccggtggctagggggggttccaatggcggaagcaatgttggaatggaagacggcgaaaggccacgtcgcaggagacacggcagagcacagcagcaggacaagcctcctcggttcaggcgtctcaaacaagagagggagaatgcagccagggggagcgagggaaaacccagtttgacccttcctgcttccgctcctggccctgaagaggccctcactacggtgaccgttgcccctgccccacgccgagctgccgcaaagagtcccgacctctccaaccaaaactctgaccaggccaacgaggaatgggaaacagctagcgaatcttccgactttacgagtgagcgcaggggagacaaggaagctcccccacctgtactcctgactcccaaggcggttggcacccccggaggcggaggtgggggtgcggtgcccggtataagcgcaatgtcacgcggagacttgtcacagcgggctaaagacctgtctaaaaggtcattctctagccagcggccagggatggaaaggcagaataggcgtccaggtccaggaggcaaggcgggatcgagcggttcatctagcgggggaggaggcggaggtcccggtgggagaacgggacctgggcgaggggacaagaggtcatggccgtcacccaagaacaggtccaggcccccagaggagcggcctccgggacttcctctcccgcctccccctccttcttcttctgcagtctttcgcctcgatcaggtgatccattcaaatcctgcaggaattcagcaggctttggctcagctgtcttccagacaaggaagcgtgaccgcgccaggaggccatccgaggcacaaaccgggtccaccacaggcccctcagggtccaagtccaagaccccctacacgatacgaaccgcagagggtgaacagcggactgagctcagacccgcattttgaggagccaggacctatggtccggggagtgggcggtacgcccagggactctgcaggggtttcccctttcccgcctaagagacgagaaagaccccctcgcaaacctgaactgcttcaggaggaatctctcccaccccctcacagtagtggctttcttggctcaaagcctgaaggtcctgggccacaggcagaaagccgagatactgggactgaggctctgacacctcacatttggaacaggctccataccgccacctcacgaaagtcgtacagaccaagcagcatggagccgtggatggagccactctcaccgtttgaagatgttgcaggtactgagatgagccagtctgatagcggagtggatttgagcggcgatagccaggtgtcaagcgggccttgttcgcagcgcagtagccccgatggaggactgaagggagccgctgaggggcctcctaagcgtccaggcggatcgagcccactgaacgcagttccttgcgaaggacctcctggcagcgagccaccacgcaggcccccacccgctccacatgacggggatcgaaaggagctgcccagggagcagcctctccctccaggccctatcggaaccgagaggtctcagcacacagatagggggacggaaccgggaccgattcggccttcacacagacccggtcccccagtgcagttcgggacatctgacaaggattctgatctgagactggtggtaggagactcacttaaagcagaaaaggagctgacggccagtgtgaccgaagcaatccccgtcagtagagactgggagttgttacccagtgctgccgctagcgccgagccacagagtaaaaacttagactccggacattgtgtccctgaaccaagctcttccgggcagagactgtatccagaagtgttttacggaagcgccggtccttcttcctctcagatctccggaggagccatggacagccaactgcaccccaatagtggaggatttaggcctggcacaccctcgctccacccttatagatctcagcctctgtacctgcctcccggtccggcaccgccatctgcactcctatcaggcgtggctctgaagggccaatttctggacttttctacaatgcaggctacagaacttgggaagttacctgctggaggcgtcctctaccctcccccaagtttcctgtacagccctgccttctgtccatctcccctgccagatacctcacttcttcaggtgcgtcaggatctgcctagtccgtccgatttctattctacacccctgcaaccagggggacagtcagggttcttaccctcaggggcacccgcacaacagatgctgctgcctatggtggattctcagctgccggtggtgaacttcggctccctcccaccagcacctccccctgcacccccttctctgtctctgctgcccgtaggacccgctctgcagcccccaagccttgccgtacgccctccacctgcccctgccacacgcgtgctgccttcacctgcacgacccttcccagccagcctcggacgcgctgagctccatccagtcgaacttaagcccttccaggactatcagaagctgtcaagtaacctaggaggcccaggctcatctcgcacacccccaacaggaaggagtttcagcggcctgaatagccggctcaaagccactcccagtacttactctggagtctttcggacccaaagagtagacctgtatcagcaagcgtcgccacccgacgcactgaggtggatccccaagccatgggaacggactggccctcctcccagagagggccctagccgacgggctgaggagcccggttctaggggcgacaaagaacctggattacctcctccaaggta

SEQ ID NO: 344399 - DNA, 6474 bp, Artificial Sequence
  derived and/or modified sequence
atgagtgaccggtccggtcccaccgcaaagggtaaggacgggaagaagtactcctcactaaatctctttgacacctacaaaggtaaaagtctagagatccaaaagcccgctgtcgcgccaagacacgggttgcaatccttggggaaagtagcaatcgcaagacggatgccgccacccgcaaatctgccaagtctgaaggctgagaacaagggtaacgaccccaacgtgtctctggttcccaaggatgggaccggctgggcaagcaagcaggaacagtctgatcccaaatcttccgatgcgagcaccgcccagcctcccgagtctcaaccgctgcctgcttcccagacacctgccagtaaccagccaaaaaggccaccggctgcacctgagaataccccattagtcccaagtggcgtgaagagttgggcccaagcttccgtgactcacggggcacacggcgatggcggaagagcctcatcactcctgagccggttctccagagaggagttcccgactctgcaagctgccggagaccaggataaggccgcaaaagagcgggagagtgccgagcagtcgtctgggcctggcccaagcttgagaccacagaactctaccacttggcgagatggagggggtcggggtcccgatgagctcgagggcccagatagcaaactgcatcatggtcatgatcctagaggagggcttcagcccagcggaccccctcaatttcccccttaccggggaatgatgccaccattcatgtaccctccctacttgcctttccctcccccatatggaccacagggtccatatcgttatccgacccccgacggaccgagccggttccctcgcgttgccggacccagaggatccggtcctcctatgcgcctggtggaacctgtcggtagaccctctatacttaaggaggacaacttaaaggagttcgatcagctggatcaagagaacgatgatgggtgggccggagcccacgaagaggttgattatacagaaaagctaaagttttccgatgaagaagacggccgagatagtgacgaggagggagctgaggggcacagggacagccagtctgcttctggtgaggagcggcctcccgaggctgatggaaagaaggggaatagtcccaactcagaaccacccacaccaaagaccgcatgggcggaaacctcccggcctccagagacagaaccaggcccacctgctccgaagcccccactcccacctccgcaccgtggcccagctggcaactggggccctccaggagactaccctgacaggggtgggcctccttgtaaaccccctgcccctgaggatgaagacgaggcttggcgacaacgccgaaaacagtcaagctcggaaatttctttagcagtcgagcgggcaagaagacgacgggaagaggaggagcgccgaatgcaggaagagagacgtgctgcctgcgcggaaaaactgaagcggttggatgagaaatttggagccccagataagcgattgaaagcggagccagctgcaccccctgctgcccctagtacgccagcgcctccaccagccgtccctaaggagctcccagcacccccagcccctccgcctgcaagtgctccaacccctgagaaagagccagaagaacccgcacaggcccctcctgcacaatccacgccaactcccggagtggcagcagcccctaccctggtgtccgggggagggagtacttccagcacctcctcgggatcctttgaggcatctcctgttgaaccacagttgccaagtaaggaggggccagaacctcccgaagaagtgccaccacctaccacccctcccgttccaaaggtggagccaaaaggcgatggaatagggccaaccaggcagcccccatctcagggactgggctaccccaagtatcaaaagtcacttcccccaaggtttcaacgacagcaacaggaacagctcctgaaacagcagcagcagcaccagtggcaacaacaccagcagggctcagccccacccacccccgtgccgccatccccccctcaacccgtcacactgggcgctgtacctgcaccgcaagcgccacctcctccacctaaggccttgtatccaggagcgctggggcgtcctccccctatgcctccaatgaactttgatcctagatggatgatgattcccccttacgtggatcctcgtcttctccagggcaggcctcctcttgacttttatcctccaggcgtgcacccctccgggctcgtgccgcgagagcggagtgacagtggcggttcatcatccgagccatttgacagacacgcccctgccatgctgagggaaagggggacgccaccagttgaccctaagcttgcctgggtgggcgatgtcttcacagcaactcccgctgagccacgaccactcacatcccccctcagacaggctgccgatgaggacgacaaggggatgcgctctgagacccctccagtgccaccaccaccaccctatcttgcttcttaccccggtttcccagagaatggagccccaggtcctcccataagtaggtttcccctggaggagcccggtccaaggccactaccctggcccccaggatccgatgaggtggctaaaattcagactccgcctccgaagaaggaacctcctaaggaggagacagctcagttgaccggtccagaggctggcagaaaaccggctagaggcgtcggttcagggggacagggcccacccccaccccgtagggagagtcgtacggaaaccagatggggccctcggcctggtagctcacgaagggggattccccctgaagagccaggagctccccctcgccgtgcgggacctattaagaaaccgcctcccccaaccaaggtggaggaactgccccctaagcccctcgagcagggcgatgaaacacccaaacctccgaagccggacccgttaaagattactaaaggcaagctgggaggacccaaggaaactcctccaaatggaaatctctcaccggctccgcgtctgcgcagggactatagctacgagagggtggggcctacttcttgtcggggacgcggacgcggagagtactttgcaagaggtcgcggtttccggggaacttacgggggaagaggtcggggtgcacgttccagggaatttaggagctacagggagttccgcggtgacgacggccgaggtgggggaaccggcggtccgaaccatcccccagctccccgaggaagaactgcaagtgagacaagatcagagggctccgaatacgaggagatcccaaaacgcaggcggcagcgagggagcgaaactggctctgagacacatgaatctgaccttgcacccagtgacaaagaggcccctacccccaaggaaggtactctaacacaggttccacttgccccaccaccccctggggctccaccctcacccgctcctgcacgatttacagctagagggggtagagtgttcacaccgaggggagtgccatctcgccgagggaggggcggaggccgaccaccccctcaggtgtgccccggttggtcccctcctgctaaaagcctggcccctaaaaaaccccctactgggccattacctccctctaaggagccactaaaggaaaaactgatacctggcccacttagtcccgtagcgagggggggatccaacggcggttccaacgtcggtatggaggatggcgagaggcctcggcgtcgtagacacggccgtgcccaacagcaggacaaaccacccaggttccgccgtctgaagcaggaaagggagaatgctgccagaggcagtgaggggaaaccaagcctgactctgcctgccagcgcccctggcccagaggaggcgctgactaccgtaaccgttgcccctgccccacggagggccgcagccaagtcgcctgatctgtctaatcagaacagcgatcaggccaacgaggagtgggagaccgcctcagagagctctgactttacatccgaaaggcggggtgacaaggaagcaccccctcctgtgctgctcacaccaaaagctgtgggcacaccaggaggtgggggaggtggggctgttcctgggatcagcgctatgtcccggggagacctgtcccagcgggctaaagatctctccaagcggagctttagctctcagaggcctggaatggagcggcagaataggcggccagggccaggagggaaagctggctcaagcgggtccagcagtggcggtggtggaggcggtcccggaggacgaactggccctggcaggggtgacaagcgttcctggccctcaccaaagaacaggtctagacctcctgaggaacggccaccaggcctacccctgccccctcctcccccatcatcctccgctgtcttcaggctggaccaggtaatccattcgaatcctgctggaatccaacaagctctggcacagttgtcatcaaggcagggctctgtcaccgccccaggaggtcatcctcgccataagccaggcccaccccaggcaccccagggccctagtcccaggccgcctacccgttatgaacctcaacgcgtcaactcaggcctgagttcagatccccacttcgaggaaccaggcccaatggtcagaggagtggggggaacccccagggacagtgctggcgtgtcgcccttcccacctaagcgtagggagaggccccctcgtaagccagaacttttgcaagaagagtctctgccccctcctcacagcagcgggttcctgggaagtaaaccagagggtcccggtccccaagcagaaagcagggacactggcacggaggcactgactccacacatctggaatcggctgcataccgctacaagccgaaagagctacagaccctctagcatggagccgtggatggaacccctgagcccattcgaggatgtcgccggaacagaaatgagccaatctgattcgggcgttgatctgagtggtgacagccaagtctcctcagggccttgctctcaacgtagcagccccgatggcggactgaagggtgccgcagagggccctccaaaaaggcccggtggatctagtccgctcaacgccgtcccctgcgagggcccacccggaagcgagcctcctaggcgacccccacccgctcctcatgatggcgatcgcaaagagctccctcgtgaacagccgttaccaccaggcccaattggcactgagagaagccaacacaccgatcgcggaaccgagccgggtcccattagaccaagtcaccgacccggaccaccagtgcagttcggtacgagtgacaaagacagtgacctgaggttggttgtgggagatagcctaaaagccgaaaaagagctcacggcaagcgtgactgaggccatcccagtaagccgagattgggagcttctgccaagcgcagctgcctcggccgagccacagtccaaaaacctagattcaggccactgcgttcctgaaccatcatcatctgggcagcggttgtacccggaggtgttctacggctctgccggtccgagcagttctcagataagcgggggagctatggattctcaactgcatcctaacagcggtgggtttcgcccaggaacacccagcctgcacccctacagatctcaacccctttatctgccccctgggccagcaccaccgtccgcactcctgtcaggagtggccttaaagggccaatttctagattttagcacaatgcaggctaccgagttgggcaaactgcccgcaggtggagtcctgtaccctcccccatcttttctgtacagccccgctttttgcccttctccactccccgatacatccctgctgcaggtacgccaggatctaccttccccgagtgacttctattctaccccactgcagcccggagggcagtccggattcttgccaagtggcgctcctgctcagcaaatgctgctccctatggtggattcccaactgcctgttgtgaactttggttccctgccacccgctcccccacccgcaccaccctccctgagcttgcttccagtgggtcccgctctgcagccccctagtctggctgtgagaccccctccggcacctgcaacccgagtgctcccatctccagcgagaccattcccggcttctctcggcagggccgagttgcacccggtggaactgaaaccattccaggattaccaaaagcttagttccaatctaggaggccctggaagctcaagaacaccgccaaccggcaggagcttcagcggcctcaattcccggttaaaggcaacaccctcgacctatagcggggtctttcgcactcaacgcgtggacctctatcagcaggccagtcctcccgatgctttaaggtggattccaaagccttgggaacgcacgggacccccacctagagaggggccatctcggagagccgaggagcccggtagcaggggggacaaggaacctggcctaccccctcccagatag

SEQ ID NO: 344400 - DNA, 6473 bp, Artificial Sequence
  derived and/or modified sequence
atgtccgatcgcagcggccctacagctaagggtaaggatggcaagaagtactccagcctcaatctctttgatacatacaagggcaagagtctcgaaattcagaagccagccgtggcccctcgtcacggcctgcagtctctgggcaaagtagccattgctagacggatgccgcctcctgccaacctgccttctctgaaagcagaaaataaaggcaatgaccccaacgtatctctcgttccaaaggacggtaccggctgggcttctaaacaggagcaatccgatccaaagtccagcgacgctagcactgcccagcctcccgaaagtcaacccttgccggcttctcaaacccctgccagtaaccagccaaagcggccaccggctgcccctgagaatacgcctctagtgccatcaggtgtgaagtcctgggcgcaagcttctgtcactcatggcgcacacggagatggcggacgcgcttcgtcactgctgtcaaggttttcacgcgaagagtttccgacactgcaggccgctggagatcaggacaaggctgctaaagaacgggagtctgcggaacagagctccggacctggtccatccctgcgcccacagaattccactacttggagagacggtggcggacgcggacctgacgagttggagggacccgatagcaagctgcatcacggccacgatccaaggggcggactccaaccctcaggcccaccccaattccccccatatcgcggaatgatgccaccgtttatgtatccgccatacctcccgttcccaccgccatatggccctcaggggccttatcgctatccaacaccagacggtccaagccgattcccacgagtggcagggcctcgcggaagcggtcctccaatgaggctggtggaacccgttggcagacccagtattttgaaagaagacaatttgaaagagttcgatcaactggaccaagagaatgacgacggctgggctggcgcacacgaagaagtcgattacacagaaaaactcaagtttagcgatgaagaagatggcagagattcagatgaggagggggctgaagggcaccgggattcccagtccgcatcaggagaagaacgcccacccgaggcagatggtaagaagggtaatagccccaattccgagccccctaccccgaagacagcttgggccgaaaccagtagacccccagaaacggagccaggcccacctgctccgaagccgccacttcctccgccacacagaggccctgccggtaactggggtccaccgggtgactacccagacagaggcggaccgccatgcaaaccaccagccccagaagacgaggacgaggcttggcgtcaacgcagaaagcagtctagctccgaaatcagcctggcagtcgaacgggcaaggcggcgacgagaggaagaggaaagacggatgcaagaggaacggagggcagcatgcgcagagaagctcaaaagactggatgagaagtttggcgcacctgacaaaaggctgaaagcagagccagctgctccaccggctgcccctagtacacccgctccccctcctgcggttcccaaggaacttccagctccccctgccccaccacccgctagtgcccctacacccgaaaaggagcctgaagaacccgctcaagcacccccagctcagagcacgccaactcccggagtggctgcagcccctactctggtgagcggcggaggcagcacctctagcacatccagcgggtccttcgaagcctctccggttgaacctcaactgcccagcaaggaggggcctgaaccgcctgaagaggtgccaccacctactacccccccagtgccaaaagtagaacccaaaggggacggcattggtccgacacggcagcccccatcgcaaggactcggctatcctaagtaccaaaagtcattgccacccaggtttcagcggcagcagcaggagcagctgctgaaacagcagcaacagcatcaatggcagcaacaccagcagggctcagccccacccactccagttcccccttctcctcctcagcctgtcaccctcggtgccgtcccagctccgcaggcgcctccccctcctcccaaggctctttacccaggtgccctgggaagacctcctcctatgcccccaatgaacttcgacccgagatggatgatgattcctccgtacgtggatccaagactgctacagggtcgacctcccctagatttctatcctccgggagtccacccctctgggctagtgcctagggaaagaagtgattccggcggttcgtcttccgagccattcgatcggcatgctcctgccatgctgcgggagcgagggactccgcctgttgacccaaagctggcctgggtgggggatgtgttcacagctacgcctgctgagccccgaccccttacctcgcctctgcggcaagccgctgatgaggatgacaaggggatgcgatccgaaacccctcccgttccaccaccgcctccgtatttggcgtcttatcctggcttccccgaaaatggcgctccgggacctcctatcagcagattccccctggaggagccgggacccaggccactcccatggcctcctgggagcgacgaagttgcaaagatccagactccccctccaaaaaaagagccacctaaggaggagactgctcaactgacggggccagaggccggtcgaaaacctgccaggggagtggggtccggcggacaagggccaccgccacctagacgggagagccgcaccgaaaccagatgggggccaagaccgggtagcagtcgtaggggaatcccacccgaggagcccggtgccccacctcggagggccggacccattaaaaagccaccccctcccacaaaggtggaggaactgcctcctaaaccccttgaacaaggagatgagacacccaagcccccaaagcccgatccgcttaagatcactaaaggcaagttgggcggaccaaaggaaacaccacccaatgggaatctttctccagcccctcggctgagacgtgattactcctatgaaagagtgggacccacctcgtgtcgcggaagagggcgtggtgaatacttcgctagagggaggggatttagggggacatacggtggcagaggaaggggggctcggagtagagaatttcggtcttaccgagaattccgaggagacgacggaagaggaggcggaactggcggtcctaatcaccctcctgctcctagaggcaggaccgccagcgaaacaaggtcagagggctctgagtatgaagaaattcccaagaggaggaggcagagggggtcagagaccgggtcggagacacacgaaagtgacctagctccttccgacaaagaggctccaacgccaaaggaggggacactgacccaagtgccactggcacccccaccaccgggagcccctcccagtccagcaccggctcgcttcacagccagaggcggtcgagtgtttacgcccaggggtgtgccttcccgcagggggagaggtggagggcgtcctcccccacaagtgtgcccagggtggtcgcctcccgcaaaatccttggcccctaaaaagccaccaacaggcccactgccacctagcaaggaacctctcaaggaaaaattaatccctggccctctgtcccctgtggcacgagggggatctaatgggggatccaacgtagggatggaggatggtgaaagacccaggaggcgccgtcatggcagagcccagcagcaggacaagccgcctcgctttagaagattgaagcaggaaagggagaacgccgcaagaggttcggaaggcaaaccaagccttactctacctgcgtcagctcccggaccagaggaggcgctcaccacagtaacggtggccccagcccctcggagagccgcagccaagagccccgatctctctaaccaaaattctgatcaggcgaacgaagaatgggaaacagctagcgaaagcagcgatttcacctcagaacggaggggagataaggaggctccacccccagtgctgttgaccccaaaggctgtcggaacccccggaggtgggggagggggagcggtgccagggatttccgctatgagccgcggagacctgagccaacgggctaaagatctgtccaaacgctccttctcaagtcagagaccaggcatggaaagacaaaacaggcggccaggccctggaggtaaagccggatcctcaggcagctcttctgggggaggcggaggagggccaggtggaaggacaggaccgggtcgcggagataaacggagctggccaagccctaaaaacagatcacgccctccagaagagcgtccccctggacttcctctgccccctccacctccgagcagctccgctgtgtttcgactcgaccaggttattcactcgaatccggctgggatccagcaggctctggcccagctcagcagtaggcaggggtcagtgaccgcaccaggcggtcatccgaggcacaagcctgggccaccccaggctcctcaagggccatctcccaggccgccaactcgttacgaacctcagagggtaaattctggcttgagctctgatcctcacttcgaagaacctggcccaatggtgcgaggagttggcggaactcccagggactcagctggggtctctccattcccacctaaacgtcgggaacggcctcccagaaaacccgaactcttacaggaagagagcctccctcctcctcacagttcgggatttctcggttcgaagccagaagggcctggaccacaggccgaatcccgtgacactgggacggaggcactaaccccccacatctggaacaggcttcacactgcaacaagccgaaagtcgtatcggcctagttccatggagccctggatggaacctctttctccatttgaagatgtggcgggtacagagatgtcccagagcgatagcggcgttgatctctccggggattctcaggtcagttccgggccttgttctcagcggtccagtccagacgggggattaaaaggagctgccgaaggccctcccaaacgacctggaggttctagcccactgaacgctgtaccgtgtgaaggccctcctggttctgaacctccaagacgtccaccacccgctccccatgacggcgatcggaaggagctccctcgagaacaaccactccctcccggacctatcggcactgagaggtcccagcatacagaccgcggtacagaacctggaccaatccgaccaagtcaccggccaggtccccctgtgcagttcggtacctccgacaaagacagcgacctcaggctggtggtcggggacagcctaaaggctgaaaaggagctgaccgccagcgtgaccgaggccatccctgtttctagggactgggagttgctgcctagcgctgccgctagcgccgaaccccaaagcaagaacctggattctggccattgcgttcccgagccaagctcctccggccagagactttaccctgaggttttctacggcagcgccggacctagtagcagccaaatctccggtggcgctatggacagccaactgcacccgaatagcgggggattcagacccggtacaccctctctgcatccataccgttcccaacctttatatctgcctcccggtcctgctccaccctcagctctgcttagtggcgttgccctgaagggacaatttctcgatttttccacgatgcaggcaaccgaattaggaaaattgcctgcaggaggcgtattgtaccccccaccatctttcctttattctcccgctttctgcccgtcaccgctgccagatactagtttgttacaggtcagacaggatttaccctcacctagcgatttctactccacaccacttcagcctggtgggcagtcgggcttcctgcccagcggggctccagcacagcagatgctgctgcccatggtcgattcacagcttcctgtggttaatttcgggtcgctgccgccagcccctccacctgcacctccttccttgtccctgctgccagtgggccctgctctccagcccccaagcctggcagtgcgacccccaccagcaccagccacgagagtactccccagtcctgccaggccatttccagccagcctgggtagagcagaactgcaccctgttgaattaaaacccttccaagactaccagaagttgagctccaatctcggcggacccggtagttcacgcactcctcccacggggaggagctttagcgggctcaatagcagactgaaagctacgcccagtacatatagcggggtgtttagaactcagagggtggacctttatcagcaggccagccctcccgatgcactacgctggattcccaaaccctgggaacgaactgggccaccgcctagagaggggccatcacgcagagccgaggaaccaggcagtcgcggagataaggaacctggactcccacccccaagata

SEQ ID NO: 344401 - DNA, 6473 bp, Artificial Sequence
  derived and/or modified sequence
atgtctgaccggtccggccctactgccaaaggaaaagatggaaagaaatacagttctctaaacctgtttgacacttataagggaaaatcattagagatccaaaagccggctgtagccccacgtcatggcttgcagtccctggggaaggtggccatcgccagacgaatgcctccccctgccaatctgcctagcctgaaggcggaaaataagggaaatgaccccaatgttagtctggtgcccaaagatgggacaggctgggcctccaagcaggaacaatctgaccctaagagcagtgacgcatccacagcgcaaccccctgagtcgcagccattgccagcgtctcagaccccagcttccaaccagcctaagaggcctcctgctgccccagagaacacgccgctggtaccatcaggggttaagtcctgggcccaggccagcgtgactcacggagctcacggggacggcggacgggcatccagcctcctgtcccggttctctcgcgaggagtttcccactttacaagcggcaggtgaccaagataaagccgctaaggagcgggagtccgcggaacagtcttctggacccggtccctcgctcagacctcagaatagcactacatggagagacggaggcggacgcggtcctgatgaactggaaggccctgactcgaaactgcatcacgggcatgatccaaggggcggtctgcagccatctggaccccctcagtttcccccataccggggaatgatgcccccatttatgtatcctccatatcttccattccccccaccatatggaccacagggcccatatagataccctacaccagacggcccttcccgcttccccagggtggcaggccctcgcggttctgggcctcctatgcgcctcgtcgagcccgtgggaaggccgtcaattctcaaagaagacaaccttaaagagttcgaccagctggaccaggagaacgatgacggatgggccggtgcacacgaggaagtcgactacacggagaagctcaagttcagtgatgaggaggatgggcgagactcagatgaggaaggtgccgaagggcatcgcgactcccaatccgcctctggcgaggagcggcctccagaagcagacggcaagaaaggtaattcacccaactctgaaccccctacacccaagacggcctgggcggagaccagtcgtccgcctgagaccgaacccggtcccccagccccaaagccgcctttgcctcctccacacaggggcccagcagggaattggggaccccctggcgactacccggatagaggcggtcctccatgcaagccccctgcccctgaagatgaagacgaggcttggagacaacggagaaaacaatccagtagcgaaatctcattagctgttgagcgagcaaggcgccgtcgagaggaagaggaacgcagaatgcaggaagaacggagagcagcatgcgctgagaaactcaagcggctggacgaaaaatttggcgctccagacaagaggcttaaggcagagcccgcagcgccaccagccgcaccctcaacaccagctccaccccctgctgtgcccaaggaactgcccgcacctcccgcacccccaccagccagcgcacctacacctgaaaaggaaccggaagaacctgcgcaggcaccccctgctcagtccacccccacaccgggagtcgccgcagcaccaaccctggtgtcaggcggaggcagcactagctccactagttccggaagcttcgaggcatctccggtggagccacagctcccctctaaggagggacctgaacctccagaggaagtgccacctccaacgactccaccggtgccgaaggttgaaccgaaaggggacggaatcggcccaactcgtcaaccaccaagccaggggctggggtatcctaaataccagaagagtttaccccctcgatttcaacgtcagcagcaggagcagttgctcaaacagcagcagcaacatcaatggcagcagcatcaacaggggtccgcccctcctacccctgtaccgccatcgcctccgcagccagtcactctcggggctgttcctgccccacaggcccctcctccacctccaaaggccttatatccaggagctctgggtagacctccgccaatgcctccgatgaactttgacccccgatggatgatgattccaccatatgttgacccacgcctgctgcagggtagaccaccacttgacttctacccacccggtgtgcaccccagtggcttagtgccaagagaaaggtccgattctggaggatcttcatcagaacccttcgacagacacgcacctgccatgctgcgcgagagaggcacccctcctgtcgatcccaaattggcctgggtcggagatgtttttaccgccactcccgcagagccccgaccactgacttcccctctgcgccaagctgctgacgaggatgacaagggtatgcgctcagagactccccctgttcctccacctcctccttacctggcaagttatccgggatttcctgaaaacggcgctccaggacccccaatctcccgcttccccctggaagaaccaggcccacgcccactcccatggccaccaggctctgatgaagtggctaagatccagacacccccaccaaagaaagagcctcccaaggaggagaccgcccagttaaccggccctgaggcgggaagaaaacccgcacgtggcgtcggctccggcggacaaggaccacctcctccacggagggaaagcaggactgaaaccaggtgggggcctagaccaggaagctcccgcaggggaattccacccgaggagcctggcgctccccctcggagggctggccctataaagaaaccccctcctccaaccaaggtggaagagcttcccccaaaacccctggaacagggtgatgagactccaaaacctccaaaaccagacccccttaagatcaccaaaggcaagttaggcggacccaaggaaacgcctcctaatggcaacctgtcacccgcacctcgcttaaggagggactattcgtacgagagggttggccctacctcgtgccgcggacggggtagaggagaatactttgccagggggcgaggattcagaggtacttacggaggcagagggagaggagcgagatcgagagagttccgaagctatagagagtttaggggtgatgatggcaggggtggaggtaccggagggccaaaccatccacccgctcctagagggcgtacagcttcggagaccagaagcgaaggcagcgaatatgaggagatcccgaagcgtcggcgtcagagggggagcgaaactggctcagaaacgcatgagtctgacctggcccctagcgataaggaagctcctacgccaaaggaaggcacgctgactcaggtgcccctggccccaccaccacctggtgctcctccctcccctgcccctgctcggtttactgcgaggggaggaagagtgtttactccacgaggtgttccctcccggaggggtaggggcggtggccgtcctccccctcaggtctgtccagggtggagcccacccgcaaaaagtttggcgcctaagaagccaccaaccgggcctctcccgccttctaaagagcccctgaaggagaagctaattcccggaccactcagcccggttgcccgaggcggatccaacggcggatccaatgtcgggatggaggacggagagcggccacggaggaggcgtcacggcagagcccagcagcaagacaagccaccacggtttaggcggctaaagcaagaacgggaaaacgcggctcgaggaagcgaagggaaaccatcacttactctaccagccagtgcaccaggaccggaagaggccctgaccactgtcactgtagcgcctgcacctcgtcgcgcagcagccaagtcccccgatctgagcaaccagaatagtgaccaagccaatgaagaatgggaaacggctagcgagtccagcgacttcacttctgagagacggggagataaagaagctccgccacctgtgttgttgacccctaaggccgtcggaactcccggaggcggaggcggtggagctgtgcccggtattagtgccatgtcccgcggagatcttagtcagcgcgctaaagacttaagtaaacggtcattttcaagccagcgccctgggatggagcggcagaacaggaggcccggaccaggaggtaaggcaggatcctctggctctagctcggggggtgggggaggaggcccaggcggtaggactggtccgggtagaggcgacaaacgctcctggccctcaccaaagaaccgcagcagacctcccgaagaaagaccaccaggattgcccctacccccacccccacctagttccagtgctgtgttccggctggaccaggtgattcacagcaatccggcagggatccagcaggctctggcccaactgagttctcgccagggcagtgtgactgcgccaggtgggcatccgagacataagccaggaccacctcaggcacctcagggaccttctccacgaccccctacacgttatgaacctcagcgcgtcaacagcggcctgtctagtgatccgcatttcgaagagcctgggcctatggtacgcggagttgggggaactccgagggatagcgcgggagtgtctcctttccccccaaaaagaagggagaggcctccgagaaaacctgagcttctgcaggaggagagcctgccccctccgcacagcagcggattccttggcagtaagccggagggacccggtcctcaggctgagtcacgggacaccggaacagaagctctaactccccacatttggaacagactccacactgccacatcccggaagtcgtatcgcccatcaagcatggagccttggatggaaccgctctctcccttcgaggacgttgccggtaccgagatgagtcagtccgattcgggagttgacttaagtggtgactcccaggttagcagcgggccttgctcgcagagaagctcaccagatggaggcctgaagggtgcagctgaaggacccccaaagaggcctgggggtagtagtcctctgaacgccgtgccctgtgagggaccacctggctccgagcctccccgacgtcctccccctgcaccccatgacggtgaccggaaagaattgccaagagagcagcctttacctccaggaccaataggtactgaacgaagtcaacatacagatcgcggtactgagcccggacccatccggccaagccaccggccaggacctcccgtgcagtttgggaccagtgataaggacagcgacctccggctcgtggtgggcgactcactaaaagcagaaaaggagttgacagctagtgtcaccgaagccattccggtctcacgtgattgggagctcttacccagcgctgccgcaagcgctgaaccccagagtaaaaatcttgactctgggcactgtgtaccagagccctccagctccgggcagcggctttacccagaagtgttttatggttctgccggaccctcaagctcccagatctctgggggagcaatggattcccagctgcatccaaattcaggagggtttcgcccagggactccaagcctccatccctacaggtcccaacccctgtacctaccacccggtcccgcaccacctagtgctttgttaagcggcgtggctcttaagggccagttcctggacttttcaacaatgcaagcgacagaacttggtaagttacccgctggcggagttctctacccccctccatcttttctctactcccccgcattctgtccgagtcctttaccagatacgagcctgctgcaagtgaggcaagacctcccaagcccatcagacttctattcaaccccccttcagccagggggtcaatctggctttttgcctagcggtgcccctgcacaacaaatgttgttacctatggtcgacagccagctgccagtcgtgaactttggctcgctgcctccggctcctcctcccgcaccgccttccctctctcttctgcctgtgggtccggcactgcagccacctagcttagcggtcaggccaccgccagctcctgctacaagagtgcttccttcaccagccagaccttttccagcatcccttgggagagctgagctccaccctgtggagcttaaaccctttcaggactatcagaagctttcttcgaatctcggaggccctggaagttcacgcactcctcccacagggaggagctttagcggtctcaactcaagacttaaggctactccttccacctatagcggcgtttttcgcacccagagggtggatttgtaccaacaggcctctcctcctgacgcgctgcgctggataccgaagccttgggaaagaaccggccctccccctcgtgaggggccatctagacgtgccgaggagccaggttctcgcggtgacaaagagcccggattaccaccaccacggta

SEQ ID NO: 344402 - DNA, 6473 bp, Artificial Sequence
  derived and/or modified sequence
atgtctgatagatcggggccaacagccaaaggcaaggacggaaagaaatacagctccctaaatctgtttgatacatacaaggggaagtccctcgaaattcagaagcccgcagtggcaccacgccacgggctgcagtctctcggcaaagtagccatcgctcggagaatgcccccacctgcaaacctccccagcctcaaagccgagaataagggcaacgatcctaatgtgtcactagtgccaaaagatggcactggctgggcgtcaaagcaggaacaatccgatcctaaaagctcggacgcatcaacagcacagccccctgaatcacagcctttgcccgcatcacagacgccagcttccaatcaaccaaagcggcctccagccgctcctgagaatactccgctggttccgagcggagtgaaatcatgggctcaggcttccgtgacccacggggctcacggagatgggggtagggcatcatccttactgagccggttttcacgagaagagttccccacattacaggcagccggagaccaagacaaagctgctaaagagcgggagtccgccgagcagtcttcgggcccaggcccaagcctccggccacaaaactctacaacctggcgagacggcggaggtcggggtcccgacgaacttgaggggcctgactccaagctccaccacggacacgacccaaggggcggtctccagcccagcgggcctccacagtttcctccatacaggggaatgatgccaccattcatgtatcctccatacctccccttcccacctccttacggccctcagggaccatataggtacccaacccctgacgggccttcacgtttcccaagagttgccggaccccgtgggtccgggcctccgatgagactggttgagccagtgggcaggccctctatattgaaagaggataatctcaaagaatttgaccagttggaccaggagaacgatgatggctgggctggcgctcatgaggaggtcgattatactgaaaaattaaagtttagcgacgaagaagacggtcgcgattctgacgaagaaggggctgaaggccaccgagattcccagagtgccagcggagaagagaggccccctgaagccgatggaaagaaagggaactccccaaacagcgagcctcctacaccgaagaccgcctgggccgagacaagtaggccccctgagactgaaccagggccaccggcacccaagcccccattgccaccgcctcatagaggcccagccggaaactggggccctcccggagattatccggatcgcggaggccctccctgcaaaccacccgcacccgaagatgaggacgaggcctggcgtcagcgcagaaagcagagctctagcgagatctccctggccgtggagagggccaggaggagaagggaggaagaggaacgccgtatgcaggaggagcgtagagccgcttgcgccgaaaagttgaagagactagacgagaagtttggagctcctgataaaaggctaaaggctgaacccgcagcaccccctgcggcaccatctacgcctgcccctcccccagccgtccctaaagaattacctgctcccccagctcccccacccgcttccgctcctacgccagaaaaggagcctgaggagcccgctcaagcccctccagctcaaagtacaccaaccccaggggttgcggctgcccctaccctggtcagcggcggaggatccacatcatccactagctccggctctttcgaggcctcccccgtagagccacagttaccgagcaaggaaggacccgagcctccagaggaggttccccctccgaccacaccccctgtgccaaaagtcgaaccaaaaggcgatgggatagggccaacccggcaacctcctagccaggggttagggtaccctaagtatcagaaaagccttccaccaagatttcagcggcaacagcaagagcagctactgaagcaacagcaacaacatcagtggcagcagcatcagcagggatcggctccacctacaccagtcccgcctagccccccacagcctgtgaccctgggcgctgtgccagcccctcaggcccctccccctccacctaaagctctgtatcccggtgccctggggaggcccccaccgatgcccccaatgaacttcgaccctcgctggatgatgattcccccttatgtcgacccgagactgctgcaaggcaggccgcctttggacttttaccctccaggcgtccacccttctggcctcgttcccagggaacgctctgatagcggtggaagttcctctgagccattcgaccgtcacgcgcctgccatgctcagggaacgcggaactcctccggtcgatcccaaattagcctgggtaggcgacgtattcaccgctacaccagccgaaccaaggcctctgactagccctctcaggcaagctgctgacgaagacgacaaaggcatgcggtccgaaacacccccagtgccacctcccccaccgtacttagcttcttacccaggctttcctgagaacggcgctcccggacctccaattagtagatttcccctcgaggaaccgggtccacggcctcttccctggccgcctggctcagatgaggtggccaagatccagacaccgcctccgaaaaaggaaccacctaaggaggagacagctcagctcaccggtccagaggccggtaggaaacccgctagaggggtgggttcaggcggtcagggtcctcctcccccacgcagagaaagtcgtacggagaccagatggggcccaaggcccggatcgtcacgtaggggaatccccccagaagagcctggcgctcctcctcggagggcaggccctatcaaaaaaccacctccccctaccaaggtggaagaattaccccctaaacctctggagcaaggtgacgaaaccccgaaacctcccaaacccgacccgctgaaaattacaaagggaaaactgggaggacctaaagagacccctccaaacggcaatctgtctcctgcccctcgtttacgacgggactattcatacgagcgcgtaggaccaacatcttgtaggggcagaggtcgaggtgagtacttcgcccgaggcaggggcttcaggggaacgtatggagggaggggaaggggcgcacgatctagagaattccgctcctatagagagtttcggggtgatgatggcaggggcggaggcactggtggacctaaccacccacccgctccacggggtcgaaccgcttccgagactcgcagcgaagggtcagaatacgaagaaatccccaagaggcgcagacagcgaggcagcgagactgggagcgagactcatgagtcggatcttgcaccttcagataaggaagcgcctacacctaaagaagggacactgacacaggtccccctggctccaccccctcccggagcgcctcctagccctgcccctgcccgttttaccgccaggggaggaagggtgttcacaccacggggtgtgcctagtcggaggggcagaggaggcggaagaccccctccacaggtctgccctgggtggtcacctcccgctaagagtctcgcacccaaaaaaccgcctacaggccctctgcctccatcaaaggagcccttaaaggagaagctaatccctggaccactctcccccgtggctagggggggaagcaacgggggttctaacgtagggatggaggacggagagagaccccgacgcagacggcacgggcgtgcccagcaacaagacaaaccacccaggtttcgtcggctcaagcaggaacgagagaatgcagctcgtggatctgagggcaagccatctctgaccctaccagcttctgcgcctggcccagaagaggccttaactacagtaacagtggcacctgcccctagaagggcagccgcaaaaagccctgatctttcgaaccagaactctgatcaggccaacgaggagtgggagacagcttcagagtcttcggattttacttcagaacgtcggggtgacaaagaggctccccctcccgtcttattaacgcctaaagcagttggaactccgggtggaggcggaggaggagctgtgcccggaatcagtgcgatgtcaagaggggacctgagccagagagctaaggacctgtctaaaaggagcttctcctcccaacgacctggcatggaacggcagaaccgaaggcccggtcccggtggcaaagcagggtcctccggatcctccagcggcggtgggggtggcggaccgggaggtcggacaggccctggtcgaggtgacaagcgtagctggcccagcccaaaaaataggagtcgtccacctgaagaaaggcctcccggtctgccactgccccctcctcccccatcatccagtgctgtttttcgcctggaccaagttatacattctaatcctgctggcatccagcaagccctggcccagttgtcttcccgacagggatccgttaccgctcccggaggacacccacgacacaagcctggacctccacaggctcctcaaggcccttctcctcggccacctactcggtatgaacctcagagagtgaactccggtttaagttcggaccctcactttgaggagcctggcccaatggtgagaggggtgggagggacccccagagactccgcaggcgttagcccctttccacccaagcggagagaaagaccacctcggaagcctgaactgttgcaagaggagagtctgccccctcctcatagtagcgggttcctgggctcaaaacctgagggcccaggcccacaggccgaaagccgtgataccggaacagaagctctgactccccacatctggaatcggctgcatacagccaccagcaggaaatcatatcgtccatcatcaatggaaccgtggatggagcccctctctccgtttgaagatgtggccggaaccgagatgtcccaatctgattcgggggtggatctgtcgggcgacagtcaggtatcctcgggaccctgctctcagaggtcttcgcctgacggaggactgaaaggggcagctgagggcccacctaagcggcctggtggttcctctcctttaaacgctgtcccttgtgagggcccacctggctctgaaccacctaggcgacctcctcccgctccacacgacggagaccgcaaggaactgcctagggaacagcccctgcctccgggacccattggcactgaacggtcccagcataccgatcgcggaacagagcctgggcctatccggccaagccaccgcccaggccctcccgtgcaatttggaacctcagataaggactctgacctgcggttggttgtcggagacagccttaaggccgagaaagaactgaccgcgagcgtcacagaggcaatcccggtgtccagggactgggagctgctaccctctgctgcagcatcggcggagcctcagtccaagaatctcgactccgggcattgtgtacccgagcctagcagctctggccaaaggctctatccggaagtcttttatggatccgccggaccgtcttccagccagatttccggaggggcaatggattctcagttgcaccctaactccgggggatttcgaccgggaactccttccctgcacccatacaggagccaaccgctgtatttaccccctggacctgcacctccaagcgccctgctatctggagtggccttaaaaggccaatttctggattttagcacaatgcaggccaccgaattgggcaagctcccagcgggaggggtgctgtatcctcccccatcctttctgtactctccagcgttctgcccatcccctctgcctgacacctctttgctacaggtgaggcaggatctccccagcccaagcgacttctactccaccccccttcagccaggcggacagtctggatttctgccaagtggggctcctgcccagcaaatgctgctaccaatggtcgattcacagctgcctgtggtgaactttggttccctgcctcccgctcctcctcctgcacctcccagtctctctctgctcccagttgggcctgccctccagccaccctctttagccgtccgtccgcctcctgctcccgctacaagggtcttgcccagcccagctagacccttccccgctagcttgggaagagccgagctgcacccagttgaactgaagccatttcaggattaccagaaactgtcctctaatctgggcggacctggaagcagcaggacccccccaacagggagatcttttagcgggctgaatagccgcctcaaggccacaccgtccacctactcaggagtctttcgcactcagcgagtcgacctttaccagcaggcttctccgcctgatgccttacgatggattcctaaaccgtgggagcgcacaggccctcctcctcgggaagggcctagcagacgagccgaggaacctggcagcagaggtgacaaggagcccggtcttcctccaccacgata

SEQ ID NO: 344403 - DNA, 6473 bp, Artificial Sequence
  derived and/or modified sequence
atgtctgaccgaagtggcccaacagccaagggcaaggacggcaaaaaatactcctcattgaatctattcgacacttacaaaggaaagagcctcgaaattcaaaaacctgcagtggcccctcggcacggactccagagcctaggcaaggttgccatcgctcggagaatgcctccaccggctaatttgccttccctgaaagcagagaacaaggggaatgacccaaacgttagtctggtgcccaaagacggaaccggatgggcgagcaagcaggagcagtcagacccaaagagctctgatgcctctacggcacagccccctgagtctcagccgctgccagcctctcaaacacctgcctccaatcagccgaagcgaccaccagctgctccagaaaacacacccctcgttccatcaggggtgaaaagttgggctcaggcctccgtcacacatggggcacatggcgacggaggtagggcaagctccctgctctctagatttagtagggaggaatttccaactctacaagctgctggcgatcaggataaagccgcaaaggaaagggagtcagccgagcagagctctggtcccggtccttcccttcgcccacaaaactctaccacctggcgagacgggggtgggcgtgggccagacgagctggaggggccagattctaaactgcatcatggtcatgaccccagaggcggacttcagccttccggcccaccccaatttccaccttaccggggtatgatgccacccttcatgtatccaccttacttgcctttcccacccccttatggtccacaaggcccttaccggtaccctaccccagacggaccctctcggttcccacgggtagctggccctcgcggaagcggtccacccatgaggctggtggaaccggtcggacgcccatcgatcctcaaagaggacaacctgaaggagttcgaccagctggaccaggagaacgacgacgggtgggcaggggcacacgaggaagtagattacacagagaaactgaagttctcggatgaggaggacggccgagattcagatgaagaaggagccgagggacacagagattctcaatccgcgtcgggcgaggaacggccacctgaggcagatggaaaaaaaggcaattctccaaactctgagcccccaactcctaagacagcctgggccgagaccagcagaccaccagagactgaacccggtccccctgcacccaagccccctctgcccccaccccatagggggccagctggcaactggggaccccctggcgattacccagacaggggtgggcctccctgtaagccccctgcacctgaagacgaagatgaggcctggcgccagagacgcaaacagagttcaagcgagataagcttggccgtcgaaagggctcgcaggcgaagagaggaggaagagcgcaggatgcaggaagaacgcagggcagcctgtgctgagaagctcaaacgcctcgatgaaaagttcggggctccagacaaaagactcaaggccgagcccgctgccccaccggcagcaccttctacgccagctccccctcctgccgtgccaaaagagctccccgcacctccagctccccctccagcttccgcacccaccccagaaaaagaacctgaggaacctgcccaggcccctccagctcagtccaccccaacacccggtgtggcagctgcaccaactctggtttctggcggaggatccactagtagcacatcatcgggaagtttcgaggcaagccccgtggagccgcagttaccctcaaaggaaggcccagaacccccagaagaggtccctccccctactaccccccctgttcccaaggtggaacctaagggggacggaattggtccaaccagacagcctccgtctcaagggctgggctatccaaagtatcagaagtcactcccccctcgattccaaagacagcagcaggagcagctgctgaaacaacagcaacaacatcaatggcaacaacaccaacagggatctgcacccccaacccccgtacccccatctccgcctcagccggtgacccttggagctgtgcctgccccacaggcccctccaccgcctcccaaggcattgtacccaggagcgctggggagacccccacctatgcccccaatgaacttcgacccgaggtggatgatgattcccccttacgtggacccccgtctcctgcagggccgtccccctttagatttctaccctcctggcgttcacccttccggtctggtaccccgtgaacgctccgactcgggcggatcgagctctgagcctttcgaccgccacgccccagccatgcttcgggagagagggacaccccctgtggacccgaagctggcgtgggtcggggatgtcttcaccgccacacctgccgagcctcggcctttgactagtcccctgaggcaagcagccgatgaagatgataagggaatgcgttcggagacaccacccgtgcctccccctcctccatatctagcatcataccccggattcccagagaatggggcacccggaccccctatttcaagatttccgctggaggagccaggtccacgaccattaccctggccaccaggatccgacgaggtggccaagattcagactccaccacccaaaaaagaacctcccaaagaagaaacagcgcaattaacgggccctgaagcgggaagaaaacccgcaaggggcgtagggagtggcggtcaggggccaccaccacccaggcgcgagtctagaactgagactagatggggccctcggccaggctcatcgcgcagagggattccccctgaagaaccgggagctccccctaggcgcgcaggaccaataaagaagcctcctccgccaacgaaagtcgaggaattgccacctaagccactggagcagggtgacgagaccccaaaacctcccaaaccagatcccctcaagatcaccaaggggaagctgggcggaccgaaggaaacgcctcctaatggaaacttatctccggcaccaaggctgcgtagggactacagctatgagcgcgtaggtcccacgagctgccgtgggagagggagaggtgagtacttcgccaggggtcggggatttcggggtacttacgggggacgcggtcggggagccaggagccgggaattcaggtcctatcgggaattcaggggagacgatggccgagggggaggaactggtggtcccaaccacccacccgctcctagagggcgtaccgcatctgaaaccagatcggaggggtccgagtatgaagagattccaaaacgccgtaggcagaggggctctgagacaggctccgagacccacgagagtgatctggcgccttccgataaggaagctcctacacccaaagagggtactctgacgcaggttcctctcgcccctccccctccaggcgctcctcccagtccggctcccgctcgttttacagctcgcggaggtagggttttcacccctaggggcgtaccgagtcggcgtgggcgtggagggggaagacccccaccgcaagtgtgccccggttggtcaccacctgccaagtcccttgcacccaaaaagcctcccaccggtccactaccaccttccaaggagccattgaaagaaaagcttattcctggacccctgagcccagtcgccaggggagggtcaaacggcggatccaatgtgggcatggaagatggcgaaagacctaggcgcagacggcacggtcgcgcacagcagcaagataaaccccctagattcagaagattaaaacaggaacgtgaaaacgctgcccgtggaagcgaagggaagccttctcttacgttgcctgcttcagctcctggccctgaagaagcgctaaccaccgtaaccgtggccccagcccctcggagagccgcagctaaaagtcccgatttgtcaaaccagaactccgaccaggcaaacgaggagtgggagactgcatccgagagttcagacttcacctccgagcggaggggcgacaaagaggccccaccgcctgtattgcttactcctaaggcagtcggaacgcctggtgggggaggaggaggtgcggtgcccggtatatctgccatgtctaggggtgacctatcccagcgggctaaagatctctccaaaaggtcctttagctcacaacggccagggatggagagacagaatagaaggcccggaccgggtggtaaggcgggtagttcgggaagctcatctggagggggaggcggaggacccggaggtaggacgggacccggacgaggagacaaaaggagctggccatccccaaagaatcgatctagacctcccgaagagagacctcctgggctgcccctgcctccaccgcctccaagcagcagcgccgtgtttcgcctggaccaggtgatccactctaatccggctggcatacagcaggctctagctcaactgtcatctagacaaggctccgtcaccgcgcctggaggccatccgaggcataaaccaggccctccacaggcacctcaggggccatctcctcgtccacctacacggtacgagccacagagggttaatagtggcctgtcctccgatcctcacttcgaggagccaggaccgatggtgagaggagttggcggtaccccgagagactccgccggagtttcaccttttcccccaaaacgacgcgaacgtcctccacgcaagcccgaactgctgcaggaggagagtctcccacctccccactcgagcggtttcttagggagcaagccggaaggtcctggaccccaggctgagtctagagacaccgggacagaggcactgacgccccacatttggaaccgcctccacaccgctacctcccggaaatcctacagaccctcaagcatggagccatggatggagccactaagtcccttcgaggacgtagcgggtacagagatgagccagagtgacagcggcgtcgatctctccggggatagccaagtgtcttctggcccatgtagtcagcgctcctctcccgacggcggactgaagggcgctgctgagggcccacctaagcggccaggcggatccagcccactaaatgcagttccatgtgagggcccacctgggagcgagcccccacgcagacctccaccagctccacatgacggggataggaaagaactgcctcgagaacagccacttcccccagggcctattgggacagaacgctcacagcatacggacagggggacagaacccggtcccatcagaccttcacatcggccaggccctccagtacaatttggaacatcagataaagactcagatctgcgactagttgtaggagacagcctaaaagccgagaaggagctgactgcaagtgtaacagaggctatccctgtttctcgcgattgggaactgctgccgagcgccgcagcctcggctgaacctcagagcaagaatttagattcggggcattgtgtccccgagccctccagctccgggcagcggctgtaccctgaggtgttttatggctctgccggaccttcatcatctcagattagcgggggagccatggattcgcagctccacccgaactccgggggatttaggcctggtactccatctcttcatccttaccgaagccagccactttatttgccaccagggcctgcgcctccaagtgccctcctgagtggggtggctctgaagggacagtttctcgatttctctaccatgcaggctacagaactgggaaagctgcctgctgggggtgtcctgtacccacccccttcatttttatacagcccggctttttgtccatcaccactgcctgacacgagcctgctccaggtgcgtcaggacctgccatctccgagtgatttttactccacccccctgcagccaggaggacagtcgggttttttacccagtggagcccctgcacagcagatgctgctgccgatggtagacagtcagctgcctgtggtgaatttcggaagcctgcctcctgccccaccccctgcccctcccagcctgtcattgcttccggtggggcctgcgcttcagcccccttcacttgcggttcgtcctcccccagccccagcaacaagggtactgccaagtcccgctcgacctttccctgcctcactgggaagagctgagcttcatccggtggaactgaaacctttccaggattatcaaaaactctcatctaacctgggcggaccaggcagctcccgcacacctcctaccggcaggagcttcagcggcttaaattcacgactgaaggctacccctagcacctatagcggcgtcttcaggacacaacgggtggacctgtaccagcaagccagcccccctgatgccctccgctggataccgaaaccatgggaacgcactggtccaccccctagagagggaccatcccggagggccgaggagcccggtagccgcggagacaaggaaccagggctgcctccacctcgata

SEQ ID NO: 344404 - DNA, 6416 bp, Artificial Sequence
  derived and/or modified sequence
atgagcgacagatctgggcctactgcaaagggcaaagatggtaagaaatacagttctttaaatctgttcgacacttacaaggggaaatcgctggagattcagaagcccgctgtcgctccacggcatggactccagtctctcggcaaagttgcaatagccagacggatgcctcccccagcaaacctgcccagcctgaaggcagaaaataagggcaacgaccccaacgtcagtcttgtgcccaaagacggaactgggtgggcctctaaacaggagcagagcgatcccaaaagtagtgacgcgagtacggcccaaccgccagagtcccagccattgccagccagccagacacccgcttctaaccagccaaagagacccccagccgctccggagaataccccgttggtgcccagcggtgttaaaagttgggcccaagcatcggttacacacggagctcacggagatggcggacgcgcatcttctttgttgagccggttttcccgagaggagtttcctacactgcaagccgcaggtgatcaagataaggctgcaaaagaaagagagtctgccgaacaaagttcaggcccaggaccatcactgcgaccacagaacagtactacctggcgcgatggcggagggcgaggtcctgacgagctggagggccctgatagcaaattgcatcatggccacgacccccgagggggattgcagccttcaggtccacctcagttcccgccttaccgaggcatgatgcccccatttatgtatcccccttacctgccattcccccctccctacggaccccaagggccatacagatatccgactcccgacggtccctctagattcccacgggtggcaggtcctcggggatccggcccacccatgagactggtggagcctgtcgggcgtccaagtattctgaaagaagataacctgaaagagtttgatcagctggatcaggagaacgatgatggatgggccggtgctcatgaggaagtggactatactgaaaagctgaagttctctgacgaagaagacggccgtgatagcgacgaagagggcgcagaagggcatagagattcccaatcagcttccggtgaagagagacctcccgaagcagacggaaaaaagggcaattctcctaattcggagcctcccacaccgaaaacagcatgggcagaaaccagtcgccctcctgagacggagcctgggcctcccgctcccaaacctccgcttcctcctcctggcgattatcctgacagagggggtccaccatgcaagccacctgctccagaggacgaggacgaagcttggcggcagcggaggaaacagtcctcttctgagatttcactcgcagtggagcgggcacgcaggagaagagaggaagaggagagacgtatgcaagaggagcgacgggctgcttgcgctgagaaactgaaaaggcttgacgagaaattcggcgcacccgataagagactgaaggccgagccagctgcgcctccggcagctccttccaccccggctcctccaccggctgtgccgaaagagctgcctgcacccccagcccctccccctgcttcggcccctacccctgaaaaagagcctgaagaaccagcccaagctccccctgcccaaagcacacccacccctggcgttgctgctgcccctacactcgtgtccggcggtggaagcacaagttccacttcgtccgggtcctttgaagcctcacctgttgaaccccagttgccctctaaggagggccctgagcctcctgaggaggtccctccgccaactacaccccctgtaccaaaggttgaacctaagggtgatggaataggtcccacccgtcagcccccaagccagggtctggggtatcccaagtaccagaaaagtttgccccctagattccaacgccagcagcaggagcagctcctaaaacaacagcaacaacaccagtggcaacagcaccaacaggggtctgcccctcccacccccgtccctccttcaccccctcaaccagtgaccttgggcgctgtccccgcacctcaagcaccccctccgccacccaaagccctgtatcccggtgcactagggcgtccccctccgatgccacctatgaacttcgacccccgttggatgatgataccaccatacgtggatcctcgactgcttcaggggcgtcctccactggatttctacccacctggcgtccacccttctggactggtgcctcgagagcgctccgattctgggggatccagcagcgaaccattcgaccggcacgcccctgcgatgctgcgcgagcgcggtacccctccagtcgaccctaaattagcttgggtcggagatgttttcacagccacccctgctgagcccagacccttaacatcacctctacgtcaggcagctgacgaggacgataagggtatgagaagcgaaactcccccagtccctccccctcccccatacttagcctcgtatcccggattccccgagaatggggcacccggaccacctatatctaggttcccattagaggaaccagggccaaggccactgccttggcctcccggttccgacgaggtagctaaaattcaaacccccccacccaagaaggaacctccgaaagaagagacagcccagctcacaggcccagaagccggtaggaaacctgccagaggtgtgggctccggtggccaaggcccacccccacccaggagagaatcccggaccgagactcgatggggacctaggcctggatcttcccgccgaggcatcccacctgaagaacctggggcaccccctagacgcgctggcccaataaagaaacctcctcccccaacgaaggtcgaggagctgcctcccaagcccctggagcagggcgacgaaaccccaaagccacctaagccagatcctctcaaaatcactaaggggaaactggggggacccaaggagacacccccaaatggaaatctttcaccagccccaaggctaagaagagactattcttatgagcgtgttggcccaacctcttgtcggggtagaggaagaggggagtattttgccaggggtagggggttcagaggcacctatggtggcagaggcagaggggcagctggaaatagtgctgtgacagagtctttcgaagaaatgatgggcgtggaggtaggtcagggtgatcaaaccaccctcttgttacctgaagccgcactccccgctagacacggcgcaagagtgcagagtatgaggaaatcaccatccggggctgggtctggcgctcagaaacaggctgccaggcccatgcgggttatctggctgctgcagaccagacgcctcccacaccccaggagagaacacagccctagaagccgcagccctacgacaagatcccctacctttccagcacccgcaagattcacgccgggtgtcggcgaatcttctttacccgagggaatcagtcccggacccagacggagagaaccacctcaagtgtgtcctgggtggtcgcctccagctaaatccctggctcctaagaagccacctactggaccgctgcccccttcaaaagaacccctgaaagaaaagttgattcccggaccacttagccctgtcgcgcgtggcggatcaaatggcggttcaaacgttggtatggaagatggggagcgaccacgaagacgtcgccatggccgagcacagcagcaggataagcccccacgcttccgcaggctcaaacaagagcgggaaaatgctgccagaggctctgagggcaaaccttctctgaccctgccggcatcagctcctggacccgaagaagctctaaccaccgtcaccgtcgcccctgctccacggagggccgcagctaagagccccgacctgtctaatcagaattccgaccaggcaaatgaggagtgggagaccgcttccgaaagttctgatttcacaagcgagcgacggggagacaaggaagccccacctccagttctactgacccccaaggccgtcggcacccccggaggcggaggaggtggagccgtgcccggaatatccgcaatgtccaggggagacctgtcccagagggccaaagacctgtccaaaaggagtttctctagccaaaggcctggaatggaacgccaaaatcgccgaccgggaccaggcggaaaggccggaagttctgggagctcatccgggggagggggaggtggccctggaggaagaacaggtcccggtagaggtgataaacgcagctggccaagccctaaaaaccggagcaggcctcccgaggaaaggccgccaggacttccactcccccctccccctccatccagttcagccgtatttcgtcttgaccaggtgatccactccaacccagctggaatccaacaggccctggcccagttgtcgagccgtcagggaagcgtcacagcacccggtgggcatcctagacacaaacctggccctcctcaggcgccacaggggcctagcccacgaccccctacacggtacgagcctcagagagtgaactccggattgtcatccgacccacattttgaggagcctggcccaatggtgcgaggtgtgggaggaacccctcgcgattccgctggggtatctccatttccccctaaacggagagaaagaccgccacgtaagcctgaattgctccaggaggaaagtctgccaccaccgcactcatccggcttcctcgggtctaaacccgaggggccaggtccgcaggcagagtccagagacacaggaacagaggccctcacaccccatatttggaaccgcttgcacacagctacgtccaggaagtcatataggccctcatcaatggaaccctggatggagccgctgtctccattcgaagacgtggcaggcacagaaatgagccaatctgacagcggggtagatctgagtggagattctcaagtctcctctggcccttgttcacaacgctcaagcccggatggcggtcttaagggggcagccgagggaccccctaagcgcccagggggttcttcacccctcaatgctgttccatgtgagggtcctccgggatccgaacccccaagacgccctccgccagctcctcatgatggcgacagaaaggagcttcctcgggagcagcctctgcctcccggaccaatcggcaccgagcggagtcagcacactgatcgcggaaccgaacctggccctatccgcccatctcatcggcctggacctcccgtccaatttggtacctcagataaggacagcgacctccggctggtagtgggcgactccctgaaggcagagaaggagttgactgcaagtgtcactgaggcgatccctgttagcagggactgggaactgctgccctccgccgctgcctctgcagaaccccaaagcaagaacctggatagtgggcattgcgtcccagagcccagctccagtggccagagactttaccctgaagtgttttatggatctgctggtcccagtagctcccagatatcggggggacacggcctgtccgtgacatcgaaacagtggcgaagacccggaacaccctcactgcacccataccggtcacagccactctatctccctcccggacccgctccacctagcgcgctgctgagtggcgtcgcgcttaaaggacagttcctggatttctcaactatgcaagcaaccgagctgggcaagctgccggctggtggggttctgtaccctcctccatcttttctgtattcccccgcattctgcccaagtcctctgcctgacaccagcctgctgcaggtgcggcaagatctccctagcccatccgatttttactctacccctctccagcccggaggccaatccggctttctcccttcaggcgcacccgcacagcagatgctgcttcctatggtggactcccagctcccagtggttaatttcggaagtctgccgcctgctccacctcctgcacccccttcgctgagcctgctgcctgtcggcccagcattacaacctccttcattggccgtgaggccccctcccgcacccgcaactagggtgctgccctctccggctcgtccgtttcccgcttcgctaggaagagccgagttacatcccgtcgaactaaaacccttccaggattaccaaaagctgagctccaatctagggggacccggatcgtctagaacgccgcctacaggacgatcattcagtgggttaaactcacgactgaaggcaacccctagtacctactccggggtctttcgtacacagagagttgatctgtatcagcaggcgtcacctccagacgctctccgctggatcccaaagccatgggagcggactggacccccacctagagagggtccaagccggagggccgaagagccaggttctcgaggtgataaagagcctggcctgccccctcccaggta

SEQ ID NO: 344405 - DNA, 6449 bp, Artificial Sequence
  derived and/or modified sequence
atgtcagacagaagcgggccaacagccaaaggcaaagacggcaaaaagtacagctcattaaatctgttcgatacatacaaaggcaaaagcctggaaatccagaaacccgctgtcgctccgcgacacgggctgcagtcattagggaaggtggcaattgccagacgcatgcctcccccagccaacctcccttcactgaaggcagaaaataaaggaaacgaccccaatgtttctctggtacctaaagacggcacagggtgggcatctaaacaagagcaatcagacccgaaaagctccgacgccagcactgcacagccccctgaatctcaacctctgcccgcatcacagacccccgcatcaaaccaacccaagcgccctcctgctgcgcctgagaatacacccctggtcccatcaggcgtcaaaagctgggcccaggccagcgtgactcatggcgcacacggtgatggaggcagagcttcaagcctgctgtctcgttttagccgggaagagtttccgacactccaggctgctggcgaccaagacaaggctgccaaagagagggaatcggccgaacagtcttctggcccagggccatccctgagaccgcagaactctaccacctggcgtgatggcggaggacgtggccctgacgagttggaaggacccgattcaaagctgcatcacggacatgacccccgaggaggcttgcaaccatccggcccaccacaatttcccccttatcgtggcatgatgccgcctttcatgtatcccccttacctgccttttccccctccatacggaccgcagggaccataccgctatccaacccccgatggaccctctcgattcccaagggtggcagggcctcgcggaagtggccctcctatgcgactcgtggagcccgttggacggcctagcattctgaaagaagacaacctcaaggagtttgatcaactggatcaagaaaatgacgacggatgggcgggtgcacacgaggaagtcgactacactgagaagctgaaattttcagatgaggaagacgggagagactccgacgaggagggggcagagggccaccgcgatagccaatctgctagtggcgaagagaggcctcccgaggctgatggcaagaagggtaatagcccaaacagtgaaccccctacacctaagactgcatgggcagaaacatcaagaccacccgaaactgaaccgggacccccagctcccaaaccgcctttaccacctccacaccggggtccagcaggcaattgggggccacctggtgactacccggatcggggtggacctccatgtaagccacccgcacccgaggatgaagacgaggcatggcggcagaggagaaaacagagcagctcagagatcagcctggctgtggaacgcgctaggaggagacgtgaggaggaggaacgcagaatgcaggaggaacgacgtgctgcttgcgctgaaaagcttaaaaggctggatgaaaagttcggcgctccggacaagcgtctgaaggccgaaccggcagctcctcctgctgctccgtctacaccagcccctccacccgcagtgcccaaggagctgcctgcgccacccgcacctccccctgcttccgctccaaccccagaaaaggagcccgaagagccagcccaggctcccccagctcagagcacaccaacaccaggggtggccgctgcaccaaccctggtctctgggggaggctcgacatcgtctacttcctcaggctctttcgaggcctccccagtagagccgcagctcccttctaaggagggccctgagcccccagaggaggtgcccccacccacaactcccccagtccctaaggtcgaacccaagggcgatggaatcggccctacccggcagcccccttcccagggactcggttatcctaagtaccagaaatcattgcctcctagatttcagcggcagcagcaagagcagctccttaaacagcagcagcagcatcagtggcagcaacaccaacagggatctgcacctcccaccccagttcctccatctccaccccagcccgtaaccctgggtgccgtgccggctcctcaggcccctcctccccctccgaaagctctgtatcctggggcattgggcagaccacctcccatgcccccaatgaattttgaccctaggtggatgatgatcccgccatatgtggatcctcgtttacttcagggacgacctccgcttgacttttatcctccgggagtgcacccttcaggactcgtacccagagaaaggagtgattctggcggttcttcatcagagccgttcgataggcacgctcctgccatgttgagagagagaggaaccccccctgtcgacccaaagctggcatgggtgggagacgtcttcaccgcgactcccgcagagcctaggcctctcacctctcccctgaggcaagccgcagacgaggatgacaaggggatgcgatctgagacaccacccgtgccaccacccccaccttatttagcttcatatccaggcttcccagagaatggagctcctgggccaccgatctcccgctttccactggaagagcccggacccaggcccctgccttggccccctggttccgatgaggttgctaaaatacagacccctccaccgaaaaaagagcctcccaaagaagagactgcacagctgactgggccagaggctggtaggaagcctgcacgaggtgtggggtctggtggccagggcccaccccctcctagaagggagagtaggaccgaaactcggtgggggccaagacctgggtcgtcacggagggggatcccacccgaagaacccggagcacccccaagacgagcgggaccaattaagaaaccccctccccctacaaaggttgaagagctgcccccaaaacccctggaacagggagacgagacgcccaaacccccaaaacctgatcccctgaaaatcacaaagggcaagcttgggggacccaaagagacgccaccaaatggaaacttgagccccgctccgagactgcgcagagattattcctacgaacgggtcggccctacctcatgtagggggagaggtagaggcgagtatttcgcacggggaaggggtttccgcggaacctatggcggacggggtcggggtgctgccggtaattccgcagtgaccgagagctttgaagagatgatgggggtcgaagtcggtcagggcgaccagactacactgctcctgccagaagccgcactgccagcaaggcatggggctcgcgttcagagtatgagaaagagcccctcaggtgccggaagtggagctcagaagcaggccgctaggcctatgagagttatctggctgctgcagacccgcaggctcccccacccgcgacgcgaacattctccgaggtcaaggagtccaaccacccgttcgcccacttttcccgcaccagccagatttactcccggtgtcggtgaaagctccctgccagaaggcatcagtcctggtccaagaaggagagagccgcctcaggtgtgccccggatggtcccccccagcgaagagcctggccccaaagaaaccacccacaggcccacttcctccctcaaaggaacctctgaaggaaaagctgattcctggccctctcagtccagtcgctagaggagggtctaacggtgggagtaacgtggggatggaggatggagagagacctcgtaggcggaggcatggtagggcgcaacagcaggacaaaccccctaggttcagacggctgaaacaggagcgggaaaatgccgctcggggatctgagggcaagccttcattgaccctgccggcttcggcccctggaccagaagaggctcttaccaccgtcactgtggctccagcacccagaagggccgctgctaaatccccagacttgtctaatcagaactctgaccaagccaacgaagaatgggagactgctagcgagagcagcgactttacatctgagcggaggggcgataaagaggccccacctccagtcctgctgaccccaaaagcagtgggcacccctggaggcggaggcggtggagctgtccccggaatatccgcaatgtccaggggagacttgtcacagcgcgctaaggacctctccaaacgttccttctccagccagcggccaggaatggaacgccagaaccgcaggcctggcccaggtggcaaggccggtagctccggctcctcatcaggcggaggagggggaggacccggagggcgtactggccctggcaggggcgacaagcgcagctggccaagccctaagaacagaagccggccacccgaggaacggcctccaggcctgccactgcctccaccccctccttccagttccgccgtgtttcgcttagatcaggtgatccatagcaatccagcgggaattcagcaagcacttgcccagctctcatcacgccaaggatcagttaccgccccaggaggccacccacggcataagcccggaccacctcaagccccacagggtcccagccccaggcctccaactaggtacgaacctcaacgcgtgaattcaggccttagtagcgacccccatttcgaagagccaggacccatggttagaggcgtgggagggacccctcgggacagtgcaggcgtctccccttttccaccaaagcggagggaaaggccgcctcgcaagcccgagctcctgcaagaagaatctctgcctcctccccatagctccggattcctcggctctaagcccgaaggccctgggcctcaagcagaaagtcgggacaccggcacagaagcgcttacccctcacatctggaatagattacatactgctaccagtcgaaaaagttatcggccttcgtcgatggaaccctggatggagcctctctcccccttcgaggacgtggcaggcaccgaaatgtcacagtcagattcgggagtggatctgtcgggggatagtcaggtcagttcaggaccctgctcccagcggagctccccagacggcggactcaagggcgcagcagaggggccaccaaagcgccctggcggaagctctccccttaatgctgttccttgtgaggggcctcccggatccgagccacctcgccgacctcctcccgcaccccacgacggcgacagaaaggagttgccgagggaacagcctttaccccctggcccaataggaaccgagcgttcacaacacaccgaccgcggaaccgaaccaggccctatcagaccttcgcatcgtccaggacctccagttcagttcggcacgagcgacaaggacagcgatttacgcctggttgtgggcgacagtttgaaagctgaaaaggaactgacagcgagcgtcacggaagcaatccccgtcagccgcgactgggagttacttcctagcgccgcagcctctgccgagccccagagcaaaaacctcgactcgggccactgtgtgcctgaaccaagtagcagcggacagaggttgtatcccgaagtcttctatggaagtgccggtcctagctcatcccagatctcggggggacacgggctctcggttacctctaagcagtggcgcagaccaggaacaccctccctgcacccctacaggtctcagccactctatcttcccccaggccctgcaccacctagtgccctgctttccggagtcgcgcttaaggggcagttcctagactttagtaccatgcaggcgaccgagctcggaaaactacctgctgggggtgtattgtatcctcccccaagctttctctacagccccgcattctgcccatccccgctgcccgacacctctctgttgcaggtgcgtcaggatcttccgtcccccagtgacttttattctacacccctccagcccggaggccagagtggtttcttaccttccggagcccctgctcagcagatgctgcttcctatggtcgactctcagctgccagtagtaaattttgggtccctgccccctgcccctccaccagctccacccagtctgagcttactgcccgtcggccctgccctccaaccgcctagtctcgcagttagaccccctcccgcaccagctacaagggtactccccagccctgcccgtccattccccgcttcgctcggaagagccgagctgcaccccgtggaactcaaacccttccaagactatcagaaattgtcctccaacttggggggaccgggaagcagtcgaacgccgccaacagggaggtccttttctggactcaactcaaggctaaaagcaaccccatcaacgtactctggggtgttcaggacacaaagggtcgatttataccagcaggcgtcccccccagatgcactccgctggattcctaagccctgggagcggaccggccctcccccacgcgaagggccatcacggagagccgaggaacctggcagccgaggggataaggagcctggactgccacctcccaggta

SEQ ID NO: 344406 - DNA, 4149 bp, Artificial Sequence
  derived and/or modified sequence
atgctgcgggaaaggggcactccacccgtggatcctaagctcgcttgggttggcgatgtgttcaccgctactccggcagaacccagacctctgactagccctctgaggcaggccgctgacgaggacgacaaaggtatgcggagcgagaccccaccggtcccgcctccacccccttatcttgcgtcataccccggttttccagagaatggcgctccaggtcccccaattagcaggttcccccttgaagagcctggacctcgccctctgccttggcctcccggtagcgatgaagtggctaaaatccagacaccgcctcctaaaaaggaaccacctaaggaagaaaccgcacaactgacaggacctgaggctgggaggaaacccgcacgtggtgtcggttctgggggacagggaccccctccccctagacgcgagagccgtacagaaacccgctggggcccaagaccagggtcaagcaggcgtggcattccaccggaggaacccggtgcacccccacgtcgcgctggtcccatcaagaaaccgcctccccctacgaaggtggaagagctgccgccaaaacccttagagcagggtgatgaaacgccaaagccgcctaagcccgaccctctaaagattacaaaaggcaaattgggaggaccaaaagaaacccccccaaatggcaacttgtcgcccgctccgaggctacgcagggattattcgtatgagcgcgtgggacccacctcctgcaggggcaggggaagaggcgagtacttcgcacgtggtcgcggattccgtggaacctacggcggtcggggtcggggagcgagatctcgcgagttccggtcctacagagagtttcgcggtgacgacgggagagggggaggcactggagggcctaaccatcccccagctccaagaggcagaacagcttccgagacacgcagcgaagggtccgagtatgaggaaatacccaagcggagacggcagagaggcagtgaaactgggagtgagactcacgaatcagatctggcgccttccgataaggaagccccaaccccaaaggaaggcacacttacacaggttcctctggcaccgcctccgcctggggcaccacccagcccagccccagcgcgtttcacagctcggggaggcagggtcttcacgcccagaggggtgccatccaggcgcggtcgaggcggagggaggccgccaccccaggtttgccccggttggagccccccagctaaaagcctggctccaaagaagcccccaactggccctctcccaccgagcaaggaacccctgaaggaaaagctgattccaggaccactgtcccctgtggctcggggtggcagtaatggaggcagcaacgttgggatggaggatggcgaacggccaagacgtcggagacacgggagagcgcagcaacaggacaaaccacctaggtttaggagacttaagcaggagcgggagaacgccgcaagggggtccgaaggtaagccttcgctcactctgcctgcatccgcgcctggcccagaggaggctctgacaacggtcaccgtcgcgcctgccccacggagagccgctgcaaagtcccccgacctgagcaaccagaactctgaccaggctaacgaggaatgggaaaccgcttccgagtcaagcgactttacatccgaacggagaggagacaaggaggcccctcccccagtactcctgacacctaaggctgtcggtacacctggaggcggtggcggaggagccgtcccaggcatttcggcaatgtctaggggggacctcagccaacgcgctaaggatctgtcaaaaagatctttttcctcacagagacctggcatggaaagacagaaccggcgacccggaccagggggtaaagcgggttccagtggctcatctagcggaggcggtggaggcggacccggtgggagaaccggaccaggcagaggcgataagcggagttggcccagtcctaagaatagatcacgacctcctgaagagcggcctcctggccttccgttaccacccccacctccatctagctcagccgtgtttcgactggaccaggtgattcacagtaatccagcgggaatccagcaggcactagcccagttaagctcaagacaagggtcagtcactgcccctggagggcatcctcggcacaaaccgggaccgccacaagcccctcagggcccttcaccgagaccccctaccaggtatgagccacaaagagtcaatagcggcctgagctccgatccacattttgaagaaccaggccctatggtccgcggagtcggcggaacgcctcgcgacagcgctggagtctctccctttcctccaaagcggagagagagaccccctcggaaacctgagcttctccaagaggagtctctgccacctccccattcctctggctttctcggctcaaagccagaaggtccaggcccacaggctgagtcacgcgataccggaactgaggcgttgactccccacatttggaatcggctgcacactgccacatccagaaagtcataccgcccatcaagtatggaaccctggatggaacctctgtccccctttgaagatgtcgcaggcaccgagatgtcacaaagcgactccggggtggacctgagcggggactcccaggtgtcctctgggccttgctcccagcggtctagcccggatggcggattgaaaggagcagccgagggacctccaaaaaggcccggaggctcgagtcctctgaacgcagttccatgcgagggtcctcctggttcagagccacctcgccgaccaccccctgcacctcatgacggcgatagaaaggaattgccgagagagcagcccctgccacctggcccaataggcactgagagaagccagcacaccgatcgcggtacggaaccaggtcccattaggccatctcaccgccctggcccacctgtgcagttcgggacatccgacaaagactcagacctccggctggtcgtaggagatagtttgaaggccgagaaggagctgacagcatccgtaaccgaagccatcccggtgagcagggattgggaactgctcccaagtgccgcagcatctgccgagccccagtcgaagaatctggatagtggacattgcgtgcccgagccctctagcagcggccagcggctatatcctgaagtattctatggctccgccggaccaagcagctcacagattagtggcggagcaatggacagccagctccatcctaactcaggcggattccgacccggaacccccagcttgcatccataccgatctcaacccttatatctgcctcctggaccggcaccgccaagcgcacttctaagcggcgtggctctaaagggtcagttccttgactttagcacaatgcaggccacagaactgggcaagcttcctgcaggaggcgtgttgtatccaccgccatcctttttgtattcaccggctttctgtccttctccactaccagacacgtccctgctacaggtcaggcaagacttgccatctccgtcagatttttattcaacccccctacagcctgggggacagtctggatttctgccatctggtgcacccgcacaacaaatgctgctgccaatggtggatagccaactgcccgtcgtgaactttggctctttgccgcctgcccctcctcccgcaccaccctctctgtccctcctgcccgtggggccagctcttcagccaccttcactggcagtgaggcctccacctgccccagctacccgagtgctacccagtcccgctcgcccttttcccgcttcactgggccgagccgaacttcacccagtggagctgaagcctttccaggactatcaaaagctgtccagcaacctcggaggacccggatcctcacggacccccccaacgggtagaagcttttctggcctgaactcccggctcaaggccactccctctacatactctggcgtgtttcggacccagagagtcgatctataccagcaggccagcccccctgacgccctacgatggatcccaaaaccttgggagaggacaggtcctcccccacgggaaggcccttctcgccgagcagaagagcccggatcccgaggcgacaaagagcccggactgccgccaccaaggtag

SEQ ID NO: 344407 - DNA, 6416 bp, Artificial Sequence
  derived and/or modified sequence
atgagcgatagatccggcccaaccgccaagggcaaagacggtaaaaagtattcctcactgaatctgttcgatacttacaagggtaagagcttggaaatccagaagccagccgtcgctcccaggcacggactgcagagcctgggcaaagtggctatcgctcgaaggatgccacctccggctaatctgccttctttaaaggccgaaaataaggggaatgatccaaatgtctctctcgttcctaaggacggcaccgggtgggcctcgaaacaggagcaaagtgatccaaaatctagcgacgccagcaccgctcagccccctgaatcacagcccttaccggcttcacagacccccgctagtaaccagcccaagaggccccctgctgctcccgagaacactccacttgtgccctccggcgtcaagtcctgggcccaggccagcgtgacacacggagctcacggagatggtgggagagcatcttcactgctgtcacgtttcagcagggaggagttccctaccctgcaggccgcaggggatcaggataaagcagccaaggagcgggagtcagcggaacagtcatccggccctggacctagtcttagaccacaaaatagcactacttggagagacgggggaggaagaggacctgacgagcttgagggacccgacagcaaactgcaccacggccacgatcccagggggggactgcagccctcagggccaccacagtttcctccatatagggggatgatgccaccgtttatgtaccctccctatctgcccttcccacccccatacgggcctcagggtccatatagatacccgacacctgacggtccttctcgctttccaagggtggcagggcctagaggcagcggaccccctatgaggttggtcgaacctgtcggaagaccctcgattctgaaagaagataatcttaaggagtttgaccaactcgaccaagagaacgacgacgggtgggccggagcccacgaggaggtagattacactgaaaaattaaaattcagtgatgaggaagatggacgcgattcggatgaggaaggggcagaagggcaccgcgattcccagtccgcttcaggggaggaacgtccgccagaggcagatggcaaaaagggcaattcaccaaacagtgaacctccaacaccaaagactgcttgggctgaaacaagccggcctcctgagaccgagccgggaccgcctgctcccaaaccgccactccccccaccgggtgattatccagaccgcggtggaccaccctgcaaaccccctgctccagaagatgaggatgaagcctggaggcagcggaggaaacagtcttcttccgagattagtctcgccgttgagcgtgcacgcaggcggagggaagaggaagagcgacgtatgcaggaggaaagaagggcggcttgcgcagagaaactcaagcgattagacgaaaaatttggtgccccagataaaagattaaaagcggagcccgctgcaccaccagccgctcctagcactcctgccccaccacctgcagttccaaaggagctccccgcaccccctgcccctcccccagccagcgcaccaacaccagagaaggagcctgaagaaccagcacaggcccctcctgcccagtctacccctactcctggcgtcgcggctgcacccacgctggtctctggcggtgggagcactagcagtacttcctccggctcctttgaggccagcccggtcgagcctcaattgccatcaaaggagggaccagagccaccggaagaggtgccccctcctacgacaccacctgtacccaaggtcgagccaaaaggtgatggtattggaccaactaggcagcctccatctcaggggctgggctatcccaaataccagaagtcactgcccccaagatttcagagacagcagcaggaacaactccttaaacagcagcaacagcaccagtggcaacagcatcagcagggctctgctccccctacccccgtgccccctagtccccctcagcccgtgacgctgggagccgtgcccgcaccacaggcacccccacctcccccaaaggctctttaccccggagccttaggacggcctcccccaatgccacctatgaacttcgatcctcggtggatgatgattccgccttatgtggatcccagactcctgcaaggcaggccacccctagacttctaccctcccggagtccacccatccggtctcgtccctagggagcgaagtgacagtggagggagctcttccgaaccttttgataggcacgctcccgctatgttgagggagagaggtacaccgccagtggatcccaaactcgcatgggtgggtgacgtatttactgcaaccccagccgaacctcgtcctctgacctccccccttaggcaggccgctgatgaggacgacaaaggaatgagaagtgagacaccacccgtgccacccccacccccatatcttgcttcatatcccggatttcccgagaacggcgcaccaggaccgccaattagccggttccccctggaggaaccaggccctaggccgctgccctggccacctgggtccgatgaggtggccaagatccagaccccaccacccaaaaaggaacctcctaaggaggagacagcacagctgaccggcccagaagccggtcggaagccagccagaggcgtggggtcaggaggtcaaggtcctcccccaccccgtcgtgaatcccggacagaaactaggtgggggcctcggccaggttcctctaggcgcggaatcccacctgaggagccgggagccccacccaggagagctggacccattaaaaagcccccacccccaacaaaggtagaggagctgcctcccaagcccctggagcagggcgatgagacgcctaaaccccctaagccggacccattaaaaattacaaaagggaagctgggaggcccaaaggaaacaccacccaatggcaacctcagccccgctccccgtttgcgtagagattacagctacgagagggtcggacccaccagctgtagagggcgtgggcgaggtgaatatttcgctcgaggacggggattcagggggacatacgggggaaggggcaggggcgctgcaggcaatagtgcagtgacagaaagctttgaggaaatgatgggcgtcgaggtcggccagggagatcagacaacactgttgctgcctgaggctgcgctgcccgctcgacatggagccagggtgcagagcatgagaaaatcaccttcaggtgcagggtccggagcacaaaaacaagcggctcgcccaatgcgcgttatatggctcctgcaaacccgaagactacctcatccacgccgtgagcattccccaagatcacggagtcctacaacccgaagtccgaccttccccgcaccagccaggtttaccccaggggtgggagagtctagcttgccggaaggcatttccccaggcccaaggaggcgcgaaccccctcaagtctgtcctggctggagcccaccggctaagagcttagccccaaaaaagccacccacggggccactaccgcctagtaaagagcccctgaaagagaaactgattcctggccctctaagcccagtcgcacgcggaggctccaacggcggatcaaacgtggggatggaggatggagagcgaccaagacgacggcgacatgggcgagctcaacagcaggacaaacctcctcgatttcgccgtctaaagcaggaaagggaaaacgcagcacgcggttctgaagggaagccctcccttaccctgcccgcttcagcccctggccctgaggaggccttgaccacggtgaccgtggcccctgccccacgacgagcagcagcgaaatcccctgatctcagcaaccagaattcggaccaggctaacgaagaatgggagacagcgtctgagtcctcagattttacgagtgagcgacggggtgacaaggaggcaccaccccctgtccttctcaccccaaaagccgtggggacacctggaggaggcggaggtggcgctgtcccaggcatcagcgctatgagtcggggtgacctgtcccagcgcgcaaaggacctgagcaaaaggagttttagctcacagcggcctgggatggagcggcagaatcggagacccggacctggagggaaagcaggctcgtctgggtcttcttctggcggaggcggagggggacctgggggacggaccgggccaggacgtggagataagagaagctggccatccccaaagaataggtcacggcctcccgaagagagaccccctgggctccctctgccaccgcctcccccatcctcctctgctgttttccgattagaccaagtcattcacagcaatccggctggaatccagcaggccctggcccagttgagcagccgtcagggttctgtcaccgccccaggcggacaccccaggcacaaacccggtcccccacaggctccacaggggccatcaccccgacccccaaccaggtacgagccacagagagtgaacagcggactctcgtccgacccacactttgaggaaccagggcctatggtgcgcggagtgggtggcacacctcgggattcagccggagttagcccatttccacccaagaggagggaacgcccaccaagaaaacctgagctgcttcaggaggagtccttgccccctcctcattcctcgggtttcctggggtccaaaccagaggggccaggtccacaagcagagtcccgggataccggcactgaagctttgacacctcatatttggaataggctacatactgctacgtcgcgcaaaagttataggccaagcagcatggagccctggatggaacccctgtccccctttgaggatgtcgctgggactgagatgtctcagtctgacagtggagttgacctgagcggggacagccaggttagtagcggcccttgcagccaacgcagttcgcctgacggcggactgaaaggggcagctgaaggacctcctaagcgcccagggggttctagccccttgaatgcagttccatgcgaaggaccacctggtagtgagccacctagacgcccacccccagctccacatgacggggatcgaaaagagctgcccagagagcaacctctgccacccggacctatcgggacagaacgaagtcaacacactgatcgcggtactgaaccgggtccgattcgtccaagtcaccgacctggcccaccagtgcagttcggaacatcagacaaagacagtgaccttagactcgtcgttggtgactccttgaaagcagaaaaggaattaactgcatcagtgacggaggccataccagtgtctagggattgggaattgttaccttcagccgcagcctctgcagaaccgcagtctaagaacctggattctggccactgtgtcccggagccgagtagctccgggcaacggctctaccctgaggtcttttacgggagcgccggaccttctagcagtcagatatcagggggacacggcctgtctgtgacatcaaagcagtggagaaggcctgggaccccttccctccatccatatcgaagccaacccctttacctgccacccggaccagctccaccatcagccctgctttccggagtggcattgaaaggacagttcctcgatttctcaacaatgcaggccacggaactcggcaaacttccggcagggggagtcctgtatccccctccatcgtttctgtactcgcccgcattctgccctagccccctgccggacaccagcctgttacaagtgagacaagacctgccctctccatctgacttttatagcaccccgctccagcctgggggtcagtcaggatttttgccaagcggtgctccagcgcagcagatgctccttccaatggtagatagccaactccctgtggtgaacttcgggtcacttcctcctgcacctcccccagcacccccttcgctctcgcttctgcccgtggggccagctctccagccaccttccctagccgtgcggccaccacccgctcccgctactcgtgttctaccctctccagcacggccttttcccgcttctctgggcagagcagaactccaccctgttgagctcaaacccttccaggattatcagaaattgagctcaaaccttgggggtcccggatccagcaggactcctcccacagggagatcattttcaggtttgaactctcggctcaaggcaaccccatccacctactctggcgtgtttcgcacacagcgtgtggatctttaccaacaggcctccccgcctgacgccctgaggtggattcccaagccatgggagagaactggtccaccacccagagagggcccaagtcgtcgcgctgaggaacctggatccaggggtgataaagaacctggcctgcctccccctcggta

SEQ ID NO: 344408 - DNA, 6416 bp, Artificial Sequence
  derived and/or modified sequence
atgtcagacagaagcggccctacagccaaaggcaaagatggcaaaaaatatagctcgctcaatctctttgatacctataagggtaagagcttggaaatccaaaaaccagcagttgcccctcgtcacggactgcagtctctcggaaaggtggcgattgcccgacggatgcccccacccgctaaccttcccagcctgaaagctgagaacaaaggtaacgatccaaacgtgtcgctagttcctaaagacgggacagggtgggctagtaagcaagaacagtctgaccctaagagctcggatgcttccaccgcccagccaccagagagtcagcccctccctgcctctcaaacaccagcctctaaccaacctaaacgccctccagcagcgccagagaacactccactagtaccatccggggtcaaatcctgggctcaggcttcagtcacccatggggcacacggggacggtggaagggcttcctctctgctgtctagattcagccgcgaagaattcccaacgctccaggcagcaggcgaccaggataaggccgctaaagaaagggaatcagccgaacaatcttccggaccgggtccttctctaaggccccagaattccacgacttggagagatggcggagggagagggcctgatgaactggagggtcccgatagcaagctgcatcacgggcatgacccgaggggagggctccaaccatccggaccgcctcagtttccaccttaccggggtatgatgcctcccttcatgtatcctccatacttgcccttccccccaccatacggccctcagggcccttatcgttatcctactccagacggcccatcccggtttccacgtgtggctggacctagaggaagcggaccacctatgcgtctagtggaacccgttggtcgcccatccatcctgaaagaggataatctcaaagagttcgaccaactcgaccaggagaatgacgatggatgggccggtgcacacgaggaagttgattacacagagaaactgaagttttccgacgaagaggatggtcgggactccgatgaagaaggcgctgaaggccatcgggacagtcagagtgcctctggggaagagaggccgcctgaagcggacggcaaaaaagggaactctccgaactcggaacctcctacaccgaagacagcctgggcagagacttcaaggccccctgagaccgagccagggccaccagcacctaagcccccactgcctcctccaggcgattaccctgaccgcggagggcctccttgcaagccccctgcgccagaggatgaggacgaggcatggcgtcagaggcggaagcagtccagctcagaaatctccctggccgtggaaagagccagacgcaggagagaggaggaggaacgacgcatgcaggaggaaaggcgcgctgcgtgcgctgagaagttgaaacgactggatgagaagttcggtgccccagataaaagactgaaggccgaacccgctgctccgccagccgctccctcaacaccggcaccccctcccgctgtgcctaaggagttgcctgcccctcctgccccacccccagcttcggccccaaccccagagaaggagcctgaagaaccagctcaagccccaccagcacaatccacacctacccccggagtggccgcagcccctaccctggtctctggcggagggtccacctcatctacctcaagtggctcttttgaagcctctcccgttgaaccacagttaccttcaaaggaaggccctgaacctccagaggaggtacctcctcccacaacgccacccgtcccaaaagtcgagcctaaaggcgacgggataggaccgacacgacagccaccctcccaaggactcggttacccgaagtaccagaagtccttgcctcccagatttcaacggcagcagcaggagcagctcttgaaacagcagcaacagcaccagtggcagcagcaccagcaggggtcggcgccaccaaccccagtgccaccaagtccccctcaacctgtgaccttgggggctgtgcctgcacctcaagcccctcccccaccacccaaagccctctaccccggagcactgggcagacctccccctatgccccctatgaattttgatccacgatggatgatgatcccgccatacgtagaccctagactcttacagggaaggcctcctttggacttttaccctccaggcgtgcacccttcgggtctcgtgccacgggagaggagcgatagtgggggatccagcagcgaacccttcgacaggcacgcccctgcaatgctgagagaaagaggcactcccccagtggaccctaaactcgcttgggtgggtgatgttttcactgctacgcccgctgaacccagacctctgacaagcccactgcgccaggcagccgatgaggatgacaagggtatgaggtctgagacgccaccggtccccccaccccctccctatctcgcaagctatcccggtttccccgaaaatggcgctccaggacctccgatttctcgctttcccttggaggaaccaggacctaggcccctgccctggcctccaggatctgatgaggtcgcgaagatccagacacctccaccaaaaaaagaaccccctaaagaagaaacagcccagctgactgggcctgaagcaggacgcaaaccggctcgtggtgttgggagcgggggacaggggccaccaccgcctcggcgtgagagtaggacagaaacacggtgggggcctagacccggatcctcacgaagagggatccctcctgaagaacctggagcccctccaaggcgagccggaccaataaaaaagcctcctccacctaccaaagtggaagaattgccccctaaacccttggaacagggggatgagacgcccaagccacccaagcctgaccctctcaaaatcactaaggggaaactaggcggtcctaaagaaacacccccaaacgggaacctctcccctgctccacggctgagaagggattatagttacgagcgagtaggacctaccagctgccggggacgtgggagaggggaatacttcgcccgtggaagagggttccgcggtacctacggaggcagaggcaggggcgctgccggtaacagcgctgttaccgagagttttgaggagatgatgggtgttgaggtaggccagggggaccagaccacactgcttctgcctgaggcagcattaccagcgagacatggcgctagagtgcagagtatgcgcaaaagtccctccggggctggatcaggcgctcaaaaacaggcagcacggccaatgagggtgatatggttactacagactcgacgcctgccccatccgcgaagagaacacagccccaggagccgttctcctaccactcgctccccgaccttccctgcgcctgcacggttcacgccaggcgtaggcgaatcctccctgcctgagggcatctctcctggccctcgcagaagggaacctccccaggtgtgtcccggttggtcccccccagcgaagtctctggcaccaaagaaacctccgactgggccactgccaccaagcaaagaacctctgaaagaaaaactaattccgggacctctctctcccgtggctcgtgggggtagtaacggcggaagcaatgtgggtatggaagatggggagagaccgagaagacgcagacatggcagagcacagcaacaggataaacctcccaggtttcgacgactgaagcaggagagagagaatgccgctcgcggaagcgagggaaagccatcccttacgctcccagcatccgcacccggtcccgaggaggccttgaccacagtaactgtcgcccctgccccacgcagggccgctgctaagtcccccgatctttcaaaccagaacagcgatcaggctaacgaagaatgggagaccgcctccgaatcatctgacttcacatccgaacgcaggggtgataaggaggcacccccacccgtgctgctgacgcctaaagccgtcgggacgcccggaggaggaggcggaggcgcagttcccggaatcagcgctatgtccaggggggatctgtcacagcgagctaaggatctcagcaaaaggtctttctccagtcagagaccaggcatggaacggcagaaccggagacccggtccaggcggtaaagcaggatcgagcggatcctcttcaggcggaggaggcggaggcccagggggtcggaccggaccgggtaggggtgacaaacggagttggccctccccaaaaaataggtcccgcccacccgaagaacgcccaccaggactacctctcccccctccacctcctagcagtagcgcagtttttcgcctggatcaggtaatccactcgaatcctgccggtatccagcaagcactggctcagctttcaagccgccagggttcagtcaccgctccaggcggacaccccaggcacaaaccaggaccacctcaagccccacagggccctagccccagacccccaacaagatacgagccccagagagtgaatagtggcctgagctccgacccccatttcgaggaacccggtcctatggtccgaggcgtgggcggaacacccagggactcggctggagtgtctcccttccccccaaaaagacgggaaaggcccccaagaaagcctgaactcttgcaagaggaatccttgcccccacctcattcctcagggtttctaggttcaaaacccgagggcccaggaccgcaggcagaaagccgcgacacgggcaccgaagctctgacaccccacatctggaacaggcttcacacagccacaagcagaaagagttaccgtccgtcctccatggagccatggatggagcctttgtctccttttgaagatgtcgcgggtaccgagatgtctcagagcgatagtggagtggacctgagcggtgacagccaagtgtcttccggcccttgttcacagcgatcctcccccgacggtgggctcaagggagccgcagaagggccaccgaaacggcctggcggttccagccccttaaacgctgtgccctgcgaaggcccacctggctctgaacctcccaggcgaccgccacccgctccccacgatggtgaccggaaagagttgcctagagaacagccgctgcctccgggacctatcgggaccgagaggtcccagcatacagacaggggcacggagccaggaccaattcgacctagtcaccgcccaggcccaccggtccaatttggcacatcagacaaagactccgatcttcggctcgtagttggtgattcgctgaaggccgagaaggaactcacggccagcgtgacggaggctatcccggtgagccgcgactgggaattactcccctccgcagcagcgtccgctgagcctcaatccaagaacctagattccggccactgtgttccagagccgagtagctcaggccagcgcttgtacccagaggtgttttacggaagtgctggccctagcagcagccagatttcgggaggccacggcctcagtgttacaagcaagcagtggcggagaccgggaacccccagcctgcacccatatcggagccaacctctctatttgccaccgggacccgcacccccttcggccctcttgagcggagtagctctcaaggggcagtttctggatttcagcacaatgcaggccacggaactgggcaagctccctgccggtggtgtgctctatccaccaccaagtttcctatacagcccagcgttctgcccgtcgccactgccagacacctccctccttcaagtgagacaggatctgcctagtccctcggatttctattcgaccccgctgcagcctgggggacaatctggcttcttgccttctggtgcccctgcccagcagatgctcctcccaatggttgattcccagcttcctgtggtgaatttcggaagccttcctccagctccgcctcctgctccccctagccttagccttctgcccgtgggaccagcattgcagcccccttccctcgctgtccgtcccccaccggcacccgcaacccgcgtcctgcccagccctgctaggcctttccccgcttcactggggagggctgaactgcacccagtggaactcaaacctttccaggattatcaaaaactgtcaagcaatctagggggacctgggagttcaaggacaccccctaccggcaggtcattctccggcctgaattctcgcctaaaagcgactcccagcacgtactcaggagtattccggacccagcgcgtcgatctctaccagcaggccagtcctcccgacgcactccggtggatccccaagccttgggagcgcacaggacccccaccccgtgaggggccaagtcgcagagctgaggagcctggatctcggggagataaagagcccggactgccaccccctagata

SEQ ID NO: 344409 - DNA, 6449 bp, Artificial Sequence
  derived and/or modified sequence
atgagcgataggtccgggccaaccgcaaaaggtaaggacgggaagaagtattcctctttgaatctttttgatacctacaagggtaagtccctggagatccagaagccagcagtggctccccgtcacggccttcagtccttgggtaaagtggccatagcacgtcggatgcccccacccgctaacctgccctcactaaaagccgagaataaaggaaacgatcccaatgtttccctcgtacctaaagacgggacggggtgggctagcaaacaggaacaatctgatcctaaaagcagcgacgccagcacggcacagccacctgagtcccagcccttgcccgcttcacagacacccgcaagcaaccaaccaaaaaggccccctgcagccccagaaaataccccactcgtgccttcaggtgtgaaatcatgggcccaggcctcggtcacccacggagcccatggagacggagggagggccagcagcctgctttccagattcagccgcgaagaatttccgactttacaggcagccggtgaccaggacaaggccgcaaaggagagggaatctgccgaacaatcctccggtcccggacctagtctgcgccctcagaacagtaccacatggagggacggcggaggacggggtcctgacgaactcgagggccctgactcgaaactgcaccatggccacgacccccgagggggactgcagccaagtggcccacctcaatttcccccttatagaggaatgatgccaccattcatgtatcccccttacctaccttttccccctccgtacggaccacagggaccatatcgctatcctactcccgacggcccttcaagattccccagggtcgccggacccagggggagcggccctcctatgcgcctggtggagccagtgggacgtcctagcattctaaaagaggataacctaaaagagtttgatcagctggaccaagagaacgacgacggctgggcaggcgctcacgaggaagtggattatacagagaaacttaaattttctgacgaagaggatggcagagattccgacgaagagggagccgaagggcatcgggacagccagtccgcaagtggtgaagagcggccaccagaagccgacgggaagaaaggtaactctcctaattcagaaccacccacaccaaagaccgcgtgggcagagacttctaggcccccagaaacagagcctggtcctcccgctcccaaacccccactgcctccgccacaccgcggacccgcaggtaattggggccctcctggcgattacccagaccgaggcggtcccccatgcaagcccccagcacccgaggacgaagacgaggcatggcggcagcgtcgaaaacaatcctcgtcagaaatctcactcgccgtggaacgtgccaggagacgcagagaagaggaggagcgccgtatgcaggaggagcggcgagctgcatgcgcagaaaaactgaagaggctggacgagaagttcggcgctcccgataagagactcaaggccgagcctgccgctcccccagctgcaccatccactcccgctccacccccagccgtgcccaaagaactgcccgctcctccagcaccaccgcctgcgtcagcacccaccccagaaaaagagcccgaagaacccgcacaagcccctccagcgcagagtactcctactccaggcgtggctgccgcacctactcttgtaagtggcggtggttcgacgagctctaccagcagcggctcttttgaggcatctcctgtggagccacagctgccatcaaaggaagggccagaaccacccgaggaggtccctcctccaacaacacccccagtgccaaaagtggagccaaaaggagatggtatcggtccaacacgacagcctccatcccagggtctaggctacccaaaataccagaagtcgttacctccgagattccagagacagcagcaggagcagctacttaaacaacagcaacagcaccaatggcagcaacatcaacagggaagcgcccctcctactccagtccctccaagtccaccccagcctgtcacgctgggcgcagtgccagccccacaggctcccccaccacctccaaaggctctgtacccgggagccctgggtaggcctcccccaatgccccctatgaactttgatccccgatggatgatgatacccccttatgtcgaccctcggctgttgcaggggagaccacctctggacttttacccgccaggggtgcacccaagtggccttgttccccgagagcgctccgactcggggggatccagctccgagcctttcgatcgtcacgcccctgctatgctaagggagcgcggtacacccccagtggaccccaaacttgcttgggttggagacgtgttcaccgctacgccagccgagcccagacctctgacaagtcccctccgccaggcagccgatgaggacgacaagggtatgcgctctgagacacctccggtccctcctccccctccctacctggcttcttatcccggattccctgagaacggggctcctggtcctcctatttcaaggttcccactggaagaacctggcccacgaccattaccgtggccacctggcagcgatgaagtggctaagatccaaactcctccaccaaaaaaggagccccctaaagaggaaaccgcccagttaactggtccagaagctggacgaaagccagccagaggggtgggatccggaggtcaaggaccgccacctcctcgaagggaaagtcgcaccgagactcggtggggtcctagaccgggttcctcccgtcggggtattccgccagaagagcccggtgcacccccaagaagggcagggccaattaaaaagcctcctcctcctacgaaagttgaagagctgcccccaaagcccctggagcaaggggacgaaacccctaaaccccctaaacctgaccctctaaaaatcaccaagggaaagctggggggaccaaaagaaaccccacctaacggcaacctgtccccggctccccgtttgagacgagactacagttatgagagagtggggcctacctcatgccgcggaaggggccgtggagagtatttcgcgagaggcagagggtttcggggtacttacggtggcagagggcgtggtgcagcaggtaactcagccgtcacagagagtttcgaggaaatgatgggggtcgaagtgggccagggtgaccagacaaccctccttctcccggaagctgctttgccagccaggcatggcgctagagttcagtcaatgaggaagagcccaagcggtgctggctcaggtgctcagaaacaagcagctcgacccatgcgcgtgatctggctcctgcagactcggagactacctcatcctcgccgtgaacactcccctaggtctagatcccccaccacccggagtcccacttttcccgctcccgctcggttcactccgggagtgggggaaagcagtttgcctgagggaatctctccgggtcctcgtcggcgtgagcctccgcaggtttgccctggttggagtcctcctgcgaaatcacttgccccaaaaaaaccacctacagggccactcccccctagcaaagagcctctaaaagagaagcttattccaggccctctatctccagtagctcggggtggcagcaatgggggtagcaacgtcgggatggaagacggggaacggcctcgtagacggagacatggacgagcacagcaacaggacaaacccccaaggtttagaaggcttaaacaggagagggagaatgcggctcgcggaagtgagggtaaaccaagtcttactctgcccgctagcgctcccggacccgaagaggctctaacgacggtgaccgtagctcccgcaccaagacgggcagctgcaaaaagcccggatctgtcaaaccagaatagcgaccaggctaacgaagaatgggagaccgccagtgaatcctcagactttacatctgaaagacggggtgacaaagaagccccacccccagtgctattaacccctaaagcagtcggcactcccggaggaggtggtggcggagccgtccccggtatatctgccatgtcccgcggtgatctttcccagcgcgcaaaggatctctccaagcggtcattcagcagccaacgacccggtatggagcgacagaacagacgcccaggtcctggtgggaaggcgggtagctcagggagctcatcgggcggtggtggcggaggtcccggaggaagaaccgggcctgggagaggcgataagagaagttggccgagcccgaaaaaccgctccaggccaccggaggaaagaccgcctggcctgcctctgcctccgcctccaccctcatcaagcgccgtgtttcggctggaccaagttatccacagcaaccctgctggcattcagcaagctctggcccagttgtcatctaggcagggaagcgtgaccgcccctgggggtcaccccagacacaaacctggtccccctcaggcaccccagggccctagtccacgaccacccaccaggtacgagccacagcgtgtcaactcgggtctaagctccgatccacactttgaggaacccggaccgatggtgcgaggcgtcggcggtactccgagggactcagcaggcgtaagtccgtttccccctaagagacgagagcgcccacctaggaagcccgaactgcttcaagaagagtcactgccaccaccccacagcagcgggttcctcggctctaagccggagggtcctggcccacaagcagaatccagggatacaggaacggaggcacttacaccccacatctggaaccgactgcacactgccacaagccgtaagtcttataggccttccagcatggaaccatggatggagcctttatccccgtttgaggacgttgcaggcacagaaatgtcacagtccgacagtggcgttgatctctctggcgacagtcaggtgagcagcggtccttgttcccagcgtagctcccctgacgggggactaaagggcgcagccgagggaccccctaaaaggccaggaggctcatctccactgaatgcagtgccctgtgaaggtcctcccggatcagagccgccacggaggccaccacctgctccccacgacggagacagaaaggaattgcctagggaacagccattgccacctggccctatcgggactgagagatctcagcacacagacagggggacggagcctggacccatacggccaagtcatagaccgggtcccccagtacagttcggaacatcagacaaggattctgacctgcggctggtcgttggtgattccctgaaggccgagaaggaactcaccgcaagcgttacagaggctatccctgtgtcaagagactgggagctactgccctctgctgcagcgtcagctgaaccccagagcaagaatctcgatagtggacactgtgtgcctgaaccatcgtcttcaggccagcgcctttaccccgaggtgttctatggatctgctggacccagcagcagccagatttccggcggacacggactgtctgtgacctctaagcagtggcgcaggccgggtactccatccctccacccctatcgatcgcaacccctgtacctgccaccaggcccagctccaccatccgctctactctctggcgtggccttgaaaggccaattcctcgacttcagtaccatgcaggctaccgagctgggtaaactgcccgcaggtggcgtgctttatccaccaccatcctttttgtactctccagcattctgcccttcccccctccctgataccagcctgcttcaagtgaggcaggacctgccttcgccatctgatttctatagcactccactgcagccagggggtcagtcaggctttttgccttccggggctcctgcccagcaaatgcttttaccaatggttgactctcagctccccgttgtaaactttggttccctgcccccagcccctccacctgctcctcctagcctctcgctactaccagttgggcctgccttgcagcctcccagtctggcggtcagacccccacctgccccagctacccgggtgttgccttccccggctcgcccttttcctgcaagccttggtcgagccgagctgcaccctgtggagctgaagccttttcaggactatcaaaaactcagctcgaacctgggcggacctggatccagccgaacccctcctactgggcgatctttcagcggccttaacagcagactcaaggctaccccatcgacatattctggcgtcttcaggacacagagagttgacctctaccagcaggcctccccccctgacgcgctgcggtggattcctaagccatgggaacgcaccgggcctcccccacgagaagggccaagccgtagggctgaggaaccgggttcaagaggcgataaagagcccggactgccaccccctaggta

SEQ ID NO: 344410 - DNA, 4149 bp, Artificial Sequence
  derived and/or modified sequence
atgctccgagagaggggaacacctcccgtggacccaaaattagcatgggtgggcgatgtctttaccgccacaccagccgagcccagaccattgactagccctctgagacaggcagccgatgaggacgataaagggatgaggtctgaaacccccccagttcctccccctcctccgtacctcgcgagttatcccggatttcccgaaaatggcgctccgggtccgcctatttcccggttccctctggaagaacccggtccaaggccccttccatggccccctggaagtgatgaagttgccaaaatacagactccccctcctaagaaggaaccaccaaaggaggagaccgcccaattgacaggtcctgaggctggaagaaagcctgctcgaggggtgggcagcgggggacaaggacctccgcctccacggagggagagcagaacagagacccggtggggacctcggcctgggtctagcagacgaggaatcccccctgaggagcccggagcaccccctaggagagcgggacctatcaaaaaaccccctccaccgaccaaggtggaagaattgcctcctaaaccgcttgaacagggcgacgagacaccgaaaccaccaaagccagatccactgaagattaccaagggaaaacttggtggacccaaagagacccctccgaacgggaatttaagtcccgcacctcgcctccgccgtgattactcatacgagcgcgtgggacctacgtcctgccggggtcgtggaagaggcgagtacttcgcacggggtcgcggatttcggggaacgtatgggggtagaggcaggggagccagatctcgggagttccgctcataccgagaattcagaggtgacgatggcagaggaggtggcactggcggtccaaaccatccccctgcacccagggggagaactgcttccgagaccagaagtgagggcagcgagtacgaagagatccctaagagaaggcgacaacgcggtagtgagacagggtccgaaactcacgaatccgatctggctccctctgacaaagaggcacctacccccaaagaaggcaccttgacacaagtgccattggctccgccaccacctggggctcctccctcgcccgcaccggcaaggttcacagccagaggcggaagagtgttcacgcctcggggtgtgccttccaggcggggacggggtggcggaagacccccaccgcaggtgtgccctggttggtcaccaccagccaagagcctcgccccaaagaagccccctacaggccctctcccgcctagcaaggagcctctaaaggaaaaactgatacctggaccgctcagtcctgtcgccagggggggttccaacggagggagcaacgttggcatggaggacggggaaaggcctaggagacggaggcatggcagggctcagcagcaggacaagcctccccgattcagacgcctaaagcaggaacgcgagaacgccgctcggggatctgaaggcaagcccagccttactctgccggcaagtgcacctggcccagaagaggcacttaccacagtcactgtggcacccgctcctagacgcgctgcagccaagtcacccgacctgtctaaccagaattcggaccaggcgaatgaggaatgggaaacggcttcagaatcctcagattttacaagcgaacgcagaggagacaaagaggctcctccaccagtactgttaactcccaaggctgtgggcactcctggcggtggcggaggtggcgcagtccctgggatttccgctatgagtcggggagacctctcacagcgcgcaaaagatctcagcaaaagatcttttagttcccagcggcctggcatggagcggcagaacagacgccctggccctgggggaaaggctgggtcgtccggttcatcgtccggaggagggggtggaggacctggtgggaggacagggccaggaaggggagataaacggagctggccgtccccaaaaaaccggtctcgcccaccagaggagaggcccccaggtctcccgctgcctcccccaccgccaagcagcagcgcagtattccgacttgaccaggtgattcactctaaccccgctggaatccaacaagccctggcccagctcagtagtcgccaggggagcgtaactgctcctggaggtcatccccgacataagcccggacctccacaggctccacagggacctagcccgaggcccccaacgcgctacgagccgcaaagagtgaactccggcctcagtagcgatccccactttgaagagccgggtcctatggtccgaggggtgggcggaacccctagggactcagccggagtttctccattcccccctaaaagaagagaacgtccacctcgtaagccagagcttctgcaggaagaatcactcccacctccccacagttccggcttcctgggctccaaacctgaaggccctgggccacaggctgagagccgcgacactggtaccgaagctctgactccacatatctggaaccgccttcataccgcaacctcacgtaaatcctaccgtcccagtagcatggagccctggatggagccgctaagcccctttgaagatgtggccggtacagaaatgtctcagtctgacagcggggtggacctgtcaggagactcccaggtgtcttcaggcccatgttctcagaggagtagtccagatgggggactgaaaggagcggcagaaggtcctcccaagagaccagggggaagcagtccgctgaatgccgttccttgtgaagggcctccaggcagcgaacctcccagacgccctcctccagcccctcatgatggcgatcgaaaggaactgccacgggagcagcctctgcctcctggccctatcggcaccgaacgcagccagcacactgaccgtgggaccgagcctggcccaatacggccatcgcatcgcccagggcctccagtgcagttcggtacgagcgataaagattctgacctcagacttgtcgtgggcgacagtctgaaagccgagaaggaactcacggcctccgtgacggaagccattccggtaagccgcgactgggagctgctgccctcagcggcagcatccgcggagcctcagtcaaagaatttagatagtggacactgtgtgcctgaaccctcttccagcggccaaaggctgtaccccgaagtgttttacgggtctgctggcccttcatcctcacagattagtggtggagccatggacagccagctacaccccaacagtggtggtttcagaccaggtaccccctcccttcacccctatcggtcccaacctctgtatctacctccgggtccagctcccccttcagctctcttatccggggtggctctgaaggggcaattcctcgatttttcaactatgcaggctaccgaattaggaaaattaccagctggtggagtactgtatcccccaccaagttttctctattcccctgctttttgcccatccccgttaccagatacgtcattactgcaagtccgccaagacctaccatccccgtccgatttctacagcacgccactgcagccgggagggcaaagtggcttcctgccgagcggcgcacccgctcagcagatgctgctgccaatggtcgattcacaactgccagtcgttaactttggttccctcccgccagccccacctcccgcacccccttcactcagcttgctccccgtgggcccagccctccagcccccttcactggcagtgcgcccaccaccagcaccagccacccgcgtgctgccttcacctgcgcgaccctttcctgccagtcttggcagggcagagttgcaccccgttgaattgaagcctttccaggactaccaaaaactgtcctcaaaccttggagggccaggttcgagcagaacacctcccacggggagaagtttctcaggacttaattcgaggcttaaggccactccctcaacctactccggcgtattcaggactcagcgggtggatctgtatcagcaggccagcccgcctgatgcactgcggtggatccccaagccctgggagagaacaggccctcctcccagagaggggccatcccgtcgggctgaagaacccggtagcaggggtgacaaagaacccggtctaccacctccaagatag

SEQ ID NO: 344411 - DNA, 6449 bp, Artificial Sequence
  derived and/or modified sequence
atgagtgacaggtctggcccaaccgctaagggaaaggacggaaagaagtactcctccctgaacttatttgatacatacaagggaaagtccctagagatccagaaaccagcagtggctccacgccatggcctccagtcgctgggaaaagtcgccatcgcacgtcggatgccccctcctgccaaccttccctcactgaaggcagagaacaaaggtaatgatccaaacgtgtccttggtgcctaaggacggaaccggatgggcaagcaagcaggagcagagcgacccaaaaagtagcgacgcttcaactgcgcagccacccgagtcgcagccactccctgctagccagacaccagcctccaatcagccgaagcggcctccagccgctcccgagaacacgccccttgtacctagcggcgttaagtcgtgggcccaggcatcagtgacacacggcgctcatggagatggcggtcgagcatccagtcttctttctaggttctctcgagaagagttccctacccttcaggcagcaggtgatcaggacaaggctgctaaggagagagaatccgccgagcaaagctccggtccaggtcccagcttacggccacaaaatagcaccacctggagggatggcggaggtagaggaccagatgaactcgagggaccagacagtaaattacatcacggccacgacccaagaggcggactgcagccgtccgggcctcctcagttcccgccttaccgcggaatgatgcccccttttatgtatcccccttacttgcccttcccaccaccatacgggcctcagggcccataccgctaccctacgcccgatgggccaagccgttttccaagagtggctggaccaagagggtctgggcctccaatgcggctggtagaacctgtcggtcgcccaagcatactgaaagaggataacctcaaagaatttgatcagcttgaccaagagaacgatgacggatgggccggagctcatgaggaggtcgattacaccgaaaaactgaagttttccgacgaagaggatggccgagattctgacgaggagggcgctgaagggcatagagacagccagtctgcttccggcgaagagcggccacctgaagcagacggaaagaaggggaatagccctaactcagaacccccaacccccaagacagcttgggccgagacttcaaggccacccgaaacagaacctgggcctccagcaccaaagcctcctctccctcctccacatagaggcccagctggcaattggggtcccccaggcgattatccggatcgaggcggtcccccttgtaagcccccagctccggaagatgaggatgaagcctggcgccagaggaggaaacagtcctcttcagaaatctccctggcagtggagagggcaaggagacgacgggaggaagaggagcggagaatgcaggaggagagacgagccgcatgcgcggagaagttaaaaaggctggacgagaagttcggagcccctgacaaaaggcttaaggcggaacccgcagctcccccagctgcgccaagcaccccggcaccccctcctgctgttccgaaagagttgcctgcgcctccggcaccccctcccgctagcgctccgacacctgagaaggaacccgaagagccagcacaggctcccccagcgcagtcaacgcctacacccggtgtggctgcagcaccgacccttgtaagcggcggtgggtctacgagttcgacctcctctggatcgtttgaggcatcaccggtcgagccccaactgccatctaaagaaggtccggagcctcctgaggaggttccccctccaacgactcccccagtgccgaaggtggagccgaaaggcgatgggatcgggccaacaagacagcccccatctcagggcctcggataccccaagtaccagaaatcactgcctcccaggttccagcgccaacaacaagagcaactactcaaacagcaacaacaacatcagtggcaacagcaccagcagggctcagccccaccaacccctgtaccaccgtcaccaccccagccagtaaccctgggcgcagtccctgccccacaggcacccccacctccccctaaagccctatatcccggagcccttggtcgcccaccacctatgcctcctatgaattttgatccccgttggatgatgatccctccatacgtggaccccagactgttacagggccgtccccctcttgatttttatcctcctggcgtgcatccttcaggcctcgtacccagggaaaggtcggactctggaggatcctcttcagagccgtttgaccgtcatgcccctgccatgctgcgcgagagagggactccgccagtggatccaaaattggcctgggtgggtgacgtgtttactgctacaccggctgaaccacgacccttaacaagtccactgaggcaggcggcagacgaagacgataagggcatgagatcagaaacaccgcctgtgccgcctccccctccctacctcgcaagttacccgggttttcccgagaatggggcacctggccctccgataagccgtttccccctggaagagccagggccaagacccctcccttggccacccggtagcgatgaggtggccaagatccaaacccctccacctaagaaagaaccgcctaaagaggagacagcacagctcaccggccctgaagccggtaggaagccggcaagaggggtcggaagtggaggtcagggccctccgcctcctcgcagggagagtcggaccgaaaccagatgggggcctaggcccggatccagcagacggggtattccaccggaagagcccggagcaccccctagacgtgctgggccaattaagaaaccaccacccccaacaaaagtggaggagcttccccctaaacctctggaacagggggatgagacacccaaaccccctaaaccagaccccctgaagatcacaaaaggaaagttgggaggccctaaagagacacctcctaacggcaatttgtcccccgctcccagactgcggagagattattcctacgaacgcgtgggccctactagctgccgcggtcgcggaagaggcgagtattttgctcggggtcggggtttccgaggaacgtatggcggacgcggacggggagcagctggcaatagtgccgtgacagagtcttttgaagaaatgatgggcgtggaggtgggccagggcgatcagaccaccctgctcctgcctgaggccgctcttcctgccagacacggcgcacgggtgcaatccatgcgcaaatcaccgtctggcgctggaagtggggcacaaaagcaggctgctagacccatgagagttatctggctgcttcaaacacggaggttaccacatcccagacgcgaacattccccacgcagcagaagtccaaccactcggtctcccactttcccagcgccagccaggtttacccccggagtgggcgagagcagcctgccagaaggcatctctcctggccctaggcggagagagccccctcaggtgtgtccaggctggtcccccccagccaaatccctggctcccaagaaacccccaacgggtccactgcccccttccaaagaacccctcaaagagaagcttatccccggtcccctttccccagtggcccgtggaggaagtaatggaggatcaaacgtggggatggaggacggggagcgcccaagacgcaggcggcacgggcgtgctcagcagcaagataagccacctagattcaggaggctgaagcaggagagggagaacgccgcacgaggctcagaggggaagccaagcctgaccctgcccgcatccgcccctggacctgaggaagccctgaccactgtaaccgtggcgccagctcctcgaagggcagctgcaaaatcacccgatttgagcaaccagaactcagaccaggccaacgaagagtgggagaccgcttctgagagctcagactttacaagcgagcggaggggggacaaggaggcccctcctccagtgttgctcacacctaaggccgtgggcactccaggcggaggagggggtggcgcagttcctggcatctccgcaatgtctaggggagatctgtctcagcgggcaaaggatctgtctaaaaggtccttctcgtcacaacgaccagggatggagcggcagaatagacggccaggcccagggggaaaggctggcagctcaggtagcagctccggcggtggtggaggcggacccggtggcagaaccggtcccggacgaggagataagcgcagctggccttccccaaaaaacagaagccgaccaccagaagaacggccacctggtcttcccttgcctccacctcccccttctagctctgctgtgtttaggctggatcaggtgatccactccaaccccgcaggcatccagcaggctctggctcagctcagttcgagacagggtagcgtgaccgcccctggcggacatcccagacataaacctggaccgcctcaggccccacagggccctagcccaagacctccgacaaggtatgaaccgcaacgggtgaattctggtctgtcttctgacccacatttcgaagagcctggccctatggtccgtggcgtcggcggaactcccagagatagcgctggcgtgagtccattccctcctaagaggcgcgaaaggccgcctcgcaagccagaacttttgcaggaagagagcctgccccctccgcactcctccgggtttttgggaagcaagccagagggacctggcccacaggccgagagccgggatacaggcaccgaggcattaaccccccatatttggaatcgactgcatactgccacgagccggaagtcgtatcgcccaagcagtatggaaccttggatggaaccgttaagcccctttgaagatgttgccggaacagagatgagccagtcggattcgggcgttgacctttccggagattcccaagtaagctcaggtccttgctcccagcggtcttctcccgacggcggtcttaaaggcgctgccgagggcccaccaaaaaggcctggcggatcttccccactgaacgccgtaccttgtgagggccctcctggttcagagccccctcgcaggcccccacccgctccccatgacggggaccgcaaggaactgcctagagaacaaccattgccccctgggccaattggtactgaacggagccagcatacggaccggggaacagaacccggtcccatccggccttctcaccggcctggaccccctgtacaattcggcacttctgataaagacagcgacctccgtctcgtggtaggcgactcccttaaggccgaaaaggaattgactgcctcggtgaccgaggccattcccgtgagtcgggactgggaactgttaccgtccgccgctgcttccgcagagcctcaatctaaaaacttagattcagggcattgtgtgccagaaccaagctctagtgggcaacgtttgtatccagaagttttctatggcagtgctggcccttcaagcagtcagattagcgggggacacgggctgagtgtgacgagtaaacaatggcgccgtcccggaacaccttctctacatccctacagatcacaaccgctgtacctgccccctggccctgctcctccttccgcactcctttctggcgtggccttaaagggacaattcctagatttttctactatgcaagctactgaacttgggaagctgcctgccggaggtgtgttataccctccaccctcatttctctactctcccgctttttgtccttcgcctttgccagacactagtctgcttcaagtcagacaggacctgccttctccaagcgacttctactctactccactgcagccgggtggccagtcagggttcttaccaagcggggctcccgcacagcagatgcttctcccaatggtggactcccagctgcctgttgtgaatttcggcagcttgccgcctgcccctcctcccgcaccccctagcttgagtttactccccgttgggccagccctccaacccccttcactcgcggtcaggccaccacccgcaccagcaacaagagtcctgccttcccccgcaaggccattcccagcctccctaggacgggcagagctacaccccgttgagctcaaaccttttcaggattaccaaaaactatctagcaacctcgggggaccgggttcatcccgaactccgcctacgggcaggtccttttcaggcctgaatagtcgtctgaaggctaccccatcaacatatagtggcgtatttcgaacacagagagtagacctgtaccagcaggccagtccacctgacgctctgagatggatccctaaaccctgggagcggactggacctcccccaagagaaggcccttcaagacgggctgaagagcccggtagtcggggtgataaagaacctggactaccgccaccgcgtta

SEQ ID NO: 344412 - DNA, 4149 bp, Artificial Sequence
  derived and/or modified sequence
atgctgagggagcgcggaaccccaccagtggatcccaagctagcttgggttggggatgtttttaccgctacgcccgctgaacctcgcccactgaccagcccgctgagacaagcggcagatgaggatgacaaggggatgcggtcagaaacaccaccggtcccaccccctcctccttacttggcctcttatcctggtttccccgaaaatggggcacctgggccacccatatcgagattccccctagaagaaccaggccctcgcccactaccctggccacctggaagcgatgaagtggcaaagatccagacgccacccccaaagaaggaaccgccaaaagaggaaactgcacaactgactgggccagaggctggcagaaagccggctcggggtgtcggatcaggaggacagggtccacctcctccaagacgggagtcaaggactgagacacggtggggtccaaggccaggcagtagcagacggggtatccctcctgaggaacccggagcgcctccccgtcgggcagggcctatcaagaagcctccgcctccaactaaagtcgaggagctgcctccaaagcctctggagcagggcgatgagacaccgaagccaccaaagccagatcccctcaagattaccaaaggcaagctgggagggcctaaggagactcccccaaatggaaatctgagccccgcacctcgcttgaggagagactacagctatgaacgagtgggccctacaagctgtaggggcaggggcaggggggagtactttgcacgcggaaggggatttagaggaacttacggaggcagaggcaggggggcaaggtcccgagagtttcgctcctaccgggaatttagaggcgacgacggacgcggaggtggcacaggcggaccgaaccacccacctgccccaaggggtcgtacagcctctgaaacccgatctgaggggtctgagtacgaagagatccccaagcggagaaggcagagaggctcagagactggctcagaaactcacgagtcagacttggcacctagtgacaaggaagctcccactccgaaggaaggtaccctgacccaggttcctctggctcccccacccccaggggctccaccatctcccgcaccagcacgctttaccgctcgcggagggagagtgtttacccctaggggggtgccttcacgaaggggcagaggaggaggaagacctcctcctcaagtgtgtccagggtggtcgcctcctgccaaatcactggcccctaagaagcccccaacaggtcctctgcccccaagcaaggagccactcaaagaaaaactgatccccggacctctttcccctgtggcgcgaggtgggtcaaacggtggtagtaacgttggaatggaggacggcgaacggcctcgacgcaggagacacgggcgtgctcagcagcaggataagccacccagatttagaagattgaagcaagagcgtgagaatgcagcccgagggtctgagggcaagccatcactgacactccctgcatcagctccaggacccgaagaggcactgaccacggtgacagttgcccctgcacctagacgggcagccgctaaaagcccagatttgtcaaaccagaattcagaccaggcaaacgaagaatgggaaacagcctccgaaagttccgactttacctctgagaggcggggtgataaggaagcacctccccctgtgttactgacgcctaaggcagtcggtacccctggagggggaggcggtggagcggtgccgggaattagcgcaatgtcccgtggagacttgagtcagcgcgctaaagacctttccaagaggtcattcagctcacagcggccaggtatggagcggcagaacagacgaccaggccctgggggtaaagcaggtagctcaggaagctcctccggcggagggggaggcggtccaggaggtcgcaccggcccaggcagaggcgataagaggtcttggccctctcctaaaaatcgtagtcgtcccccagaagaacgccctccagggctgccgctgcccccaccacctccgtcttcaagtgccgttttccgcttagaccaagttatccattcaaaccctgcaggaattcagcaggcactggcgcagttgtcttccagacagggatccgtgacggccccagggggacatccacgtcacaaaccaggaccaccgcaagcaccgcagggcccatcaccacgaccccctacacgctatgaacctcagagagttaattctggtctgagctccgatcctcatttcgaggaacccggacctatggtgcgcggagtgggaggtactccaagagactcggccggagtttcccctttccctcccaaacgcagggagcgccctccccgaaagccggaacttttacaagaagagagcctacctccgcctcactccagcggattcttgggatctaagccggagggccctgggcctcaagctgaatcacgcgacacaggcaccgaggctctgacaccccacatttggaatcggctccatactgccacttctcggaagagctacagaccaagctctatggagccctggatggagcctctgtcccctttcgaggatgtggccggaacggaaatgtctcagtcagactcaggcgtagaccttagtggtgacagccaggtttcctctggaccatgtagtcagaggtcttccccagatggagggttgaaaggggctgctgagggaccaccaaagagaccgggaggctcctcaccattgaacgcagtgccatgcgagggaccccctggctctgaaccacctcgcaggcctcccccagcacctcacgatggcgacaggaaggaactgccacgagagcaacctttaccacctgggcctattggaacagagaggagccagcacacagatcgcggaacagagcctggccctattcggccttctcaccggccaggccctccagtacaatttgggacttcggacaaggactccgatctgagactcgtcgtgggcgacagtctcaaggccgagaaggaactcaccgcgtcagtgacagaagcgataccagtctctagggactgggagctgctcccatcagccgcagctagtgcggaaccgcagtctaaaaatctggactcagggcattgtgttccggaaccttcgtcctccggacagcgactgtacccagaagtcttctacgggtctgccggtccatcctcaagccagataagcgggggagcaatggatagccagctgcaccccaattccggcggtttcaggcctgggacaccttccttgcacccatatagatcacagcccctctacttgccgccaggacctgccccacccagtgccctgctgagcggtgtagcacttaagggccagttcttggatttttccacaatgcaggccacggaactgggaaagctgccggctggaggtgtcctgtacccgcctccgtccttcctgtactcacctgcattttgcccaagtcccctgccggacacttcgctgcttcaagtgcgacaggatcttccctccccttctgacttttattctaccccactgcagcccggtggacagagcggctttcttccgtcaggcgcacctgcccagcagatgctgctgcccatggtggattcccagctccccgttgtgaattttggctccttgcctcctgcacctccacctgcaccccctagccttagtctcctgcccgtgggccctgctctgcagccacccagcctggcagttaggccccctccagcccctgctaccagagtcctgccatctccggctcgcccattccccgcttctcttggccgagccgaactacatccagtcgaattaaagccttttcaggattaccaaaaacttagtagcaatttaggcggaccaggatcctccaggaccccccctactggcaggagcttcagtggcctgaactccagacttaaagctactccctccacctactcaggtgtgttccggactcagcgtgttgatttatatcagcaggcctctccacccgatgccctgcggtggatccccaaaccgtgggaaaggaccggtccaccccctcgggagggacccagcagacgggctgaggaacccggatcccgaggggataaggagcccggattgccaccaccgcgttag

SEQ ID NO: 344413 - DNA, 6893 bp, Artificial Sequence
  derived and/or modified sequence
cagccgcggagtgagcgagggagacgggaggagccgaacccggcgccatccgccgccatcctcccccgccccaccgccatcccgtcccggggagcccctaggcccgggtcccggatccccgcgcacccggccaggggacagagactgagacacttgctgtctggcccacaggctctggcacgttttgggggaggtgcctgcaggacccaacatactcaatgagcttccagcgcaatgtccgatcgctcggggccgactgccaagggaaaggatggaaagaagtattcctcgctcaacctgtttgatacgtataagggcaagtccttagagatccagaaacccgctgttgcccctcgccatggcctgcagagtctcgggaaagttgccattgcccggcgtatgccacctccagccaaccttccaagcctgaaagccgagaacaaaggcaatgaccccaatgtctcactagtgccaaaagacggaacaggatgggcaagcaaacaggagcagtccgaccccaagagttccgatgcctcaaccgctcagccgccggaatcgcagccactgccggcttcacagacgcctgcctccaaccagccgaaacgacccccagcagcccccgagaacactcctttggttccaagcggggtaaagtcctgggcacaagccagcgtcacccatggagcacatggagatggtggaagggcatcaagcctactgtcacgattctctcgagaggaatttccgaccctgcaggcggctggcgaccaggacaaggctgccaaggaaagggagtctgccgaacagtcgtctgggcccggaccaagcctccgcccccaaaattctacaacttggagggacggaggtgggcgtggccctgatgagctggagggcccggactccaaacttcatcatggtcatgatccccggggtgggctacagccttcaggcccaccccagttccctccctaccgcggaatgatgccgcctttcatgtatcccccatatctcccgttccctccgccctatggaccccaggggccttaccgataccccactcctgatgggcccagccgttttccccgtgtggcgggcccccgaggctcagggccaccaatgcgcttagtagagcctgtgggtcgtccctctattctcaaagaggataatctcaaagagtttgatcagttggatcaggagaatgatgatggttgggcaggggcccatgaagaggttgactacactgaaaagctcaagttcagcgatgaggaagatgggcgagactctgatgaggagggagctgagggccacagggattcccaatcagcttctggtgaggaacggccccctgaagcagatggcaaaaagggcaactcccccaacagcgaaccgcccactcctaagacggcctgggcagaaacctctcggcctccagagacagagccgggacctcctgccccaaagcctcccctacccccacctcaccggggccccgccgggaactggggcccccctggggactacccagatcgtgggggtcctccctgcaagcccccagcacctgaagatgaggatgaggcatggcggcagcgacgaaagcagtcgtcatctgagatttccctggcagtggagcgggcccggcgacggcgagaagaagaggagcggcgcatgcaagaagagcgccgggcagcctgtgctgagaagctcaagcgactcgatgaaaagtttggggcacctgacaagcggctcaaagcagagcctgctgccccacctgctgccccttctaccccagctccaccacctgcagtccctaaagaactccctgcacctccagctccacctccagcatcagccccaacaccagagaaagaacctgaagagccagcacaggcccctcctgcccaatctactcctactccaggtgtggctgcggctcccactctggtgagtggtggtggcagtaccagtagcaccagcagtggcagcttcgaagccagcccagtggaaccacaactgccctcaaaagagggtcctgaaccaccagaagaggttcctcctcctaccacacccccagttccaaaggtggaacccaagggtgatgggattggtcccacccgccagccccctagtcagggcttgggctaccccaaatatcagaagtcgttgcctcctcgtttccagcggcagcagcaggagcagctcctgaagcagcagcagcagcaccagtggcagcagcatcaacagggctctgcccctcctaccccagtgcccccatcaccaccacagcctgtgaccctgggggctgtgccagctccacaggctccacccccgccccccaaggccctgtacccaggtgctctgggccggcccccacccatgcccccaatgaactttgatccccgatggatgatgattcctccttatgtggacccccggctcctccagggtcgtccccctctagacttctaccctcctggtgtgcatccctctggcctagttccccgagagcgttcagacagtgggggctcaagctcagagccatttgaccgtcatgcacctgctatgttacgggaacggggcactccaccggtggatccaaagttggcctgggtgggagatgtcttcaccgccacacccgctgaaccccgcccacttacctcacctctgcgccaggctgcggatgaggatgacaaggggatgaggagcgagactcctccagtacctcccccaccaccctatctggccagttatccaggctttcctgagaatggagcccctgggcccccaatctctcgctttcctctggaggaaccagggccccgtccactcccctggcccccaggcagtgatgaagtggccaagatacaaactccaccacccaagaaggagccccctaaggaggagactgcacagctgacggggccagaagcaggccgaaagcctgcccgcggagtcgggagtggaggccagggccccccaccaccacgcagagagagtcgcacagagacccgctggggccctcgtccagggagcagtcgtcgtggaatccctccagaggagccaggggccccaccccgccgggctgggcctataaagaaacctccaccacctacaaaagtagaagagctgcctcccaagcccctcgaacagggggatgaaacccccaaacccccaaagccagacccactcaagataaccaaggggaagctagggggccccaaggagaccccacccaatggaaatctttcccctgccccaaggcttcggagggactattcgtatgaaagagtgggtcctacctcttgccggggtcggggccgaggcgagtattttgccagagggaggggttttcgggggacctatgggggacgagggcggggagcccgaagccgggaattccgcagttaccgagagtttcgaggagatgatgggcgtggaggtgggacagggggaccaaaccaccctcctgctccccgaggccgcactgccagcgagacacggagcgagggttcagagtatgaggaaatccccaagcggcgccggcagcggggctcagaaacaggcagcgagacccatgagagtgatctggctccttcagacaaggaggctcccacacccaaggagggaacactcacccaggtccctctcgctcccccaccaccaggagccccaccttcaccagccccagcccgcttcactgcccggggtgggcgagtcttcactcccagaggggtgccatctcgccggggccgaggaggagggaggccccctcctcaagtttgcccaggctggagccctccagccaagtctctggctcccaagaaacctcccacaggccctttgccaccaagtaaggagcctttgaaagagaagttgatcccagggcctctgtcccctgtggcgcgcggaggcagcaatggaggtagcaatgtgggcatggaagatggggagcgaccccgaaggaggcgacatgggagggctcagcagcaggataaaccgcctcgtttccggaggctgaagcaggaacgggagaatgccgcaagggggtctgagggcaagccctccctaacccttccagcctccgctcctggacctgaggaggccctcacaacagtcacagtggccccagcacctcgccgggcagctgccaagtctcctgatctgtcaaaccagaactcagaccaagccaatgaggaatgggagactgcatcagagagcagtgacttcaccagtgagcgccgaggggacaaagaggcacccccaccagtactgctgacacccaaggctgtgggaactcctgggggaggtggaggtggagccgtaccaggtatttcagccatgtcccgcggagatctgagccagagagccaaggatttgagtaaacggagcttctcaagtcagcggccaggcatggaacggcagaatcggcgccctggcccagggggcaaggctggcagcagtggcagcagcagtggaggaggcggtgggggtcctggaggaaggaccgggccaggacgaggcgacaagaggagctggccctctcccaagaaccgaagtcgtcctccagaggagcgtcccccggggcttcccctgcctcccccacctcccagcagttctgctgtcttccgcctggaccaagttatccacagcaaccctgctggcatccaacaggctctggcccagcttagtagccgtcaagggagtgtaactgcaccagggggtcatccaaggcacaagcctgggcctccccaagcccctcagggcccctctcctaggcccccaacccgatacgagccccagagggtcaacagcggcctcagttctgacccccactttgaggagccggggccaatggtgagaggggtgggtgggactcctcgggactctgccggggttagtccctttccccctaaacgtcgggagcggcctcccagaaaaccagagctgctacaggaggaatctttgccacctcctcatagctctggattcttgggctctaagcctgagggcccaggccctcaggcagagtccagagatacaggcacagaggccctgacccctcacatctggaaccgtttacatactgccactagccgaaagagttaccggcccagctccatggagccttggatggagcccctgagtccttttgaggatgtggctggcacagaaatgagtcagtctgacagtggggtggacctgagtggggattctcaggtgtcatcaggtccctgcagccagcgaagttcccctgatggaggactcaagggggcagcagagggaccccccaagaggcctggaggctcctcacccctgaatgctgttccttgtgagggtccacctggctctgaacctcctaggagaccaccacctgccccccacgatggggacagaaaggagctgccccgggagcagcctctgccccctggccccattggcacagaacgatcacagcatacagaccgaggcacagagcctggccccattcggccatcccatcgacctggtcccccagtccagtttggcactagtgacaaggactcagacttacgcctagtggtaggagacagcttgaaagcagagaaggagctaacagcatcagtcactgaggccattcctgtatcacgagactgggagctgcttcccagtgctgctgcctctgctgagccacaatccaagaacctggattctgggcactgtgtcccggagcccagctcctcaggccagcgcctgtatcctgaggttttctatggcagtgctgggccttccagttctcagatctctgggggagccatggactctcagttacatccaaacagtggaggcttccgccctgggacaccctcactgcacccttacagatcacagcccctatacctaccccccggcccagcccctccctcagcactgctctctggggtagctctcaagggccagtttctggatttctccacaatgcaagctacagagctggggaagttgccggctggaggagttctctaccctccaccttccttcctctactctccggctttctgccccagtcctttgcctgacacatcgttgcttcaggtacgccaggatctgccatccccttcggatttttattctactcctctgcagcctggtggccaaagtggctttctcccttcaggggctcctgcccagcagatgcttctacccatggtagactcacagctgcctgtggtgaactttggctccctgccgccagcaccacctcctgccccaccttccctttctctgttacctgtgggccctgctctgcagccccccagcctggctgtgcggcccccacctgctcctgctactcgggtgctgccttcacctgccaggcccttccccgctagcttggggcgagcagagctgcatccagtggaactaaagccgttccaggattatcaaaaactgagcagcaaccttgggggacctggatcatcacggactcccccaactggaaggtccttctctggcctcaattcccgtctcaaggccacgccttccacctacagtggagtcttccgcacccagcgcgtcgacctttaccagcaggcctccccaccagatgccctgcgctggatacctaagccttgggagcggacagggccgccacctcgagaagggccctcccgacgggcagaggagcctgggtcccgaggggacaaggagcctgggttgcccccaccccgctgagggagttcctcttgccccctacccccggggcttgtatatagattataaatatataagggggaaaggggtgggcggggaggggttctggggctggggcctcacttcccctcctcccccttcccctggtcccctgtccctggggctgtttgttaaaaaagagtaataaaaggatttaaaaaaaaaaa
